United States Patent Application Publication US 2021/0254056 A1 - sequence listing, part 18

SEQ ID NO: 37142 - DNA, 553 bp, Homo sapiens
gaagggcactgtactaagggcactttggaatttttttttagagagattgcatttttggttgtcacaatgaataggaaaactacttggatttaatagatgagagcctaggaggtaccgtcccagatgttcatgtgggttcaaagcaacaacaacaaaatattgataatcaattacctgtgccttgaacctaactatattttccatgtaaaaacaacatattttttgcgtggattcagacatacctaattttccatgaatttaactgttacataaaacaaataaatcttgaactttgctttttggacctttactaggatttgttcaccttttacagagttatattagcattggcaacactagctgtattcagtataacacacctgtattaatctgtgtttatagttgtcctgtttatggtggatgtatgaataagtatagaatttgactccttcatcacatcttctcgggtagctagttctaagcatttccttattgaaatacatattactttattataaattaactcccttttatttctcctttgcatctttcc

SEQ ID NO: 37143 - DNA, 1946 bp, Homo sapiens
gttatgtgtaggtagattatattatctataaacttaattgcaggatcataataattgccctacaaatttagcggggagagagctttgctcttgaccatgcctgttgttctaactgataccaatgaatacacactcagccctttgtctgccttctttgctttagtgctaagaggcagaaaggactgacaatagcgagctaagcctttggggtctgtatttcaaataaaacaggagtgatttttacattcatcaatggcaagcctgggtttggacacaaatgcaaaagatgcctcctatgcaatgtcatttgagagctaattctctctgagggttaaatattaatccaggatcttccatgaactgttctgcacacactagtttattagaggacacagattgggataggactctctgttgatatgggggaggcagggccgacacagctctggaactccaggcgctcagaaagggaaagagggggaggtgaagaaaccacactggccatctgggggtaggaaggagtgccaagggaagcagcatgcacagggccactgagaggacttgcggccagtgataccaacctcaccgtttgccttggtcagctcgctggggtgactgaattaaccacatctctctctccttaattggagcagataattggcaagctggctttgtgcacaggaaatgtgttcagatagatttggcggagtgtggcaggaagaatggggaccacctgatttcatcttgtgccaaggagggcgacacaaagcgccagtgtctcctatggagcctggcccaggcagagcattgggggcagagagccctgtgcaaacccacaggccggtgctcccttcaggaacctcagctggctgggctgaactgggagcatgctggagcagctgatgctcaggagccctggggcgggctctgtggttcagctgctttgtgactttggccatgtaatttaacctctctgtctgtttcctcatctgcaaaacaactgaaaaagaaatgttataacgcctttaagattatgtcactccatcccatgcaacccacagatgctgcttgaatgcctactctgtgggtagagctgctctgggagctctgcctacttcctgttgatcccttgtaggagtgagaggagtgtaaaacacaaagataaaccataaacaaatcactgcagggccatttaaatcttcaccttctccccagaaaagtcttcagcactttcacgccaggttggaaaatatggccaaacctcctccctcagccctttgcccaactctttttcagaagtacccccaggagagggattatttagagatagttgttgccagggtgacagaaaccaaacatcaacagaagtgtcactatttctaaggacactttgagtgaagtgctcatctgatgaccgaccccatgactgccagaggctcttttccagctttttggaatctttatcttagaaaaccctttgttgttgtgaaatgctctcaggtccagaaaggaagtgagggtcagtcagcaatgcaatcgcaaccccctcagtacacacaagcagcactgtggaatagcaactgtttttgaaggactcatcttcatttgaccctggcttagagttggtctatgagggctgtttcctggggatttccacctgaactgcaaagagccctggccccagctcatgccacgtggaggatggagacagctgtatttcttgtgtgactttctctgtgtggcaagaggtagatgaagggagtcaaggacagagcaagtctctctacaatcctgagcatcaacatagcaacagaagcattttgtgacttgtgttcctaagggtaagtttaggacaaattaccaaagcacatagaatacacatttgtaactgacattattatcattattttgcttttagctcaagatttattcttcatgatctagca

SEQ ID NO: 37144 - DNA, 3363 bp, Homo sapiens
gctgtaccctatgcctagaatgcctttcctcccattccccctaaaacttctatcaaagcttagagccaccctgaattgctctcctctcataacccacatcctgtctgccaagacatccaggtgggcttctatatgctgccttcagaaaacacctagaatctgcctttgagtcaccatattggtagtgaatacctaatctctgaacatgtcctctcttacctgaatcactgcaagagcttcctaaatgttccctgcttctgcccttgcttccctggccccctgtatgctctcaacacagcagccagagtgacctccttgcaacacagtcagatcatgtcatatctctgctcagaattctccaaagcagaggtgggctggaatggcaagcattagttagtgagggccaatcctgcacatctctcccctatctgtggtcaggaatgccacactcatggcttgaaataggccaaggtgggagatttaccacagaaattggcaaatgctacaaaccagggctttttatttttatttttctgagacctagttggccagcataccgctgctcctatgatggtacatttctctcagagtcaaagtccaggtctttaaaactccccacaaggccctctgcaatctgaccttctctcctccttccttgccctctgctccagtcacactgaccttgctgctcttcaaacatgccagcacattgtagcgtcagggatttttgccctggctgctccccatgtctggatcacttcccccaggtaaccatacctgggctctgcttattccttctcttatggtaagttcttgctcaaatgtcaccttctccttgaggcttacctgaccacctccccaaaaatgctaaacccctctccaactctcctgacctccttacactgttctattttccccacagcattctaacccgctatagaatgcacttacttattctattttttattcatatttatgcgcggcatccctccccgccaccccactagaataccacctccatgagggcagggcctgttttcttccctgatgcattccagcacctataagggtgcctggcacccagaaggcactcagtaagcatttattggctgaccggctaacctgatcttcaaatgcccacctgctctgtatatcttccctaaacttagcaccttcctgccttcctcctctccatccccagaaggtccaggcttttgtccctctatgttagtggagtcctctttgtacatgaagctgctaaagtgcttctgttgcaccataatgattttcttactaatggcctcccccatcagctggctatgtctgagctcttcaaagccatctccagcacctatcccagtgcctggcacatgcaccaccccattggtctattaaatgaacatatgaatgtatagaggaacagtagccagaatttaatttttcacattgattccttttctcctccagaggccccctttggtgatagctctgctaggaaggcctagagcagggagggactgggagatatcatagagggaggcaaaaggggtgcttctggactctatgctctgagcagtctggttatgactatcatgctcctgccacttctctgctcagccgttactcctgcctttcataagctctgatctcccttgatccctggctagggtcagctttacacacagggaaagaagactgctgaccgtggtgtgatgccaaggcttcaggaagggttctcattcccaaatactttctttctctttgtgccactttccttggagtcttcttggaaagcaaagcctcagctacctggttcactgcttgaggtcgtgatggatgcgtagagtattttcagtttttcaaaaggttttatggaaatgctgttgtttctgtgttgctcagagtctagtgggggagtcggaagcatggggttatggttgtggcagaagcttccaaggaaaagctcaggatgcaggaagaatgcctgaggggaggcctttggctgggagcacggaggggtccaggagaggaactcttcaggcagagccaacagcatctcggtgagcacagggcagtggggaccgagaggccgcccgggctggagggcagtgaacacgggcagcgcagagtggcaccgaggagggaggggctgattgtgcaggcccctaggccatgacagggcttctgctttttactggaggccacagggagccatccgaagctgccccctctaaaggattttcttgagcgggaagtggcaggatcagatctgcgattgagagaagccctccctctctcatcctcccgctcaagccctgtgtcctctaaagccctggctcacggagcaggaaggtggcctggagcccagcaggcactcagtgcatggccagagggaacgggaggcccaggggtgtgcaagagaatgggcgcccgagcctgcagagcgcctggcagtttagagcggtcccgccatcttcggggtcttccctgccacagaggcttctgaaggtcgaggcccctcgtctgtccccagtgacgcccctgtccacacgggccagctcactcctgctctgctagccaggcctatccaggacaaagaaggggctgtgcccctgcagagaggggggtatcctttcccaaccatcaagtgagaaggaagggtccacacccaaagctaagccccaggggaagacaggatgtcccaacacatcctgtagaagcacctagtcatcttccagttaccaatttgccttacttgttctgttcaaatagggtaattgtttccccaaaaagacttgggtatagtggaatgaagtcaccagagacgtgcctaaacaatgacaaacaccggtcctgggtgcgccgaaaccctggtaaccagttactcagactgcggggctgattttatctttcctgaagcagccgcggagcaaattcagtgatggcacgccccctggtggtgatacgaggttctaccaggcagaaaggaccgttctggggagcgactcctctgggtggaacggagaacgggaggaggaggaggtttccggacgttctcagcggcacatattcatggctaataataaatgttgatctgttgattgaaatatgaaataaaagtgattaatataaccattagtaatcaaggtattggaatgtgagaattttaataaaaggtaaatcatcagccaaggcaggaagaaagcagggagagttggtctgataagagaaataacttttgagagcgtccatatactttctgctttgacactgtgggtattatatactgtctttgtttacctaaggcagcctctctttttattttgaaatttttcaaatatacacaaaacagtgaaaagaact

SEQ ID NO: 37145 - DNA, 2078 bp, Homo sapiens
actatccagaatttgatgtattcccttctagttcttgtttctgtatttttagtacatgtgtccatgaacaataaaaatgttactttatattttaaaaatgtatcatttcatactgtagcatactgcaatttgctttttacattcaacatgtttttgccatgtttatatatacatatatagatctaggttattaattttaactgccatattgtaatttatggcaaacatatgccctgtatttattcatttctctattaatgaacattttaatgttgcaatgcatacaatacctagaagaatatctttagaaaatttaaatgaatgaggcaggcttttaattcaagcagtatccacataaaatctctcaggcagactatttctgcttcaatttttttattttttatttttgctgttcatatctactctgcatgcatagaaggaatcgatacctgaaatttcctaaaggtcttttactcagtccccacaaaaaagctctgatgtggtgtgtgtaaaggggtaggagtgggagaatgaagtgggtagagacggacacaaagaaatgtcaaaatacaggacactgaaggtttggagccggggccagtggcagcagccaaagttacaaatatcgggaaggtctgagagtttacagtgcagagcatgtcctgtgctatcatatgcggatgacaaaatagccgaatacacaaatctttccacgcttgtgctgaaagatgtaaccatcaagcgccaggcggttgccatgggaacccggggctgtggggagtcggccagaattcttgatgcgcttagaatgtttcttcttccggccctctggtcttcgcaattatcgtccctctcctaggtcccccgcccattctataggctctcatgagtctcttcccgtcttgattctctcgctcagcgttccaggtcgccatcttggaccatgagtcaagatggcgccccctggtcccaggggcacagcccaggcacgctagcgaggctacgcacgcacgtattcgggcgcgaagggtggggcactgacgccagacgtcgccccgccctctgtggtcgctccgcccccggccccactccaccttcctcccaccccgggaacccggaagtggaggaggaggcgcggcggcggcggcggcggcggctgcggtggccaagcaggcagatactgcctgacccgttcccgggagcgtgtctgggtttgggggcgggagacaggctgagccgcctgggcggcctggcctgtacggggcgggggaggccatggcctcggctgagttgcaggggaagtaccagaagctggctcaggagtactcgaaggtacccatcgtggtctgggagtagggggtcccccgccctgcggcctcaggttgccgtggcagcgacttgtcgggacctaggggtactgcgggaggggcacgcgagcgcgccccacctttcccctcagccgtctccgtccaccattacggtgcctccacctgcagctcccaggagatggggccgggcggtgtctgcgtccgtgagcgtttttgcagggagaagctggagtttgattcttccttttcactgaagtagcgggcttgggactgggatgtcagaaattctggcttcttgcctctaatgctggctgagaagggaagggaaaggtgtggaccactcctcacctcgctgcttcctcaattttctcagcctagggatggggaagatcaacccttctcccctcccacagggatgatatgaggttaaagagatttatcttcccccgaatcaattcgagagggtaaatagagacattcgggtaaactgcttcactagggatgggtggttatgaatgtattcactgctttggcaagaggttgtcaggaatgattttgaaagcttgagtgctacggctctatccttttctttctcttgtccctcggtcacctagaatggggcagacacccagcgggtgctcaatacacattaagcaacatggggacctgcccctttctcgtgtttatggcatcagtcttttaaatgatataaccctttccttggaaaaggatgctgcagtttctgggtag

SEQ ID NO: 37146 - DNA, 1096 bp, Homo sapiens
tacacaattcatagaattaagggggcaaatgaagagagaaagtagagataccaaggagtaggaaacaaatggtaaggtagaatggatgctgctcaacataaaagaatgccttcaagatctctgacttgaaactttatattaaaaagtcagttatggatggcagatagatgattataatgcttaacgttgttaaattgaaaaaggaaagataaaccctttattgagacctgactttttgattttctcttatactagagttgaagaggttgataggaggccagttgctaaaagtgaagaggggctttgcatctttttcctgctaaaataaattgtgtgcttagctcagtgttgttcacaagcagccatcgaatacatgtttgataagctgatcagtagtgacagcttgttggaatgcaggaaagggggaggacagcaaactgaatggctagcagtggaaatgctgaatcactaagccggcagtccagcaggcatggatcctcattgtttggttctgagttagtgtctcagacttgattgtccttttcacaaggacctgtgccttgcatgcctatattcctctttgtcaggttcattgctgagcacagaatagatgtttggttaataggaggcggttgacttggttggctgaactgccctaaaattttgtgagaaatgaaataagtagctgaggaattttttttaggctgtttgatttccaagacatttagttattttagtaaatatcttctgtgcaattgtgattcaagaatttttaaattgtcctactttttccttattggtaaacaggaagtggtgacctcccccctcccacatgactttactgctctgagcgccttatgttgacatagcatttgcatgtgtttcaacagattctccttgtcagtaaccttatcagaaagtttagtgagccttttaatttcataccctctttgaacaatattgtgaaataggatttttcttttatcgttttgatctacacactctctggatagagtaggattggtagaacccctaaagaaagcagcctggaatttttgcaatcttgtgctcattttttcccttgtaagtagcgcat

SEQ ID NO: 37147 - DNA, 936 bp, Homo sapiens
tagcactactccccaatccacactcctgctctgtgcaaaactcctgtctcctcattaattctatttattcaactccttcaacctttgtccagagggtctcttttcagatcagacattctgttttgtttgttaatttatagcttttgacatttattattatcttccaatgagacacagaaagaatataagaagttaaatgttttcacaagcaaccctagattcctgtgtccctttgcgggggaggaaaatagaaagaaataaaagctgccagatagaaggcctgaaataaatgacctgcaccacccataggcaaattctacctctttgtaaagaatgtttcataggagggaatcaataagagctgaatatgaaacattggtgcagtgcactagctaagttcagtgaactcccaagctaatcctgtgttctcagaagctataagcgccaatctcttcacctttgctcagggggatgagctcaccacagaaactggcctgttttttgacctcaaaatccagttgggacagggttgggggatggcagaagcaatgaaagggaaggtttccaggccatttgttctaaactgaggtgtgctggcagaagcgaaggacaaggttgagtctccatggccctgagctgggtcacacagctggaatcacactttgctcaacacaaacgtctttcactttttcattcacccacaagcaacacaaggactgcaacagaacactgatgagaagaaacaggcccagcgccactggtcactgtcagtatctaggctacctagtaaagcaacccccacacgacccggatgctaaataaacgtttacatcagctcatgtttccctatgactagctgatcagtatatcgaattgaaatataataaacaccaaaaggaatgctggcaggaggctcagtattttcagtttttgtac

SEQ ID NO: 37148 - DNA, 821 bp, Homo sapiens
caattcataccagtactaccaaagaccctttcacccaaagctgtatttcacagaggaagaacaattacataggatataaacggactgagatgtaagagacaccactcgaatattctgtggttatgcagcagggcaagaacatcacacctggtggaggtagagtcagtactgggaggataccctggagatggcaaagcaaacaagaggaagtgcaaggtgagtctgcaatacaggcagcggctgtaactcgagctcaaccagctcaacaacgtttaaggaaacatgaaactggggcaatccactgtgtaaagaggacaagggcagctggctcagggcaaacataagcatgtgggtggagagcctgcccagagtgtattccagggacaccaatgtgcaacaacagcaagtcaagtcactgggggaagtaattcatgggccaagtgttctgtaacagttggtgacatattttatgcaaatgtatctgtgaattataacttcagacactcttgaaatagagttgttttttttttttggcagaaattaggttttgtagggggaggggagagtatttgttttgggctttttccaactcaggacttgggagatttgcacgttaaaaggctttcagaaaagtccaattatttacataactacagaactgaaaatatatttcaaatgttacttagtccaggctgctgaccagaaaaagaggaaccttaagcaatttaaaactagcagttgtctatttaagctactaaggatctctagtgatacagattcacccaccacttctgctgacctgttctcacatttatactaga

SEQ ID NO: 37149 - DNA, 765 bp, Homo sapiens
aatgtaactcttcaaatttctgctccagcatctacaagtcatgtcatctaggattccaagcttgattttttttcatccataaaaccatgtaacacttttaagcatatttgagtattcaatacatcttggcttttcctaccattattattatttttgtttccattaaaacaccacagaaatactaagggacaattaaatgagtagatattttcagtaaaataaatataaaatcatggttcttggatcaattcattattgcaactacccagatcaaaggttattcattagaatcatggactggaggctttctggtttgctggaaagccccaagtagagactttgtccagggacttacaggcatggacattgatttctctttccaggtgagaatgtgaccttgttggtgctgtgtttggctcaggaactgggcaagcctcaaatgaataaatacttatctttcttttaaaaataattatggaagctttgtgttgccaaccaatttcttcttatatttgtcaagatcctgacttactctaggtgtcattggcagccacttcccacccattaagcactgtgaggatcaatgaaccattgttcattgcaccaagaagtgaagctttttatggcccctggattttgtaatatttggtatcttactctgtgtgtgctctcttctcactaacacagaatccatgtggaaaaaaatggacactgttggtttttttagctatccaatgataaaatttatatcattaaaaatatgtg

SEQ ID NO: 37150 - DNA, 1387 bp, Homo sapiens
tctgtgtaaaattgctttcctgctgctctgagtttttgttgtgaaaaaaagccaatgagtaaatcaattcattctaagtatctatgaatttaaaatgttcacccttttcaggaaatggacttgcacaatgaaagagggtaatgcttaactttaagaaatgaaactctaattgtggatatctggggaaacattgtttggagaaagctcaggactattagagaaataaaaccttttttaaaagatcagaagtctcaacacatccacctattttttaagtaggcctgagtctcaaggactaagtagcatttatgaaatgggaattgtttaattaacacaatttaggacagataattatgctctgctgagttataaagacagaagatagaggtttgtggacaggaattcaacccatctggagggtattcccagagccagtgctgaatgatgaatggggattcccatttggacaatttttgctttcaggtggcaaagtgagtcttctctttgcactaggggtttagaacctggaattgtggcaaggcatgaaactccttctgttcatgtggaaacagagctgggaattaacattcattttgtaatttcctcagagatgaagtaggctcagttatctgcatgaaaggtagctgtctctggaaaagctaaagatgtgatttctgcatttcctcacttaatatgcaccaagaagtggacattgaccttcagagagtagagctttcatttattgggtaatgaaccaatttgctgtcaaattgtttcatcagatgctattagtcacctgggatacagtggataaggattttaattttattattttcaagggacaagacttttgggactgagcttaatttaggaagacacagtagagtatgcattttctgtagatttctaagaacgagtattttaattattttgagatgatgagttataaaaggtctgtgagttgatttactttttgtaaaccctttggcttgataacaggaggtcaaattccaaatgataattttacctctatggcggctggactgtcagagaaaccttgcagtagaagcctcttcacaaaaaaagaacaactcacatccatcgaacaacgcttcaacttaaccattcaattttctttccattcagggttcagttcaacttaactcatggacagcaccttagagtcagatacacttacctgagtggactcaaaattggagaaaatgttgtttctacctaaaagaattcccttgagtctgtattcatctagacacaagttgatatttcattcaaatgacagtaaaaaagtcattatctatttcaatctgaacgccagctattgcatctaaatatatggtatccaaggcatttaaatttctccacagta

SEQ ID NO: 37151 - DNA, 1313 bp, Homo sapiens
gaaagtgctcttaaaattaatatataaatttaaatgagattttacatgagattgctaatcagggtcagtttttttaattgtttaaaataaccttgaagtttatgtggcaataaataaagggagtctgaaaatagcaaagattatgaaacataaaattgtgtcatgtattgtaaatcttttgcctataaattttaaagacaggttatcagttttatcagcaaagatggctagagtgttgattggagtcgtgttagatttatagatcacttagagtaaaattgacatacaaaatatattaagtattcagatccataacatggtatactgctaaaattatttttatcctcatgattttcaagcataaacaggcagattaaaactctgccttaatcttcctttcctgattttacagaattgcaacatcaattggaaggaaggactttggcctctttcaggtctttcctggtcatccacacaaccctgtagacgcttggtcttctggcttttcagtaacatgttagggcttttcaaagttttctttggacatttccttccccagctttagtcagcttcttgtttgctccaactgttatcaacacctcttgtaagctgccatattattaaactttttaaagttaactaatgtccataaaaattattttctgaatgatccaaaccaagtcagctctgactaaggtcaaatacatacaaggcctgtgagagaaggttttcagataactggagaggggtcagataatgtcaattttctgtgaataaggtttaacatgagttccaagcccattctctctccaccagtgagtacctggtaagctactattcttcacgaatactgtgatagtaagttttgggcttttagggttaccacatacctgggagaggggagtgtgacttcaatgagtttaaacaccacaaagttcgtaactcttactgagacagtcatttttcttgaataaatacttctccgattgttgcatgctttatttaattttcaaagttctgaaaaagttgatattggcaatttttgccaaaatttttattgattttacagaggggcagatttttggagtccctgacctgccatttctaatggtaattatcctttgacattctttctttcttccttcctttccttctttttttccttattaaactgtctaggactatattaaaataatgcacataggtaatgagagcagtatctttgccttaaacttgagaattaactacaaccttttgtcattgagtgtgatgtagggtttttttcaactacatactttattatattgagagag

SEQ ID NO: 37152 - DNA, 918 bp, Homo sapiens
gtcaggtaaacaactcactagaagaagaaacgccaagacataagacatgggaaaggcaaacgtgaaaaaggcaatgaattcactttactggaaacagtgcttacattaacgtagaaatgtaaaatagtgagacccccaggtatcttctaccacttgtctctcagaatgctggctgtcagagaaagtgggccaaagggcggaaaacaaacacagagattaaaatttggtagtcagccaaaaagcagctgagtcttatctaattactataaagtctgacattcaaaagtcaaactctcatgtattaatagaacttctagtcatctctgtatgcttcattttaaatgggaatgaacattccacggtcaccatggttcagagtaatgagcaagaactgcacacatagacccaagaacacttgtaaataaaagaagatggcatggatcaagagaatatccatgatgatgtcagttgtgttagccagtaaacagggtaaatcagcttgccttgctgcagtagtaaagaggggcctacacatgctttttataataaaataataaaattgccatgtttgttcacgttcagatcacatgcacaattctgttacagagtttgaaaaacaaacatttgaatagaaacttagtaaatcattaaagaagtaaaaataaagcaactttttaaccctggaagagaaaaattttgtcaaaattataaaatacaattatagctccctacataccctgctcagatgtatatgtatgcaaagttacaataagctaaacataattcattgaatcaagttagattatactatattgactcctaaggagtggggagtaggagttaaaaatgtggtggtgttgaagctctgagagctaaatctgcacatttcccagagccaatagtgtctttaatactaaa

SEQ ID NO: 37153 - DNA, 528 bp, Homo sapiens
cattatacgtcattttgcttaaagatgcagtttccaaggacctacggatgatgctaagtgaggacttactgtagtatctttgtaaaagagatcccagagaagtggccacctgctactgccttccactctgtgagaacacagcaaaaaggctctatcaatgaaccaggaaacagtctttcgccagataccaagtctgcttgcactttgaccttaaaattttcagcctccagagcttttctgttgtttatgtcatctggcttacagtattttgctacagaagtgcaaatagtttaagacataagtagatgatcattctctcggcttaagtactaaattttcagggacaattttactatattaatgtggtaaccccttgaattgtgtgaaaaagcacagctacatgctaattgtgagaaagcttttccttatactgtgctaaaacttgtgttcctgaaatgtatttaaatcagtctttgactaatggaagaacaaagactactcccttacaggaaaattgttctaattttt

SEQ ID NO: 37154 - DNA, 2772 bp, Homo sapiens
agtcactgcaccaaggttagagatggtgagagacagacataggtcccagttgttgtcatgagctctagttattgactttacacatcctggttttctttagagtagcactctggatgaccaaaacagcttcagaatcaacacaagacagagggtacacagcctgctctaataggtcagtcccgcaattgcataaggtttaactcttaaagtaaatcattcaataccacttgacgatctgtgggtattctgcttctctgactaaaccttgactaattacaagggtctgcaagaaactttgtagaggtaataagtcgattgtaccaatggtcctaattatccatgctttttttcctgaaattatacagtccctccatgctctgattttgggttcagtcatgtgacttactttaaccactgagatattagcaatatccaaccttgaaaagtatatgctcatttttccttgtcatcttccacagttgagactgtttgctcttagataccccactgaagggattgggctgctgaagggataggaggtattaaaaaccactctaagcctagtctcccttagctggataattattcatgacatgatcaggcctctgtgagatgagccaaacctagccaagattagcagagcaacatggctctatcttcacgagaaatgtttaaaatgttgattatttaaggagtttggaatgctttgtaacataacaattgttaactaatgcagtaagcacagatcaacttactgcaaagaaatatttcccatatctaggggctggagaacagggaggaaactagcacttattgactattcaccattcatgcctttccacgttttaaatatatgctattatatttaacacaacaatagcaacataaaggagatactctttccccatttcataaataaagagacaggcaccaagttctgctgattatctaaatgcaataaaatataatgccaaataaaatgaaaaaaacacaagcgaggagacatttaatctttagaagatgatatgaggaatgttgcaattacctgtctgaatttcatcattggtggaatgtccaaaggtacaaaacagcagacaaaataatgagaacacattctctgggaaacacagacaagttaaaggaagaatgttttgtctcagccttgttttggccctgcgctcagcctcacttttaactcattttacaacgagtttgataaattcaggaccagtacttaagccaagatcaatactgtgacttccaacatttcaaatttatagaggagaaactatgactcatagggactgagtcattttttgaaagttaatacaaagcaacactttgtattaacatagggtcatttttccaaagagctccaagcatttgatgttctacaaatctgattcagtattcttgaaatgcagaactgagagatgacacaactgaaacagaaaacagtgaagtggctaaatctttgtctttaagataatctttaaatgataaatgaaatcacctgaatgaggtgaaagactgaaaatataatcaagacagtagcgtggagggaagggaagggttgaccacatttcagatttttaaagtgtttaactccccttcctagctattttctattaaattaaattaaatgaaaataaaatataatggttttgtaggaaaatctcagaagtggctcccagtactgctctgttaaattgttaggtgaaacctggacttagaggtacagtacctctgtatacatattaggacgaccatgggcagaggacaagttaccagtggtgcacacatcacatagatgtgatccatatgttactctcagatttctgtttctactcagttgtattccctacagaaaaagatattcatattcataagtggttattttctagataaaatgagaaatatagctataatagtgaaatgagaaattaaaaaacaaaacaaaacaaaaaagatggcttttccttatcttttcctaggtaagggaccaccttcaggctctgctgataatggccgtgtggtctacttagtaaaattcacttgaaaaaccagacatctaaacccattttattcagaattagaaactaaaactgaaactgaaattagaactgagtgacattttaagttaattctttaacggcttatttgttgttctttttcagtctgcacaagcccatacaaaaataaaatcttacttgtgattttatgcaacataaattatatctcttccacacagtccacatagaaaagtatataaatctatggccagcaaatgtttgctattccattactatgatatttaggagaacaccaacaccagatcctcaacactctcagttggaaataaatgcacttttttcccttcttattttagcaaaaaaaaaatttataaattcgtttcacataaaaataactagctcagtataaggaaagactgaagaatgttgtaaaatagaaggatacagaaaagtggaattgagttttaggcattcgtaaaatatttgttcagaaatctcatattatgtaagtctttgctcatttctaagatacacacaaaaaatgtttggacaaataactattgaaaggttgtcctgtctccatttttaccaataatcactgaacattcttgaaacacttctgttcctcacctatagatattaccacccaaaactcaaaatgacaactgccctgtatccagtagataattattaattttgctgcaatcacgaaagaaaatccggtaggtttaagcatcat

SEQ ID NO: 37155 - DNA, 832 bp, Homo sapiens
aaacaaggaagactggaggattctgggatagcgcagagtttaagagcacagacaatatatttgatatcactcgcctgacgcacatactccttcttgccaaagggtttgtgaaggttgagctatcaaaactcagccacagtccacaggctgatggcatgtctggtttgggttttcccccattattctgagtaaagataagtaagcaaattaattcaatgctgccaaactttctctaaccctttttaaaagacatgttgatcaacagttatttaaaggaaggacttttaacagccaaaatctcttacagaaatttatatttccttgtaagcaatccatcatgccatctgttttaaagatgtttaaagaagtggcccaactgaactcttgtgaaataactacaaacagatagaaaaaaaaagatgaatgtccaatagcccagcctttcagagccatataaatgaatcactactaacaaaaattggactagatggtttcataactcaccttctgacttgaacttactgcacattcacacggggaacagaaaagtaaaaggacctctgtaattcaataaagcttgtgagcattttgatctttgcaaatatgtatctgacaaccaaaatgattttattgtagaatcactgaacaaggttttgcatgccagtaggacactatgtaagctaattaaattccatcctattggaaaatgtgttctccattgcctttcaatgcatttgattttaacattgtattacaaattatttaatattgattatttttctaatggaagtatcaatcctactgtgtacgtgtcattatttttccccaactg

SEQ ID NO: 37156 - DNA, 539 bp, Homo sapiens
ctttttccatctcataataaatattccctcatctacagttagaaactgattgctgccttacatggtgctatactgttcatcaatgttgcattcattcatacatggatcatataaagtgactacccatagtcccctggtttgtgcaagaattcacacagctgactagattctgtttggacacagctctgcctttgagagatcttttccacaaggcagaataaacaaatgcccatgatgtaatccactagacacagtgtgccaaagaaataggctatgtcctgctgccaaaataaactccaaaagtatggaatacatgtttcccatctaccccttccaggatacaaaggtaaacttttcttttctgttttcattctgaacattgaaatggcccagctggttctaaagctttcctgggacctccctgacacgcacccctaacacacatacctcacacacaatttaattgaagtaaatcttctagaaaactccaagtctctcgcaaccatccacttaaaatatataatttctaaaggacagcc

SEQ ID NO: 37157 - DNA, 1808 bp, Homo sapiens
ttttagcattcaagatcatggtataaaaatcttcaagaaagaacaatcacttggtaaggtttctgttttcacacacagagacacagccatgatagtccaagcgaatttcctaaacaatattttgcagcaagagctctaatgagcagatcttcaaaaaattttaggatccttgaccccttggagaaactcatgaaagctgtagtttccccctagaaaagtgtacaccccaaattttgtatacaaattcaggttccccagctcgtttccaaagcctttacaggggccccaagttaagaacatttgcctgctcttttgtgaacaagccaatgataatactaaagatgaataaatttgtgtaaaatttaaatatataaacaattcccattgaaatgacagctactctttcacaagcgtaaacttctattgtaaactttctgcttttatttgaaaggcaaaagacttttttttcaggacataaaatcaaatatgaattacattcctctggctgctgttatataggcaaaaatctaatttccaaagcagaacaaaacgtgtttctaggtgctttgctacctgcggtgctggtacaccgcctccgtatctggacacgagtgacgactcctgctcttttctccttcctcggccccgttagaaataagcccagttccaatttcagagccaaatagctccaaaaagcattgtgggtattgtagttttctgcacacgggcactaaaggtaggttagggtgatttacggatgctgcaaaagaatccattgcttactacaccgaaggtcaatgcctcttgacaccctaatcaaggaaataaaataaagctgactgagatccgctcggaaaatctttctggatctaaactcccagtgcgctttgcgccccaagtggccatcgcgcctgcgccccgcgcggccggttactcgcttaccggaggcttcagtccccggcggcgcggcgacagctagggttcacggccactggggcagaggagccgcgagaagatgtgggtttttggttacgggtccctgatctggaaggtggatttcccctatcaggacaagctggtcggatacatcaccaactacagcaggcgcttctggcagggcagcacggaccaccgcggggtccccggcaaggtgaggcgccggtcagctccccacacttactgccccctgacccctgctccccaactccacacacagcacccacaccctagagaaccacaccttagcgcttcatggggccaaagcacatggcttggggtaacatttctgtagattttccctgccacctgcccgccatctctaacccagcccgggcactccttccgaagctgcttaagatgccggtggttagtctctagagacggcgagaagcgcgggcacaggcgcacgagctcgcaccaggctgagtgcggagatggggactccatctctctgcaacctctgccaaaagaaaaaaagtcccattggcgggaagatgaatgctcatgtcaccacagagttgaaatagtaaatcaagttgcaaattcagctttttagcaattaaatttgttggcatttctgcattctagccgactttcatgagcttgcgattaaacgtgcatgttacttctaggatttctttacatctttcaaaagttttattttctgacacacaggattgcagaatgagtttccaaaattttcgctggttattaaggaactcactttggttttcagtactagtgaagttaaatgaagttctggttatatgaataacatagtaccaaactcattactatatccagcatta

SEQ ID NO: 37158 - DNA, 1897 bp, Homo sapiens
atctagcaagactgtcgagctttagggaatggtaatttctctaaagccaacactctatgtccattatattggagatcaaaacagacaatggcattttttctaaagagggggagggaaaaacaaaactttttgtctaatttggggatgcagtcagacgtgacttagttcataaacacacacattcatctggcgctaaacctcacataaggaaccttaccagcttccttgataaaacaacaccccaacacttcaatctagagatggagggtaaaaatgtagggttgtgatgtctagctgcccattccacgagagtcgcccaccacgccaaattcggaggcttgcggtattcacctacggggagatggcgggctacctcaccccaggtttcccctaacacagagttgcagtcgctgaacaaactgccctgcgttagtcagaagctgttaagtaacgagatggccacggtccacagcagaagagatggagataagcctcaagcgggaaaaatgaagtgtacaaatgccaaatgcggagaaaaagaagaaaagctgcaagaaggcaggtcagtcaggaacaccgccatttctcacatctcatcgctacttcgaattttctcatctaaggacccgcacccgcacggttcacactgtcttcttcccgctatcactccgtgtgggtcaaacctctgcctgcccactggagagcagcgggaatggcttcaggaagcggctgccgcctccgagactcaccgacctgccgtgctgccacttctacaccgaaatggctggtccgaggccgcgtctccagagctgcgtcccagaagcccccgctttcgatccccaccgcgatgctgcagccgtccgaaaacgagagacgcgcaggcgacgtcccggcccccgtaggcggacggctccgcgacccccggatgttgatatgtcgtctgccccggaaacggtgacaggaggctcaagggggcggaggcggcgttgccgggctctccggaaggagacgtggcggcggttgggccggtgatacccgggcgctttatagtcccgccgcctcctcctccacctcctcctcctcctcctctcctcctggagcagaggaggttgtggcggtggctggagaaagcggcggcggaggatggaggaaggaggcggcggcgtacggagtctggtcccgggcgggccggtgttactggtcctctgcggcctcctggaggcgtccggcggcggccgagcccttcctcaactcagcgatgacatccctttccgagtcaactggcccggcaccgagttctctctggtcagtgccctcactaaccccgcagccacccctcctcctgacactaagggttcggcctcttccctcggttttctttgctttttctccccaagaccttctctgcagactcttaccttccccaagccaaagctgcttttatgcagcgttcattcattcgttcgttctcacgttatgtggatgcgtcccccttgctgagcattagggatccagcaatcacctgctctccaccttttcaattctgtcgcactagaccttgcttcccaacattcccaccctgcagaagcagctttcgtagaataacgtcaggtgcacttactcatcttcctttcggaaaattaactgtggctcttacttcaccagcagacttctttccttcagtattacatgtcaccctgcccacaccacagtacttcagactcgagttccctctctcgtattcgttctccctcagttgtatacacacacggacatacgcaaacgcacagctccaagggaactttttcctttcctagttgtttctgagagggctatttggcctgtgagatgttaacgaccctttatgcagaatatcctttacagttttcatgtatta

SEQ ID NO: 37159 - DNA, 885 bp, Homo sapiens
atctttctcaactactccaattttccctattacttttttttttaaactaatccctctgttcactctcaacactccttatttttcagtgtttggtgctttgaggggaaaacaaaatatgttcttcagttttacaatagttgggaaagaaaaaggagcatttttattgttttgtttcatctgtgttccttttctcttggattccacatggcatcatgtaatcaattttttgctgccttgcactgattgctcacagtctcatatgttgcttctccaaactaacaatgtgagtacagtgtctgtgtctccctcctctgtggcatatccaccccgctccatgaactgaaagcattccaattctgaggcactctgaactcttccataaaaagtggctattttcatggcctcttcgcaaagtgtaattctgtcttctctttcaagtaatattaataaaactagtttttaaaatttctttgacaaacattgttgctaaagccaaacaaatgatcaacaagctttcacaagcccttgctaatgtgacataactctgaggcatttacacaggttatgaaacttgtcctagtacattggcctcagaagacaggcataaagcactctttgtgaactgcttagctttgtaaggtctatctggcacctgaacaagcaacattttgcaaaacatcaggctctgcatgaaaattcagattcccacactgagagtccattgagagatctcccactcattagcatgctacaaggccgctgaaagatcaggaagatgtcaaaagggcaaaccttcacataaacagaactcagagaaacaaactgaacttaacttggcatcagccaactgtaagtatgaaaaaaaaatgtgtttattgggatgag

SEQ ID NO: 37160 - DNA, 708 bp, Homo sapiens
tattttttctttctgcccatttccactttaagattaatgggagagaaataaaatgattagtttgaaaatagattatcttgagaatttttctaccataataataaataaagacaaaaaagaagtcatttctaaatagttacttgaatactgtcaggtggttagtaaactcttctcacacagaaggaaaacataaatcaaaacattcccagtcttatctgtaaaccttgttaagcaataataaatattgcccaatgcatgacaggagtccacactgttttccacagaacaccgagatgattaccgcagtgccttctctcctgggaacagtgcacctctaccatagatgcagtcctcttcactaggcttcttgaataagatcattcagaaacaattcacttttgggccagttggggtggctcatgcctgtaatcccagcacttcgggaggccgaggcaggcagatcacctgaggtcaggagttcaagacaagttcaagacctgtctctactaaaaaatacaaaaatgagctgggcatggtggcacacgcctgtaatcccagctactcaggaggctgaggcaggagaatcacttgagcccgggaggcgcaggttgcagtgagcagagatcatgccactgcactccagcctgggcaacagagcaagactccctctcaggaaaaaaataaataaataaataattcacttttaac

SEQ ID NO: 37161 - DNA, 3807 bp, Homo sapiens
aaaaaaaaaaaaaaagaattatttagtccaatcccctcatttcacgcacaagcatactgaaacacatgattaagtaactttcccacagtctcagagctagtgggagaaactagattttcttttcattaccactttctattctacaaagtactaaatatgatcaccactcagctttcgtcacacgttttggcattattcagatgttcacttatgcaacacagaaggcttaaaaaacaacaagcacaactatgaacaggtcaccttaacatgacttaggaaaaaaacacacccaagatcacaacatgtcccaccgcattcaaaatgtctcatagtgcaatatcaagaatcagtttccagcatctaaccactattccaaaataaaattctacccagtagcatttcttgctggttatttagctataaatggttatgggttcatgggtattaagccatcagctatctgcaatccagccctaaacaccaaacattagctccattgttatttttagccctttctaggtacaaacttttatctaataagccaaaacaataacaaaactcggagtgctaatttaccaaacttgttaacaataaatactttagaaaacaatgcttaactatgccttggtagattctaggtttataaatccaaagcagatatgccttcacaccatggcatatttatataatgtacactaaaaaaagctgtttgcgtccccaaaaatggtaggtattctctggcaagtctaatccaagtgattaaaatggggaattactgtaacaaagtgactatttttactgtgcctgagcaacacaaaaacctaggagtctcacttgaaaaagcatttggattttaactatttataaaatattcttttttgactaaacgtggttctccctgttgcattcctgcttctgccgcccctcacctccattctcctaaggatcctaacacgaaaaacttcattatactctagtcaaggggagagctgttaaccttgacattttatgatcactctctgaagagggcaaattacatgttttagttttgcttctttttaattaaaaaggtcccacccacccctcaagtggaaatgagaaatttgtcagaggccccttaataattggcagatgagaatcatccagtgaatatacacaaaactattacaaaaccctgagtcatcactcagttcaatcagcagctttgggtaaacactgaatgagtgagttatgtcttgtgtgttcacccgtccatacccacatgcgtgaacataccatgttactagattttatgtacagttaaccaaacaagatacagcaaaattctttcttaaaaagctcttcggacacagtaaagatgcccatccagcaagtaaatgtaaccttttttcccccactgtattttcactcgttttttttttttttttcctaatttcagtgacactatagtttgaagctagtttacaaacagaactcctgaaactgatttaggtaatctcttaatctgagtaactcaaaaaattaacacaagcctgatactaatatcgccctggacatcctgacagtgctcttccctactttcctcagtatcttaaatgtctctccaaaagaaatgtcacaacaggagcaacacacaatccaaaacaacactgtccacataagacgttaagctcaagaatgaggtctgactttaaacgacccttttcgatcaactccgccaggtctgagagggcccccaaaaagcaaaacccttaagtttccctatggtcttctctccattcagaaagttactagacgccaacggagatgcgaagaggcggggatcgtaggggaaggaagaaccggaggaagcaaggagacaagtcaaggaactcccccaaagacaaattctctttgccccgcctctcccatgcgcaaaagtccacggaggacccttgagaaaggctcacctctctccctcggggccggggcccttgggctacccagggccccccaggtgggaagacaacaacccgaacacttcgggagaagcagatgcggaggacgtagagggatggtaaagacccgggaagtcccgtaggaaagtggcagggaggacggcttgagtacttcacaggctctgtcacgaccctgggatcaccgctcggggacagctccagcgaggacagagctaagggtccagccctctggacaaagagcaaccatccccgacacctctcactgagcctttccccccggcccggcccgcaggcccgggcacacttacgtggagagtttcctggtccagaagaggcccccgggccacagctcttggagctgcacggcccggcccaggttgcatttgatctgggccagctgcaagtcggactcggcgtctagccgctccgcgtagggcagcagcttgttgtagacgatctccttctgcgggacgaagccccgcgggcccggctcgggacgcccgcccggctccgggggctctccgactcccgcccgctcggccggctccatgagcccagggacaccccccccaccccctcccacccgaaccctccccggcccccacccctctccgggctccgcctcctccgcgtcttcgtcgccctgcggccgctggcggcccgtcgccctcggaccgatcgctaggcccccttccctggccggcgtgctgctgggccccacgcggctctcagttcgttggcggcggcagcggccgctctgcccgccccgcaccggctctgctggtgacgctgcagccgccgggcccagaggttccggaccggcctcaagtcacttccggggcggggcggggcggagcgacggcgtcgggggaggcggtggtggcggcagctggagcccaacgggctgcgccttcttcgccgtgggcccggctcggagcccccaccccaggcctcaccggcccagcgcgaggctgcctcaccggaaacacgaggccgaattccaagctattgtcctgcttcgccgggggtcgcgcactccaagcggcagcccactggagtcccagtcgccacgacaggcggcagccaggtcggcctggtccccctagccgagcagccccggcttctgggttagaggggtttatggaaaagcctacgtacccacttgctccttatagatttatttactccatcccgcttgttccttatagatttaatttttctgtcccctttaagtccccatctttctggtattctggccgccatcattccaaagaagaaaatagttactcgctgaacaaatgctatttgaacagctgttttgtgtgtaaggcgctcagtttaggctattgagatagaaagtttaacctggtttccgccctcccaaggacttagtctagcagagataaagacgtgaattacaagataatgctcttaattgctagataagtacaagaatccttaggaactctacaaagaagttgaaactagggggtttgagagggtgtcattttcctagaagtgatacttaatttaagctatgaaggttgagtgcaaagttggttagaaaaaggagggaggaggacacgtatttcagctgagagaacagctttgacgctgcaagcatgtattctaaaaattcaaagttcaaaatagcgtaagagaggggacggagaaatgagactgagaaggcaatcctaaggaattcagagctttatcctagagacaaacttccaaaagattttaagcatagcagtgggatgatataatttacattttttaagaattactctggcggccgggcgcagtggctcacgcctgtaatcccagcactttgggaggccgaggcggg

SEQ ID NO: 37162 - DNA, 691 bp, Homo sapiens
atgtcctgtttctccatctgggagatggttacatgagggtggttagtatgttaaaattcattgagctgtacatttatgatacatatctttttatagatgtggattatgcttttatgtatgtatacaaagttaaaaaaaaaaaaaaaggaagcagttccagacttctttacaaagtgtaggctcctaattcccatttagcaaagagaacaaagtagttcatctacaggtttttgtgtaaacagaagttttagtttctcttggataaatgcccaggggtgcaatttctgggtcaaatggtagttgtgtgtttcattttgtaaagaaaaaactgtcaaacagttttctagagtggctgtatcattttacattctcatcagcattgtaagagcaatccggtttctctgccaatacctgatgttgtcactgctttttattttagcctttctgataagcatgccatgatctcattgtggatttaatttgcattcttctaatgagtaatgatgttgaacaggaacatgcttttatgtgcttatttaccatttttatatcctctttggtgaaatatctgctcatgttttttgcatgttttctaattggattgcttgtgggtttttttgtttgttttttggtttttggattgcttggtttttaactgttgagttttgggagttctttatatagtccagat

SEQ ID NO: 37163 - DNA, 2051 bp, Homo sapiens
gaacctgggaggtggaggctgctgtgagctgagattgcactactgcactccagtctgggagacaagagcgaaactccgtctcaaaacaacagcaacaaacccacaccaaaaaaactgtatgaacagcagacaagatgactacagtgtttttcttttgtctgtttccactagcataaaagacttcatatttttaaaaagtttcttatcccagaaaatatcacaatccgtttagaatacgagttcaggctcaattccttcctgactgtacagaagagctcaagatgttgcagaccttatcttaaaagctggcttggtagtcacctaaacatttcataaataatttactaactctcaaaacactaaacacgcaggcccttgatttcaaaagccaatcttgctgggatggagtggggtgggggacctgggatgggggatgaaaggggttggaaatggggagatattggtcaaagggtacaaagtttcagttagtgtgaataataagttctgaagatctgttgtctaacatggtgactgcgataaatgtattgtgtccttaaaaattgatgagagtagatcttaaatgttctcttcattaaaaaatggtgcaatggatacgttaatttcattgatgtaatcatttcacaatgcatacatatgtcaaaacatcaccttgtacaccacaaatatacccaacttttatttgtcaattacactttaataaagctgggggaagccactctttttttgggcacagcatccggcttttatttactaactttgagaacagagtaccttgatcaattaaatggtagggagcgctgtggagacagcatcctccccagtccgggaagagaggcctaggatgcctggggcccagcggcctcttccctcctggcgtccccggctgccctcgctcccaggccccgcagtctcatttgccgcttccgacgcgtgaccccggcgcgctagcgtccgggaccggtgacaggcgcggggtgcgccaagcagtcccatgtgtcccctccctctcgcagccgccgcagtcgctgcgccccgagcccctctccggctcctcaacagagggctcgccgccgccatgtctaccgcccagtcactcaaatccgtggactacgaggtgttcggaagagtgcagggtaggaggcccctctacggtgggagatcaaaaaggttatgggaggaaggggagaaagctgtgagaagcgcctcccacctaaagtatgccttttcccgttgtggctgggacttccgctccgccatgacacagcagcggcggcggggagggaggcgaaacgcgcatgcgcccgaggacttggacgggcggaagtacgggaatggggagggaagtgggggagcgggagaggaggggtcaggggactgctgaggaccagaagtgggcggctgctgggtgcgggagtaagcggcacgggggaatgttgaagttgggtaggaaaagaagagggtcttttaactagtggtctcgttgcttgccactgaagctacctgggcttgacttgagttttaggaaggacacttagatggtttaaggttaatttttcagaggtcaaacctttttttagacctctttgtagctcttaaaagaatgaaattgttatctaatttttgtttcatcctaagtttaagtagttgccaagtttgtaatgtctggcttgttgaaaatattgatatttataaatgaaaatattaagtcactctgagatttatgcaatggaatataaatagggtagtgatttaacatccaccatcttcatttaaaataaaactcttcaacaatgggaaattttactcatttcttttcctctttgaatttgattttcatttcacttttcccaccgaattaccccattgttttgcttgagggttttttttttttttttgctcaccctatcatacttttctgcaatatgtatatgtacatatatgcacatgtatgaataagtgtaatgctttttcttaatttcctttgacaataaggctctcttagaaacaaatgctggttctttggtgccaaa

SEQ ID NO: 37164 - DNA, 531 bp, Homo sapiens
ctgacctcatgatctgcctgtctcggcctcccaaaatgctgggattacaggcatgagccaccatacccagccggttttttttttttttttttttttttggggggggggtattctatcatgttttgattttaaagttttattggcttcacaaaacatattaggaagttttccatccttctcttcattctggaataactaaaatatcagaattactgttcttaggttagtggaaacaaattaggaaatcacctggtcctgctgccttctcaatgttgacctttaaccaccttttcaatctaccctgtggtaactggtatgtttgttttttgagaaaacgttttgctctgtcacccaagctggagtgcaatggcacaatcacagctcactgcagccttgacctgctgggtttaagtgatgcttccatctcagccacccaagtagctaggaatacaggtatgcaccaccatgtccaactaatttttaaaaatttttttgtggaggtgaggtctcattacgttgcccaggctggtg

SEQ ID NO: 37165 - DNA, 541 bp, Homo sapiens
ttcaattttaatttgagttcacctgtcatcctgggacctcagctgtaatctccttttccctgcacggctgactgagaatgcatttccttgtgctttactaggactggaaaaacccagttatgatcatcttagtagtggtctgtcttccaggctttattatctgcttcccaactctcagcatcaaaacaggagttaccatatccaatgaatacaaagaaaatggcttaatttctgacacatagcttattgaatgtgacccaggcagcaaggatgtggtacagaggagctaatatgcattcctcattagtcagctcacccatgtggtcagcagattccttttctaaagtagttgtgtaatctgcagcagcacagtagccaaacacagttgataaattacgtttatttcattttgacaaaaagagtaaatatattcttgtacaaaaatattcaaaaagtttaatgtaaagaagtaaatttaaatcacctgtaatctcaccatctagaaatacactcatttaaatagaagctgccactttacttt

SEQ ID NO: 37166 - DNA, 1357 bp, Homo sapiens
tcctaatcacagtgtgatggttaggataagaccagataagcaggtggtgtttaatacaatgcctaacaaatgcctggtcccctagtggaagctcaattgctattagttccccctgctttctggttttcaacccacttgccccatatttatttactcatccactccttactcaccaaacacacacacacacaatgacacattcacacacactccagtctttaacaacgaagtccacactcaggtatttaggtcactaggtgtcaaatctacacatatattcttcttcctgataggatttcaggtcacatacataaaatgagtcctaggaccaacctctgctctcccatcactctccaaggtgaatgtaaacacacacacgaacactgactctggattccaaacatatacgtatgcatagcctgatataaggcagaattcaactctggacttttctttttccgttatccagggaaatgcgtgagttactatgacagatgccaaagacttttggctctggtagtggaaattgggaggcaatggtgaaatgaagtaagaaattccagggccagaaggtggatgcaagtcagcaacggcttttcccaggagcttgctctttttgggtaagtgctacacatacaagccccaacccgctgcctaagctaccctattctgaaccccgctcaggctgcaacagatgacacacagcagggagcctcatttgcaggagatgagtgttcccttgctctattttaatcctggcagcccagccggggaaggttttgtcagaaatggtggaaaacagtgacaaccaagctttctggagtaaaggctaggcagctcaggagcaaccaatcacgactcgcacagtattgttaacaatacaagggaaaacaagtatccttcccgccggcccgcacttttgcagccagcttgggcgacccgtggcagcgctttgacgacgacctgccgggctccggagggcgggcacggcggagacggcagcagcgctgccccgcagctccggaaacagcccttcccctatcctcaaggaccaaatcagtcctgataaacacccctcctggccctacaatgggaagggcaagttcaaacgcagggcgtcgagcccacacgcctagagacgcggccaggcacccccgccctcctcgccgcgcagtcgcgcacagtgagcaacagtccagcaccaacccggcttaactgcgcctgcgcactccaggagtttccccccacgcccctttccgaggactagcgcccgtcgcttagcaacgcgcgagtcacagtcgccgcgctttgcgcacccttttcctggcagggctgcgtccctgttcttcccaggagg

SEQ ID NO: 37167 - DNA, 3501 bp, Homo sapiens
ttggtatttcattaacattgtgagtggggaggtgctggggtccatggtaaaaaaataagtaagtgaaaggcaaacaactttgctttctagtggatttcccttattacctaatgagggcagcagcttacaagttgattgtgttcaattcaacaaatttgttttagtacctaagtgcctgctatatgtacagagtgaagaaagaaataaccctacctttaagagagtttacggtctggttgtgttgattcaccttctgagaaaaaatgttatttgctttcctcaatttttttcctatcaaaagtaaacataggttcaaacattcaaacctatgaaggcctaaaaggaagaatcatcttcagtttgctgtgacgatttcactgagttttattttaaaatattcatttaaaaatacatacaaacatataaacccatcaggccaggttctagtgatctgagatataagcatgatacaaactacttggctgccgtgtatttttgttttattttaatccaggtgatcaggtctgtatggggaaaaagccctggggctttttcaaacaggaagggccctcctccctctgaatgcccgcagtgccgccctgtgcactttacagaacaaggagaaagtcagtttcttcaaactgcttttctaaagagcgtttccattcgtggtcctggtgattccaccatcttttcttcacaacagtgacggttctggaatttctacacagcctgaggggctgacggggtagaccaggtgactgggaaggggcagtggcacatgacaaaaatttgaggaaacgtccagtttccgtttcagggaatgcgcataggggaaaacgcaagtccccacgccatcacggggccctccaccgcggccggacgacccctctctcgggagtgactggggcagggcacctggcctcaggttcgagcggagcctgcactgagaggcaggagttggatgaaccacttgtagggtctgctcccagctacccaaagcgaaagggtgggcgaaaaagcatttgcaaaagaatacattaacctcacaaggaacgacccccaccacccatcctccagcgcccaaggtttcccacgaagaggtcgccgtcgcccttctccaagttgggtagaacctataaggcatcaccaactgcatctcaaaccaaccaagcaagtgacgctccaaaacctccctaaataccctctctccccagcattccgaacgcaacatcaagggcgaaaagaggctgcacaaatcacgtagaaaattagaccgcctctttccatggcgataatcgaattagcctcaaattaaacgtgaaattggccctctccggctgtggagacaaagcccctattgtcctgctcgggtagcggcagcagcagtgcccaccccgccccggccagcctggtcggtccccgccgctgggaggatgaggtccgggctggacccgggaagagcctcagctggagaggacgtggacgcgcccgaggctcggctccctgggcggctgcggggctccgggcaggaggagagggcgggcgaagcagagggagcgggcgggagtggggagggaggagtgcggagggcggagggcgtgcgggagggatcccgggagtgcgcttgtgtgtgtgtgcgcgcgcgcccgccccgcgcgctcctctccccgcccctcgccccctccctgcgagcgccctcctctcctcctccccccgccccccgcgctcccgcccagcccccggaatcagtgccgctgttgccgtgcaggctgcggattcctccagtccctccctcggccgcctctcctcccggagcgagcgcgcagccctgcgcagcagcgcccactggtcccgtcctgtgagccccggccccagccgcggacagacccgcggagtcgcctcccggcccacccgcccggccgccgaggagcgggaggaggacgggaccccggcgcccccaccccatccccgggaggtaggtagggggcccgaggcagggagatgccaactcactggggctgcctcccgggtgggctccgcggcggcggacgggcgggaggaggggcgcgggcccagggccggaggacgccgctgcccgcctgccctgcgcccggggagccgcgtgggggcagggaggctgcaaagcccgggcgggggcggcgcggggagcccgggtcgcgggtgctcattggtactcggatgatgcgggacgaggggcggcaggctctgcggtgaggcggcagcagacccgccgtgcgcaccgctgccgtccggccccagccccggcgcggcgcggcgattcctcctccctgcctccgccggcgcctccctgcagccgggcgcggcggcccctgacgcggaggcccctggcgcggaggtgggtgcggagcggacagcggacagccggagggtctattttcaggtgccctctctgtggccccgcgggtggggagcgggggcggcggtgacagggccgggctctgcgcgtagcggtgcaggggatgcggccaggcgtggtcccggctgcgccgcgctgcagctgagccggaggcggcggccccgcgcccccacctccgccccatccctgcgcttgctaccctcgtgcgcccgccccccccccgccctttctgccgtccccactctcccagggctgggcgtgagccgcctccgggcgccgagccgccgctgcgcccgcccttcagctcctgccaccctctcttcaacaggtttgtctcagcgcagggaccctccgggcctgctttgggtaggtgggctggctcgtcatcaccccccacaccacgcccacggccctcttttagggggcgccttctctttgtttttgtgataggaaaggtgccaactgctgccatcagatgaggagggggtggggatcagaacgcaaacctctgtccattatttttccaatcgaaagccaggccagatagtaagtgaggacagggtgcgtgtgggggtgcttcggcggagcagaaaattgaattcggtggggtttatttgggcggggatgtgcttttttggcaagatggatggctcacggtgccctcgccgtgatgcagcacaatgcagcagtatcgcagcttccttggttctcgctggcggggcttggcacggccgctcggcgcctgcggcccccgcccggccccacccaggcccggggctgcccttggccgaggcctggagctgctgctaccttgtcctgcagcttctgctggatgtggcgtcaggaggaccaggtcagctaggtgtgagcaggggagagtcttttcttttgggatgatccctcctgcacctcttcttgggctgcgctctgccggaggggcgccctgcatcaccagtgcaggcagaggggagccggcctgtggttgcggatcggaatctgatctgcgaccaggggacctgagccatagggaggggctgcaggaaggactgggcccagtggtgtgcggaggcaatgttgcagtgtggggagtcgcagcgttt

SEQ ID NO: 37168 - DNA, 627 bp, Homo sapiens
gggcagtaaggcatgacatttctccccaggttgagcagttttctgatacatattttttggctgagtgtgacttgtatctttttggactaagctccattcactcagatggtggtctgatttttttttttttttcagtcaggcattgtgcaaagtgacctgatgggaataaatggcaggttggttgtgtaatgcagcaacatcttacttggttgtctttagagataagtgggacgtgattccagcaaggctgtgcatcaaatgttggaatgtgttggagaactgccaagaggttgggagcaagctgtgtgacaagcactaatgcagccttggcctgccttaaaatagctgcaggttaacaaatatcttgaaacttggcatttcttttgagcaaaattgctcctctgaatgtgttaccaagaggtgctttcctcttttttatcgatttttttttttttttttttgctgttccaactgtcttaaaacatcttatgagcatatgaagaagatataattctctgtaacatcttatgttgaatgattttactggactaattattagcacattatctgaaacttcacttgtagttcttctgctctgctcacccaactcactgaaaaatatatagt

SEQ ID NO: 37169 - DNA, 553 bp, Homo sapiens
gtataaagtaggtgtaccctatttctaaagtaggtgtgccctattactggacatttagtttgtctgcagttgtttttttgtttttttttttttttgctactatagaaaagcacagtgatgagcatcactgcattcatatttttatctgaagttgccttttcccctagatccctgaaagtggatttgctgggtctgaggagttttacttaacacctttttcaaaggctgtgtcattcctgtgacctcactgcaggtggtggacctactgccctttgcaccaactgactgactgctgtggtagatgccttcgaacttaggcaagctagtaacattttatatggggtttggtttttactgaaaaggtttgcttctggaacatttatgtaagttacagcagtcttcatgctgaggacacatggacacgtctcttatgtctcaagcaaagatacccccagcctgatgtagaaatgtaattgactactgagtggatttcctttcatgtggaatagaatgagatttattggcttgtataaactagagcagaaaagttaat

SEQ ID NO: 37170 - DNA, 2505 bp, Homo sapiens
gccgaggctggtggatcatgaggtcaggcgttcaaaaccagcctggccaacgtagcgaaaccccatctctgctaaaaatacaaaaaattagctgggcgtggtggcgggcgcctataatcccagctagttgggaggctgagacaggagaatcggttgaacctgggaggcggaggttgcagtgagccgagatcacgccactgcactccagcccgggcgacagtatgagactccgtctcaaaaataataatagttagaattaacattgagtattgtcatatactccaaaattttatgtttatatccaagaatatttatagatatccaaaatatattaacatgcaatcctcatgaaaagttattaatgagacactttacattttttatactacgtctttgaaatatacatcttttgtatatgtaacagactggcaagatatatacttattcctaaagtggaatgtggagtgaaaacatggtagatggtacttccccacttctgaggtgttactgtttacagtttggaaggaagctgaggagagcgttggtcaatcctgttaactagcacagtgaagtagtttttatgttttctgtaaatgattgcttgcatcccgtgattgcaggcccactttcctgacctctgaccagttgccttggtatcatggaacatgcagtgattcaaactaagctggactttttggaaaccagcattttatttgaagtaaaaagaaaacagttacacaattttttaaagactacgtcttcccctaatttgtgttgattctactgtgagacaagaaaaatgcatttctgcttgaggtgcagtaacaaaactagcacaaatttctttccttcttaactatttctcggatagaagattcattcttaacatagaccttatcattataggatttttttttcttttcttgttgagaacttttactttttcacttaaaggaagcatttgacagtcgcttctttttagcatatctgaattgccagcccagggccattattaagtcaaataagggttacctgacagttaatctgataatcaagacggctgctaagtgactaacagggagcgtctgcagtgtgtgtctgctggacaaagggatgattcacataccaggcgggatggagcgagatggcgcaagatttcatcacagtgctcaggatggcatgcaatttaaaacgtatgaattgcctatttcttcagtttttcatttcatatttccagaccatggttgactgaaggtaactgaaccatggaaagtgaaacccaggctaaaggggactagtgtgtgtgtgtgtgtgtgtgtgtgtgtgtgtgtgtgtgtgtgtgtctaaaccatttgacttctagtgaacgaacagagccaacctcttcctgaatatgtaaagaaatctataaaacatggcctagaatgatctaattaggaggaggaaacctatttacatgagactatatatgtatacaagtgcctggaagttagtataggcaatgattgctgtagtaagatggagtttcgctcttgtcacccaggctgtagtacgatggcgcgatcttggctcactgcaacctccgcctcctgggtccaagtgattctcctgcctcagcttcccgagtagctgggactacaggcacccgccaccacacctggctaatttttgtatttttagtagagacggggtttcaccatgttggccaggctggtctcgaactcctgaccccaggtgatccgcccgccttggcctcccaaagtgctgggattacaggcgtgagcctccacgcccggcctgctgtagtaatttagggggaaagattgatctctctctctgtctctctctcacacacacacacacacacacacacacgcacgcacgcacacaaacacacacaccccagtcattttaaggggtagggtctagtgacctaaagagcactggaacttggagagaggaatctgggacctgagtctcgtcgtggctgcttcattttccactgcagcaaaattgaagaggctaggctgcaggtctctgagaacacctctccttaaaacagaaagtctgctttgggctgcttaagatagtatatgccatctcacgcctggactcattgtctaaatcatgttagggctcttcttgttcgcacacctaacattctgttcagaggtgacactttcctgccccaagggaaagagaacagcttcttgcatggtggaatgggtttttacagagaggattaacagggatttaatagctacccattattttcctcatctactcttcaggctgtatccctaaattatgcattatttgggactatttgtgaaagaggtgtggcccctagcacacagtaactatactaccattgtttgtgaaatctgaatctgaaagagcattttatatccaagttgttcatgaaagctattgagagaaagtctgttgaggtctttgcacgtagtcctagattataccctcaatttatttttcacatataaatgg

SEQ ID NO: 37171 - DNA, 3571 bp, Homo sapiens
tttagctttagtgctctgttcctctttgttgagacagctgtagttaggtataaggggataataaagaagaaatattactaaattcccgggaggattatttataatacttaaaatgtgtgtatcactttcatcttggagaacattatagaacattactataatactaatagaagtctttggaaagcattatatcccgtgttacagatttcagtctgagattttctgaatcaggttgttgtttaccccagcttgctctagtggtaatataaatcagaggcttctgggttccaggcagtaattgaaagcttctgatgcctatctttgacctgccttttccaaccttcttggaaattgccttccttcacataagtatttgtagggctctgaatactctttaattaatggggggaaaatcttctacctctccctacaattactccatattagcaaattatgagtaagactttgagatacctcaggtatctcatttgtgatgtcagagtggttattgaacttactaaacctttcccagaagagccagaccttgcctaaacttaacgaaaaggtttagagttgagaatcagatacttttacagggtcatttttgtctgtttgtttctgactgtcaagcacaagagatacacatgactaatttaaaacaggaggcctaagagacctattaaaaaatgtcaaacatttatttgtactaaatactacatcaaaaagatatggcaatatgaataagatatagagatataaaatatatcctagataggatttttggtaggctatacaaacttgaacaaagttttaaaaaggagtaaacttttatttttttatttttattttttattatactttaagttctagggtacatgtgtacaacatgcaggtttgttacataggtatacatgtgccatgttggtttgctgcacccatcaactcatcatttacattagatatttctcctaatactatccctccaccagccccccactccccagtaggccccagggtgtgatgttccccgccctgtgtgcatgtgttctcattgttcaactcccacctatgagtaagaacaagcggtgtttggttttctgtccttgtgatagtttgcttagaatgatggtttccagcttcatccatgttcctgcaaaggacatgaactcatccttttttatggctgcatagtattccattgtgtatatgtgccacattttctttatccaatgtatcattaatgggcatttgggttggttccaagtctttgctattgtgaacagtgacacaataaacatacgtgtgcatgtgtctttatagtagaatgatgtataatcctttgagtatatacccagtatactgttggtgggagtgtaaattagttcaaccattgtggaagacagtgtggcaattcctcaaggatctagaactagaaataccatttgacccagcaatcccattactgggtatatataaaacggagtaaactttcatttaaggaaggatgaagttaaataagcaaaggtacccagagaccccactaagtgatagatactagctgaatgctttatttaacaagcctactattctattgctaacctgccattagaaaaagctggcagatggacattaaaatccagcaaaactatttttaggtaacaaagctttttgatggcatatacaaaaatggattcagatggtggtgggtggggggcattgtcagtactgttactgcaatcaggagctctgggagtccactggacttctctaacttgactttagagaactccatctagcctctctgtctcagtgtccttatctgaaaaacaagggggtgggctggatggattctgagggccctcagacctctaagattgtgtatatgctcttagggagttagcatgctaacgggctgttgctaccaaggtaagttttggcatttttttcctggtggtttctgtgtacacagtgagacacagagtgtgtattggtacagggatgatagcaacctttgtccttctacaggaaataatgccctgtgactctgactcaagacctagtctcttgttaatttttgttaatgttttatgcttgatgagtcagaaatgcaggctcttgtagagtgttattaacaagaactagtgtaactttgattataatcactacaaattacagacctctttcctgtgtaatgatttttgccatttgcccttccgtgatctctaataggccaactacaaggacaattttttgatcagtaagaaccttggtctgttgcttcataagcccttattatggcaaaattattcgtaacagcaaactatgtatgtacccacattgacagaatatcagtgttctttagctggctgggcaaagtctaagtgtttcaggatagttgatgatgggggtatcacaaaaacttcagagtaagaaaaacttgtctgatatctgttaaagtgatctgtatacatgtaggcattctcctgtatatgtgcatacacacactcctaagttgtgtaaatgtgtacctgcctgcttgagtatgatgcattgctactatttctaaactaccaatttatttcccctgtgttttgaggactcaatctcaaagatgctgactgaaaaataaagtttttgaacaatttcatgaaggttgggttgtcgagatcatgagttctgactctaatgacaactctgtgggaaatggataaactctgataaactctatcgcactgcacacaaatgtgaggctggaaggcagtacgtaatttatgaggccttttgttgtaaaaatgagagttggcaggattccgagtaaatatcttttttcctaagggtggaagataggacttggagagatcaatgtgttggttgacagcatttgagaatgtttgatttgagcttcagcatcataggtggggaacatgtggctttatagatctgctgtttcttcccctgcccagtggtgcattccttgtctttactgaagtatgtttttaaaattcatttttaatggtggtaaaaaaaaaaaaaaaaccacataacataaggtttaccatgttaaccatttttaaatgtaacttcagtagagttaactatgttcatattgttgtgcagtcagatctctagacccttttcattttgaaaaactgaaactctacacccattaaacaataactcaccacgttccccttcccccagctcctggcaaccaccattctactttctctttccatgagtttaactactcaacatactgcatgtaagtggaatcatgtaatatttgttttttttctaactggcttatttcatttaacatgatgtcctcaagcttcatccatgttatagcatatgacagaattttcttctttttaagtaatattcaattatatgtatatgccacattttgtttatccattcatccattgatggacattagagttttcacctcttgctattgcgaatgatactgcaatgaacataggaatgcaagtgtctctttgagatcctgctttcagttcttttggatatatatccagaaggggaatggctggaccatatggtagttata

SEQ ID NO: 37172 - DNA, 7683 bp, Homo sapiens
ggacatactcagttgggccctgccttggaacatcttcccctgagtctgataaccctcattcactagtctcatcttcatagcttcttcttcgtcctcctcctcctcctttctcgttattttctaactccctgtaacccagcttttgcttttattaacccagttgacctgctaattggcacaccacatgccttttctctaagttttattttttagtttgtttgttttgcaacacttaagaccatctaccctctttcctctttgagtctctctccttagattttcattctgcaactccctggcatctccactggtttttcttctttctcccaaacccaggccttccccagggctccatgcttagccccttgcctcttacttcctttcctagatttaaccccacaactatctcaactcccacctctgcactcaggactgtatcttcagttttgagctctagttccacatccctgactgctccagacatgtcacccagtggtattgcaggtaactcagattccacctgtctagaaggaaatgtgcacttgtcccctgcacccctctagccagatgtaaaaccctgagagtcttctttgtccctttcctttgatcctcccacatacagttagttaccaaagtcctttggattaatttttacgtcagcccattctttttcatttgattgctcctttgacctggactgttgcactaaccacccagttgaccttgctgccttcatttcctctcctttctgcccattcttacataccacttccagattaatcatctctagagtccagcccacaccctctactcccctggctcaaaagtctccagtggctccagaccaggcttagttctaacttgcttttcggggctttcctcccagcctgacggttccttatcctccagccaaactgcagcacttgctggtgctgtttcctgggcatccatgcttttactgtgctgcttgagaggaggcttctcccttgttccagcctgttgatgtctacctgtgtttcaaggtttgatcaaaatgccagtccctcctagagttcttcccacctacctttctccaaaaggcagatgtgtcctccttgtcctctgaattcttagagctgtcctcccctggcccttactatattcttttggtactttactgtttgcacatttgtcccatttcctttggctagcaacactcctggtcacttctgaatcttctaaaacacctggcagtgtgccttgcacacattaaatactgtaaatacagaacagtaaacactgaagaaataaagaatgaatacctctggccttcctttacctcctccccacttctgaactggaggtggtcagatgggccatcagggatctgtcttattcttccctggtcccatcacaccaaatggattcccatttcttacttcttatccccgtggggttattaaacccttccccagtgtccaaacctttctaatacttgcatgtgttcactctgcctggttcattcagtgttggcttcacaggattgagtgtggctacgttcgtcccagctctactgccatcatattatgtgcaacctggttaattaaaaattatttcatgtactaacccatactagagggagctgaaagggagatactgagtggtgactccctttcttcattaagtggcccaatgattaaaacgttataagttggcaaagcactttgtaatctcattttcagtgccatagctggacacttagagacttatcatttcaccagtatacttagttgtgaaaaagggcttgttaaaaagatcttcattgagacggttcccaattcaacttctcttgtagtcttgatgtggtgtgtgtgtgtgtgtttgtgtgtgtgggcggggggtgatgaaaggaggggtgcattttgaagaatatactcttaattttgaaagtatgataatttttagaacatttccacatcatctcctcagtgaccctgtggaggtgggcattaattattactcagtctgacagctgaggtttagaaagaatccagggtttcttctaaggtcatagggtaattaagaggcttggccaggactagcaactcaggtcttgggaatcctagtcaagtgctttttccaagaccaagtgttttgtaatgctctgcctagcctcccatcagcattgtgaattggcagcacttaggggctttaaaaaatgttctacatcttagatgataagaaatgttgtcttcttcaggttgggcctggctttcaaaagccaaaggttgacatgtggaagtattaaaaacctagttatgtggctggaaggagttgggggttgttcagcgttgagcagttagctaggctctgggtttaattctaagcctggacaggatgcagttacttcaattacaagtgccctggggactgaggtgaacctggggtgggggaccacgtctttactacatattgggatccctgaggaatgaaattaccttcttcagtgagtattgctgtagggctccaaactggaaatgccaaaagtgtaatttgttgtctgcctgtttaggtagtgaggaaaaaggggggacaggagggtggagagagaggggggagatctagagtcaatttcccaagaatacattttgatcattctcttttctatgtggaagatttcatttttggttgagattggtgggagaagaagctgggaaggagagatttaaaattttggagaaccacaagtttagaggccttgttttacaaatcagagtaggaatttgagggtagtttcggttccctcatctcccctccggatcataaacaactccaggtcagggatctcggcggtgtttacctgtgtacctttttcccacaatgccttgcaaatcggtgctcccataaatcttccttgcgtcgaattcctatcataggcccgtgttattccaggaaaccaccgccttcatatcccctgatggcagcgtaagtcagccgagattcttcactgagcccgaacttacacctcccctggctgtggcgctgcacagcgccctgagagtgactttgtctgacttcttcccggtggctcgccgggccgccgccgcgtggttggcgccagcgcactggggcagtcgcgcgcgcccaggtgcgggccgcgttacctcagcagacgctagagagtgaatgagccgcgcgggcccgggacccttggggctcttcactctccaggccgtcccgtgggcgcgctagccttttcaagtgatagtaatcggagacttttccgttacatgaggctcaacaaaagattgtaattccagcagctctgtttgggaaggcactaccgcggcgagtccagggcccggccgggggtcggcggctgccgggcggctggggcgaccgcggaccgtgcgggaccggtagggggtcgcgggccggctaggctcccccgcgcccctcctcgtggtatagcctgcatttctaatacaatgctgttatgctaatcaggtgacatcaccgcccagcacacggcgagtggctcctgataaaattacaaaccggcggccgccgcgggcagctgggaggaggtgtgcgcgctgcgcccgcgagctcccgggctcggcaaccgtggcatgcttaggattggccatatttaaaagttctgaagtagaacctgcgcctcctctctgcttctccctcctcctcagtaatttatttcgagcttccaggcaagggccacggaagaagggaaagcaagaaattagatgcctgtgtggtaactcctcgcggagctaaggtggactctcttgcagccaacttcccatcagatcaccctgctggacttgcagaccggaatggggctcgcctaaggagccgagcgctgcggaggctgctgcgtgttggatgggagtgggagggggctggagcgagatttccagggcgcagtcctccggggcgttacgccgggcataatggaattgcagaggacgtctagtatctccgggccgctgtcgccggcgtacacggggcaggtgccttacaactacaaccagctggaaggcagattcaagcagctgcaaggtaagccccctcccaaaggccgggcctgtcctgggtgccaacgggggttcttggaggctttatttgtgaccctaatgaagacgggcggcttcacagctcggccccagaccctgtggttggctgcgggcaccccattcacgacttagggaaggcagttgctcatactccactccagaagagctaccatttggagtccctgtctctccagcacctttttggctttctaggttgtcagataactgctgcacacacattttctttacttttagctaactttacctcctagtagatcagtgctcatagacttattagtatgcaggtatttgattccgggtcgcctctggctcccagcccccagcctcttacctctgggaagctttaaaggtgtaaagtgccgtgctcagacccagtcctgtagaacaatagcaaaggggaggagggaggggtctttttgttcctaagcctttggtaaattacagttttttattcagaagcttaattttaatttttctgatgtgttgggaagagccttcccatctatttagtgggctatataatttctaatgaaagccggttattgtcatttcaaccctatgggttggattagttggatcaattacaggtttcttggagtctttttaaggctcagacaattgaatgagtccaatattttactgaacatatttttagggagagcagaagcctgtgtgtgcaccagtgtgctgttttccctgcggcccctgcacccctcagctgtccctgcccagccagcaggccctggccagcagtgtctcagagcttatacatgaaaaaaggttcctaactgaaaacagaactccttccgtttggaagcccctggagtcagtagtaggctgggaatggctctagcactgtaaaaaagtagtattcgaggactgtgtgtttcttattttaacctcctcagtgctgcaaatgtggttcctgtgaggaggaggaaggaaggaagccgctcagccctagaatgtttttcattgggaagaggggggaggatgtctttcattcattggtttatttgtcttgtgaaatagttgacagtaatgacacttctctggaaaacgaggcagaacaggacgtgattttaaacatttgctgggctgtgccacattcctctggcagttagctcagaggaagctcccttcgctctggggaacggttctgtgtctctttggttcatttctcttgagctcttcggcagtcaaatttgcttttttgaaaacttaagctgggggcgcttgcaagtagtaaatagaggagttggggtgggggggggcgttcattatctaggtttgttaggggcctcacggttttcgggtcggagaatccactgcgtgctcctcctcttcccctggcccggactcccagcttcattgtgtcatcccgcctgggggaaagcacccaccgggatcgtcagcccactccaccgccagcctagcctggaagtctcagaaaaaaagcaaaactgggagaaaatagaaggtgtgagggaggagtgcacccctaggcccacccataacaaaaggctgttattccgaaagggctgaggaaggttttaaaactgctcgccgagaagggtggagcctacacacaggaaatgtcttaactgtcctctctggacaacgtaaagtttaaatttaaaaaaaatcatgtgcccctgatattttacctcatacgctgtttctcaaggaaatcccttcgaaaggggtaagcttcgtgttttgtgtggtagctttaaaaataattttttttagtgtgacccttgtctcctaatttagccccagtgactttcttatttttaaatattgtggtttaggagttgcacaagtttagtgttggtatttctgtagcagaaaaccacccatgttgaggaattgagaaagggtgaattaactttcaagtatggtggacctcaggagaattacacacatttgtcagcatccttcagaacaaatgaaccgattgcattttaaacaatcctaggagaattttgattaaacacacacacacaaaacctttctttaattcccatccctggttttgtgttttgtttggtatttgtagttctgattatcacatatttttgataacatataatttctatctgctgatttaattttgtacattcctgcaagggtgcctttttttactcttctgagtataatctttcctagcacataatctctgaatattggcaaaatgctcctctgaaactgtattgggttttttgttttcgttttaagagacagagtctcacgctgttgcccaggctctagtgcagtggcacaatcacgactcaacagcagccttgaagtcctggctcaagccatcctcccacctcagcctcccaagtagctgggactataccatgtctggctaatttttaaattttttgtagagacagagtctcaccatgttgctcaggctggtgttgaactcctggcctcaaatgatcctcccgccttcacttcccaaagtgttgggatcacagatgtgagctaccttgccagtcctgtactgggtttaatgcctctgatatgaacttatttatgtattgtctgtgcctgatagtgctatgatttttctggagttgtttctgcattttggctggtttcaagttactttccacactgggtcctaaaaatttcaggaggtgtgccatagaatgagatttggagttctggctaaggagaatataattttaaaatgagtctggtctatttagataaaatggtttatagcgatttatagtttataaatttatagagatattataaatttatagtttaaatatagttatatataaatataaatcgagttatatatttatatataaatatagttatatatagtttaaaataaaaataaggatagtcataaatatatagtttatagagatttatggtttgtagagatttatagtttgtagagatttgtgggtcagtaaataagtgtgattaaaaaaaaaacctcattgagatacaagagtgatggctttatcacacgaagcctcctggcataagaagacaagcccttcaacctctgatggctgtagcattcaccaccaacacccaacacccaacacacacacacccaccccttcctctttttctttttcagattttcacctgcaaaattaagttatcactttcctcagaatcagttcatgtatcgtataaagttgtatttgatgtttttttctctgttaaataaaagaggaatgttgaaatacagcaaaacccaacctcccatatttagagaactgtgtagtaacagaggtgcaggttcatgataaccatctctccacttcacatcagccagcttaactcctcatgagagaacactcatcatgccactttccccctcagaaacagttgcttgtgccattgtgtaaatgaagttccagagtctagcttggccttcaaagattctccgtaaaatggccccactccacttacttcttattctaatatattccattcaaatctggtaggcaggcctacagctttttataaaacccatccctgggtttcacgcttatcttctacattttgcctcaaatgcctactcttccatttcatctatagaaat

SEQ ID NO: 37173 - DNA, 834 bp, Homo sapiens
caataagtgtttccagctactctgccaggtggttctggtgcacactaaaatttgagaaatagtcccttattggatcatttgtacaatctttgcaaaattttgtggtggggatggagaagcagactctttaagttgctcccaaacaggagcaggtattatacctgatttcttatagaagaatgaagagttgggggaaaatatgttttttagaacaaaattgtgaaacagtgggaaaaacattagctactcaggaatggactctgtcctgcttaaattagagaagccgttgaacatctgtctcagccacctcttctgcctcagatgaccctcaggtggggtcagttacctgcctcagttctcccacagttggctcaagagccactatagaaagagatataagtttagaaaaaatagagataaacctaatagtgtgtgtaggctctaaggatagttcagcaaggcatcaaggttagtttcacttatattcttaataaataatctattgaatttaaccttaaaaaacaaaaatcccagcaacttggcatctgtaagggagacagatcaatatctaggctgctttccttatttgaataactgccaggtctgcttcacaagattgtgttgaccagcaaatgatatgatctatatgaagtttccctggaaacatccatgtactattaaaatgtgaaggatggctgttgtttccatgactgtattccttttaaagaaaacttctacatataaatgaacactgacaattccagtattgttgattactagtaaatatagtacagcaattcaagtaaggacttcagggtttgttttttcttttaa

SEQ ID NO: 37174 - DNA, 7628 bp, Homo sapiens
gcagttctagaaatttgtgaggtaaaaaaacagtttcttttcatatttacccattgatattaatggagaatcacaaaaataccctgggtcagtttctctaaattattccagaatttcagcatgatgtcctgggaagtagaaatttatgagtccatacctgttttatgacttaaaccttttaaatactttaaaactatttttttcagaaacaaagcacaaatactcttcttcagccacacttcatcttagtagaatgatcctatattaaatgaacgttcctgttcttgcagttggttagacttcagtctagtttcatgcacatcaaacttacctagtggtgccttcaggttttagcgctaatagtggatttgaagtatgtgaaatatctgttacatggtaagtgctcatttcctctgagtttgtaggtgaaactttaaaattactggttattgattgggtaggggagaaaaaacacctgctgaaacttgttggccggaagtttttacccctgggaagaagaaaggaacggggtgggggagataagggaattcagttcttggctggcaacactccagaaccgtcctgatggaagggttgtggccagttgaaagcagcagtactggagaggggactgggggttgttctttcaaaggcagggttgaaggttattaatggactaagttaaatttctagctgttccttcctgttactctagatactttttatatatttattatgtcacagcagtattgacgccctgaaaagaaagaaaagtgaaagaatagttcacgtaagatcccacaagtcctacaaattttaactttccaatagttaatatatataagcacacacatatacacacacgtgcagtttagaagtgttaatatagacgagttttgtcttggctttttattttttacttaacatcatcttaagcttttcatatgtggttatttctgtgcctcttaccaaatattggcaattcactttccaaatcagacaattacttaccagtctgagagcctgcttctcatctatgggatgaaggtcatacaaattctgtgtaatgagattgttgtaagaattaggtgagattctgtgtggaaactgtgtttggcacagtccctggtacataataagggctcataggattattacagatcctagttaaatggcaaggcagggcccagcagggtgagccttgtaaacttgagtgcctcaactcccacccccacccccaaacctgttctgggtgtggtttcctttagcatgttgggagagtgtttagtttgcctgaaaatgcacccaactgaaaccattcccccccccctttagaaagattagaaggttcagtcacttgggcctggtgacttttgatgtagtttgaaggtcacaatgctggttcctctctcaagttcataaaagcctctggagcagctattgctgcagccagcgagcatccagcacttggtcagagagccgcctttgtcagagagcgctcctgtagccagactcatattaactgccccccatgggtgtgttgaatgcctctactgtgtttgcctttgaaaggcccttcttagcctttctctctcccccaaccccattttcaagaggcacaagacctttaagtagcaaatacagtaatcacagtagcatggagacacaggctggcctatatttggtttcacaaaggccttgtgaaagatctggccttaaagtccctttttaatgctgaaattatgcaagtggaaagttaatttgaggatcactgaggcacgctttattcatgaagaatgtgagcaaaacataaatacaaagtctggaggctctgttctacgctggtggcaaggaaattacataggtggtatctttatttggctgaatccccctccctccaccaagagtgcaactgtgatagaattttggagtgagagctattgttttaagcactgactggttgcaggtgtgtgtgtgcatgttgcctgaaactctctacaaaccatagacatgattttggtggaattggcgtgccaacagtggttacagctaagattgtagaagaccaaacattctgttggaatgtgaccttaacattttgaattatgtttcttaagtaagataaatttcgaaggtctattttatttttatctttattctttgaaggcctgctttaaagtttaccgtgtctttgaaagtctagtctgttgaactcttaaatcccagtgagttcctatagattgctagcttgagtgtatagtatttgagatgtgaataaagtctagtgcaaagtgtgtttcttgtgcttgaaaatggtgccctgatttctgttgagggagacgtttattcctataaaggtttaaacgacttgctgtacaattcagtcttgcaatgacagagagattacacactatctgcaaacaactgccaagcagatgaaatcctggctgtgggaagtctgcggtgaagagtggtgggggtggtcaggagagcagtggaagggaagtggctcagaacattgtagtggtggtttggcgtgcctgtcaagggctgtgggacgttttctctctcatttcagaaacaagggtggtgggaaacacatgggccgtggatttgcataaaccaacagtcaaatcctagctctaccagtgacttcactgagcctcattttcttcagggggaaagaataaatagcccttggggtgattgtaaagcctaattaggtatgttataattgtattaagaggatgacgagttcaccgtttgccagggagttttccggttttagtgccaaacattccacatccggggaatcttcctcagtcccaggcacactgggtggtgagtcccccagttatatatgaagatacctattactgttccctaattgtatgtacacacacacacacacacacacacacacatacacacacacacacacacacacacatatctataaataaagggcttctggaagctggctgcctattactgtgtacctgatactcagtgggtatttgtgaactcccaggaggatagtgtgttagtgtgtttgcgtgtatctctgtattccttcttagggatggcatacaaataaatgtttcatgaataaagggatgaatgagtaggtaaagtaatataagcagtaatgcatatgttttaaagtgatttagctggttttccttccaggggcctcttccctgagaaaagagccacttaataaatgatgtcttgaatgaaagaatacatcatgaaaataattttgtccatgatgtggctaaactaaaactccaggaagggcttaggctgggcctatctactttttttgataaaatgaagtttaatatgaccctagtgacaacctcccctcatccccttaaagctcaaatttagggaactcttgtggttggactctcacatactccctaggactctgctgggtgctggggaatttactaaactttggtgaggagaagaggagaggagagggaagccacggtactaaggtacttagggagacagaaacagttcccctagaaattagacatcacattgtctttttcccccctttcttttgaatgagatggggcaagaatatttggaccaggataaagttttaagatgcatttacactaatgtaatcaggttacatagcaaaaaaatgttaaaaatgtaccctgggaaattgaaatctatccattcttctaggtgtggcagcttattcagatttttatgttgtgtgaccataaaacgaacacagcttttctaaccgcgagtgtctttgtttacagagataacagtgtgagtaatgctttgctagaagccaggcagttaaatcacactctgagcaaatagaggctgggcttcagaaacttagatagcacacgaatgtgcaaacttggtcttttaaactgaagacatatctgaaagaaaactgcttttggcccatgaactactttcccagccctttgtgcctcccaatctctgcccccctttacaaaaaatctttgtttttcctctacaaatatacatatatgatttcaatttggaggtgggatgttatttttttcacttgaaacacaaggaagcaatttttaaaagtcatactcgttcagcagtgggcttgactgtagccagtttgactaggagttcttggctacagaaccatacacttgcagtctttatcagggtagtaaattcagatgggtttttggaaagggagagggctggagttgagggaagggcactagagcagtgtgacccacggcccaggagcagtgtgagtgggaaggggctctagaagctgactgcctttgtgtttgccacagcgtgctgggaatcagatgagaaggcgggcccagaccccaccagatactcatctcagccattgttgtcattaaatgactctgaaatgacctttcttacctcagtttcctgtgagctcatagttgtctgcagatgtgaattatgtcattgatctttgctccctctttgcttataaggagtagctgttctgctccatgtttctggaagaggaaagtgatgcacaggtcacttagtaaagcggtccccagcctttttggcaccagggactggttttgtagaagacaatttttccacagatagggtggaggaaatggggagttggtttcgtgatgaaactcttccacctcagatcatcaggcattagattcttattaaggagtggtaacctagatcctttgcatgcacagttcatgatagggtttggctcctgtgagaatgctgctgctgatctgacaggaggcagagctcaggcagtaatgcttcccatccaccactcacctcctgctgtgtggccggttcctaataggtcacgggccaggaccaataccggtctgtgacctgggggttggggacccctgactcggtgattcagcagttgatttgggatcctctgtctttgttcctcctccctcagcgggaattcacagtgtaactcatttgctaaggttttctgcgttagaaacagaactccttttggactactaggagacatggtcattagaataattatgattcttagtatgactcaacccctttttaatattcagccttatggagggcctctgcctgcggctctttgctcaggcactagggccacaggggtgtaatttctatctctgccctcaggaagctcacaaacaagtcaagagacaggaaaacggatcctgtttttctaatgggatttgaatggatgtatttatgggaggggggtgctttgtacacctgcaaaacagaacaccagccctcccttctcctctggggttgctgtgagaatcagttagaataatgtgcatgaaccccgtatggaaaatacaaactcataattaaatctaagaaatttttgtggggggacacaaatgttggggttgtctttgttctcaggtcccctcaactggtctaatgaaggaaacagacacctttccagtaacaatagccaacatttattggacacttatgtaccagactgtgctatttatgacatacattatctaatttcacaatcagaagaatgctagagatagggtcaggcgttatctctgtttacagatgaggaaagcaaggcttggagagaatgccatacagttattagtgtggcggagccggcctttgcacctggctgttgaccacgccctagcattaaaccattacctcacactgcttctccgagatagttatcttcttgggatcatttaggtgtggcaggatctggagggagcagttggacccaagtctcctagcagcagcctacacgtttcttgagtctgttttgaaacaacttccttagccctagctgcgcagaaagcatcctcccctcagagtgatgatttttatcatgtggtttccttcctcctgcctttggaggtcaggtcttctcacccagggtcagaaagcccatcagttgctgataagctgcagcacttgagtcacagggtgcaggcctgtgtttagaatgggtcatgctcatgtcaggcacgtggggaatcagtgatcccatgagagctcgatcagtgcagtctggtttggaattgcaggtcacacccttccaccactttgctcatgtgtctactgatgcctgtgatgtagttagttaaaccactgacttctttctcctgcatcaaacatgactttttgaaaaagtgtgtgggggctttccagcatgaaccaggcataaaccaggtaccttcatgaacatattatttatcccttcagtcaccctgtgtgctaggtggtatcataactgctttgtggattgaggaacctgaggaccagaaagatgacttgaggtggcagcctcatttagccagcaagtaagaaaatgggtgatggtgaacttctgcagcaagagggggccgttttcaacatttctgtgaattcaaggcgtgtgcttcgtctaaataggtggagacacgtaggaaggcatagtgtatacatccatcagcacatgggtagattttgaggttttttttgttttgttttaaatccagagcgttgtgtatttgatcattcttggagattcagccacattcacaggtgttaagtgtcacacctaacctagcaatacaatacacagctgaaagaaaccagtcaggttttcccaatatcaatttctttttattttcttttctgcaactccagaggattcaataatgtcaatttctgataaagcttttgctattgatgagtaaattcttccattaaaaagataacagtctgctaatttgcttatcattgatgttgcaagagcgtaacattggagggatgagtaatgcatctgcatatctcgaaggacaaaactgacgtccacccacttgtggatacggtatttggtaaaagtaactaaggtaaaattgcctaagggcatttaacttgagccatagcttaaattcaggtgatattgagcgttgacatatcaggattcttttgtacacagagacgtggatgtagacccactggtagcaattgcaaaggctctggatttttagctgctggatgaaatacctgcagctgaacatctgttatgatgcaattaagcagtgactcagtggcgtgaaggctcagtttcgatgtatcgggaactcctttgaatctgtccacaaacttctcaaccaaaaggagaggagaaatgtgtacagacatttgagaggctgggtctcaacatgcctctgcctaggcagtcatgggaacctggtcttttctcctgagacaggaattaacctgtagtacgagaaacatggttggatgagtggttaaagcagggcccagactttggtacagtttaggttatggtagcagggatagggagagaggtggatgatggtaatggtctgtgtttttttccttttgtcactcagatccagctttttttttttttttttgagagacagtctggctgtgtctcccaggctggagtgcaatggtgcgatctcggctcactgcaacctctgcctcctgggttcaagcgtttctcctgcctcagcctccccagtagctgggattacgggtgcctgccaccactcccggctaatgtttgtattttagtagagacagggttttaccatgttggccaggctagtcttaaactc

SEQ ID NO: 37175 - DNA, 1003 bp, Homo sapiens
caattttttttttactctatactttgaagaagtagtactttctagaacttgtactcaaaactcaactgacaaatcctggaaggccgttgcttatacgctctagttgatgcgccacagctgcctggctgtgagaatggagtagcatgtacctcttaattagccaagaataagtgccgtggaagaaggcaggatgactttttagaacccatttttagcttgaagatcactgagggagccatcaaatccatccacctgttcaatcaatattcagccagcaagtgggtgtcaaggtgagcagcttacagtgctgagcacactggaaacacaggtgtgtaagggacagccacggtctcaaattacattctgaaagggaatactaggtaagtgatcccaaacatgcaaatatcattccttggtcctgggatgtgggggaagcattttggaggaattgacattgattgcaagtttttaaatatgacctggattagattatgagatgatgggtgcttgggggtaggggtgtacagagggagtcatgaaaccatggaggatgttggggaatggctagaattctacttgggacatcatgcaagttttttttccccttccatttcatttgttaatgcttattattagttgggggttttgcctcctttttgttagccaacagccagctaatcttggcacaggtcccgggaatcaggtgctgcttagcagctgatgttggttaaatgaccttggacaagtgacttgcatttcagttctctaacctgttagggttgtagattgtctgatacagatttgaaggcccctgcaaataaatgcatggccgtttactctggtcactttcattttaccgaatgtgctcccccaaggctcttctgggtagatgcccactgccaaaacattaagcatttttggcttctcatgctttgagctcacaaaatcagtcctgtgggaaacctaacaagctacaaaggagagggaaagcaaaagaaaaggt

SEQ ID NO: 37176 - DNA, 2219 bp, Homo sapiens
gtatatatttatggggtatgtgatgttttaatataggtatgtgatgcttaataatcacatcgtggagaatgggatatccatcccctcaagcatttatcttttgtgttacaaacaatccaattatactcttagttatctttaaatgtacaattaacttattattgattaattcacactggttcccaccttagctctcatcttagaagaggtagttgtgttgctttgcctcttattttcggagaaagcccccatcataacctcagctccctccagagtcttggcttcttatggattgtgactttatgcggctcaccttgacgtacgactgtgacagaggcaggaccctggtgacagagcctcatttctcagttattgtgggtctcctctcagaagttgtgcctgcagtgccttggtctccacattggcaaactggggttgtgccgctcagaagaaaggccctctggaagctgcaggagggactgcccagcagatgcaacctgtaggtgccaggtcatagagagctcatggtgggttttgtagtcggcccatcagacagttactagcagacaattgcatatttgcttcacatgcatttagagcaaatatttacatgtgttttgtccatgatgcaagttaaacagttaaggaaactattgtaactcaaattctatttttatacaaatcagcaaacatgaatttaaggccttcagactagtccgtcacagggaggacttcagtcaaaagattagtttccttcctgttgctgcctcaagataacagttggattctctgttatcaatacagccagctgcctgtttccggcttcctgctctgtgtattttgcatgttactcatgggaaatgatttatttattttttcaagctaaggcatatagggggactccaccctaccactattcttttgttttgagttaagatccttttttattctttattttaaaacagttcaagaattaaactttaatatataaattgttaaagttgcaacaaattaagtcttgtgacaattgacctgattgggtcatgtttaaataatgttgtaatatgttacaatgatgtcctaatcacaccgttgtgtattttgcaacttcactttaccgtacaggtatgtggtggcaattgcccaaagataaaacaagcaaacaaaaaacagaatttgtcaaacattttagtttggctctggacccattttagtctgaatgacagcaccacaaaattgcatttttatccgtatttcagacattgaggaattgcaagaagcagttcacctgtcatatatttttagtgctatacaatgacaacatttaactgcctagggcctgtctttgtgatatgaaatttccctcctcaacaatttcagtgagaccaccaccaacaataagatttatcgagaacctagttgttggacactggaggtttgctgactcattgaacaaatgtttattgtgcacctcctttatgtcatgtatatgctaaagctctaaacatgaataggattgagcctttgcctctgagccaactgcaagttaattgaagagataggacacaagacgtataataaaagatgagagaccacatcccatcaaatgatgattgctgacatctgataggagagggcctcttggtagaactaatcttggctggatcttaaaggaagggtaagagaaaactgccttctaggttagaagaatgatagaagcaaagatgggaaaaagcagtgtgcaaggtgagagttcagagcatgagagtaagacctgttaggttggaacaaaagacggcatgtcagggaagttcccagatgaagctgatgccttaggagagcccgtttgggacctttaaatgccaggttcagagatttggactgtcttctggatagctggggtccgttgaaggttttggtgcagtgctgcaactttgaaaaaccactgattgaggaacatggctatggtagtgatgtttaaggtggattagaatgcggagagaggcccaaggcaggggagttcagttggggtctgaaaccacccaaattgtggtgagctttgttcaaaacacgcaaaaatagattgtcaaaattattctcttagcaactgatcttgtacttctttgtaatgtctttttgttattttttaactttttattttgtatccccagctagatttctagttcattgagggtaagagactttatcttagacacaga

SEQ ID NO: 37177 - DNA, 8015 bp, Homo sapiens
gggagccatcctgtgtaccgcaggatgttaagcagcatcctgggcctctaccctctaaatgccagtagcatctacccatgaatcgtgaccatcaacactgtatgtagacattgccaaactgctaaatgtgccgaggaatcaaaattgcccctgctggagaaccttgggtctaaataaccaaaccagtatggagcttgtaagtgctacctttttgtacctttttgtaccttttgtaccgtggttgtaagaagcaaccacggttgcttcatgctcataggcctggaagtcggctcactgccctctgctgccccaacacctcctcacgcagctagccccagtcacagcagcttgagcttggaagcactcctggattgcctttcatcgtcagtgccaagggcctcctgctcctcctcagactgtctggcccatatccccaagccttgctgggtggggagtgcaggggtgatgtcattgtgccttcccaggataggtggaacaaaggagggagtccccaaggacccgaagcctgatcctctactgagccaccaaatagatttcttttcccctctgtctccctccttccaacttcataagcatttgctgttctccaagtgctccattgtaagaggacacgctagttgactggggctttgtgtgtctctgttgagtccgtttcctgcccctcgtgtgttatgagggtgttgattctggtctggtccccggatggaatcttctgtgtcttttccaacgtgggggtgtgaacctgaggaacttagaccctgcgtgatttttccagcactcttgcacttcgtggggcctgctcctgactgtgaggagagttcgaagggaggggaacaggaagagagggcaggaacacaagagcttgtttttttatttttgacatctcttcctcctcttctttcctcccacctactttgagtttctaagaaccatgatagccctggggagccctcccggcacagatctcagtctgtttcagctctgttctctgcacccacccatgacctctccatttgcctctctgtagggaggagggttgggattgggctgtaactctttaggacagggcactaaggaagtatattgactgttgtttctggcaaatcctcagagtttccttgtgaaagaacctgttaattcaaaacctgaaagaagtctgggtgctcctttagtgagagattcacccaaaagagtgacaattggctgaggaacacattttgtgcttgtttatttagaaatattttaatccaagcaggttttcattttgatcttgctcccttgcttcattaaagacattttctgactccagtataacgcataaaggattttataattcacaaaaaaaattgttaaccctaaatacatataaactatgagttacttgcctccttgataagaggccatctgtgaaatgcaccttacatattctgctctagacctgctctttcagaatggccaagcttagccccagaattacagctcctgagtcactgtagtaaagttgccatccatcacaatgattacgtgatcaataatgcatgtggtcttttctgtgggacctgtcatgatgttattggtgcagctgcttctccactgcagcctgccccttactgtctttttctgcttcctctaatcctgtcctttttgatcctgtgtttctggttggcctttgtccctggggaagggccctccttctgtctggatgggtaggtcctttttgggaaaggcaggacctcaaggagccgctgactgtagcaggtggccggggatcttggcaggtgccccagctgattctcctgccaggtcggcagctgtaaaacctcaaccaatgtcatctctgcctcattccctccctgtggtgggtggtggagtgagtttagcaaagccttcagacagaccttcccagggtgttgggctgtttgctgtccttctggccaacctgagaacccagtactctcaggcgactgggcacatgccttattagcaagggtggctttttagttgttacccccacccagtggttttgaaatacatgccaaattgttgagctatctgctttttttttttttttttttttttgtagattcgtgtgtaattatttttgtcatttgggtttgcactaggagtaggtcttagatttttggcataaattcatgctggtggaactagatatagtgtatgtaacatagagaacagagtcagggagtaagagtggttgggtccagggtacgttctgtggatgtctgttgaaggtcttcagcaacctatgtttagaacattctgcagaggcaagaagtttgaaagcctatttgtatggtatgtgaaggccagttctgggcaaatatgtctagagttttataccttaaattggacagaatttgattactgagctttgaaaaacctttaacactgtttcctggatgacttgaatgtacaacaatcacgctttagaccataaatcagcagttgccttttcagcgaaggatcacagtatggagattatatttttcttctccttttatagaagagaacattgaatcctgtgttgagtcacatttttgttgaaaccttgggcccagaccctgctttcccgatgcctgcaaagacttcccgatgcctgcgatgtctttgcactctaccatgttgcttgccattttcttttgttgttcatggtgtgtgtgactgagcaggtgaagacggtcattgccaaggtcatgagttaatttatcttgtccagtgttgcccaatcctttgtagatgagggaagcagttttctgctgtctcatgagatttcctaccctacaccctttaatatactcaccttttggaggaataatagctgtaacatgtatgtaggaagctttaccagtcaagtattatggtatagggcaggactgcaaaggaccctgttgtcatctgcatcctgctgcctcttcagcagggatgggagaaaagaaaggggagcaaaggatgttctgctggcagtgtgcctgggagctcacatgtttaaggactggacagttcctacacagatgctccttgacttatgagattatatcccagtaaacccatcgtaaagtcaaaaaattgtaagttgaaccatcagtaatcagtgttctttctcaaagacatgaccgcagttaaggggcgctaagtagaggtgtccttggaggtcagttttgctgaccttcctctggctggggtcttgtggccctgctagcatgtgcctgctcctgccagttctgtggtcaatggtaaaacaagttcttctctgcttgcagatgagcgtgaagccgtgcagaagaagaccttcaccaagtgggtcaattcccaccttgcccgtgtgtcctgccggatcacagacctgtacactgaccttcgagatggacggatgctcatcaagctgctggaggtcctctctggagagaggctggtgagtggagaccttaggaagtgccgtgtgttgtaggtggaaaatatttttgaaaaatcaagtgtgacttgtctcctgttgaattctgcacttaatggttgatagttttgaggagaatcttgagaagtgagttgagcgcttcagggagagccttagtgtcacattctgagcgtggatgatgttcttgagctgtaataaagccactttgttctggtaatttgcaaggttgccacctttggtcagaaagaacttggctggggttcctgccaagaacagggcatggtgctggaatttgaagggccaggcttgggcgctggcttctagatgaacctgtgtcccacatgcgatgatggaatgttttctaaatttgtgtctttctggttgtctagaaaatctgagctgccatcttaaggtggcaagcattgaattcagtggccactgatgttttcttccctgcacgctttttattttgggagtggagggagaagctggtgttttgtcatctccttgggaaaggagcttctgatgaattcaccctgccttttcaggcaggaaagttgtcagcctgcaatgaaaattgtatccccaatctgtttcccagagctgctgcggccctctctgatgtgactcttgtttatgcaccttataccaaagaagcttaaagcagtcactgtgactgatccaacaggttttgtctcaccttggtttgaaaatggttgctgtatcctcccagagcacatgtagtgccataggtggaagtggtgccgagccagaagccaacgcccagaatggagaccacatctgtactgacatcaccaggaaaatatgatgctggcagttggcagggctgccagaaagccttatttttaacttgatctccaccctgtagcttgccagccgcagtaggcctgtgtgcagacctgccccacacctctgaccgcaggcaagggtctaaggttgtcccttgtcctatttgttatcagctcagagacagactgcctctttgagtctgggttgaaatggagccagaaaagtattctcttccctgcccttcagttcaagaacagggctctccagaagatagtgaagccctgtcttctctgtagtgagtttcatccatgccctttgttcctgagcatgtaggtcttgtggcctcattttctgtgagggtttgtcggtcacactagacaaactagacaaataacggagacccctgctcaaaaccatgatggctataagaaggcagttgatttgtggtctgggggtgagggagtggacccacatggggagtttgaacaggccatttattgcattttgatttgattttccaaagtgagtcttgtttgagagcctagactagaattattgtgatatgcagctttaagtataatttttataaccagacttcctttgtctacctctcaacctttttttgtttcttagtgtttaacctagtatgtttatttattgattttttttttttttttgtggagtgggggaatggtgttttgaaagtagctaaaaaaaatcattaaaggtcacatggataggagttagtctgaacatttatttttgtggttttttttttttaatttatttttgttccaatagggtccaatcttctaggctgtagggagtaaactgttcacctttaaagacccataattattttataccaagaagattgtgtccttgataatgtccacatcataaatgggatcaggcccattgccgttttttctgaacagggcaagaaaaatataagtagggagaaaaaccagtaaagcataattcttagatgtgtgtgagtatctcccactcctctccttatttgttagcagtaagtttttttgtggcaacccagagacctaggagagtaaggatgaagaagatggtacagtggctaccatctccaacctcttaggcagtcgatatcagtagttttacagaactttgtaaagcccctagtgccttcatttgtattacccattcttcacagccatcttggattatataggttggccagtctaattttcttattccaaaaataaagataccatagatagagtgctcttaaagctcttgttcatctgggctggagattttaagtctctttggcctcgtagtctgtttggttcatggaacttcctggaaaggaaacacaccacacactgcctttggccgtggaggttgccaggacctcaagttaaagatcctccctgcagaagacctccatgagagcttgccccaaaggttccttgcatattcagattccagaactaatgaggtggttagagcttccaggcctgggtaaatgaatgtcccagctaagtgtgtcatcagataacattagctgggctttctgcaccagtggtccaaaaccctgggtaacataaatgtttgcactctatctggagcccagtctttgtcagccagcattttagccccagcacttaaccaccagcttggcaatagctagcagataaatgtttgagggactaggtgattcaatttacttaattaatagattcttagagccacttcctttacagaggaggaaatctgtgaatgtgtgcatgtgtgttttctgagtaaagttcaaagaaacattaatgacccagacaattccaccctcaccccaccctggattttggctcaataatatttgagttaaatatgagcaagtatcatgtaggcatttgggaacttgattttgaactactcagcaacatcacaaggcagagatctctggtcctggcctggttatgatctgtgtccagaagtgtctgctccctctcggtctcaggtgtatcagctcatagagcagtgagaaggctgagagctgggccaggaagcttctgctagtcaggattagattgattagaaataaaactattcttttctcatttcttattctgagttcactatagtctataactctccataaaggtctcacttgaaaaatgccttagaaatacagacccaccctttactttaacattggattggcagataaaagtgtgagcacagaacctgtgctggccacttagtaattagacctagatctcaggaccagagtagaatgaggcttgaggggtgatggtttgccctgcagcagcgttgacatgtggagagagaggagcccctggcatacgataggcctgcacttcaatggtaatgttctgcccacagctcataatccactttagatgctccccattgcctgccatctcccttcatgggcgtctgcagtgaagattgattctcactatggtggccagttttttgccttgctcctggccagactaagccctcgcctctgaccgagatagagtgaggttttccaaacaactctgccctcccccaaaccccaccaagtcagttatcactggtttttgcttccctgttgtttcctgatctgtattctgtcttcttactccatcagtcattctctgagaaagcaacagaaaagagtgtgtgtgtgcgtgcatgtgtgtgtgtttgtgtatgttgccaccattaatttcaaagcaggctgagctaggtggagaagatagatttaacatgagatttgttaagcctcaaatcccacgttgaactgctctgagttttttcataaagcctttgtttaagagaaccatactggtacatattgtttattgaaatagtgtttgtggactggccatggaacctcgttggggtttcttaaaaacgtcatttgtatgggagaatttacttttgttttaaacaaccagccacagaactcctacattaaatgtgggtctaatcacacaaacttgagaagtgaactaagagtcctaagtgccacatgataaagtgccagatgaatggccccagagccctagagttcagaaggggagatgagccctctggacaggatgtcaagaaaccttagtaggagggtagggtgtgggtagggttccagctgggtccaggagaagagcttcacaggccgggcagccagagtgtgaaagctcatagtttggactaagtgaagagagcatttggaggtagcaggcatcaggaactggcgcagggcaagtttcccagccaaactggaggggttttttttgaaaggagtggtgatggtaacttccctatcacttgtgtttacagagtactctcctactcttttctcattcagttcttacagtctaatgaagtgggcaacctctgctttacagaaaacagttaccagtgacttgccaaggccagtgctgctagtaggcgatatggtgtggactgcagcccaccctgctgactcttcagcgcctcctttcccatggagcccttaggagtgggtcccagctgggaacaagacaggcaggaagtcatgggacacagtgtggtattccccgattaattgtaattgggccaaaataactaatactcctctgaaagctcaaagtttcatgtgttgggaggagtttggggactagtgtgaagtgagtttggctttgtagcatattagaagaaattttggaattagtgcttcccatcctaccctatgtattccgtagaggcctttgtttgtgaatgt

SEQ ID NO: 37178 - DNA, 1323 bp, Homo sapiens
gggctatagtgggtgcctctgaccccttaagagagagcgctcagccttttgggactgtgcaccaccacgagcctgattattggttctttctccaggctcatgcttcgtactcatgcgttccaattaaaattggaaaggcaggaacaactttgtaccatagtgtcaggtttctctgcgaacaaatattctaacagtcctgtctcctcagtgactgtgttctcttgccattccttcctgttctgcccctttaataaagatctgttttgatttttctgggtaaacaaaaacctcacacaaaaaggaaaaacgaaaaatcaaattataacttgctttgttttcttattgaaactctgaaatcagcctgtcaacagtcccttttccttctcacttgccctacgattgggcttcagttagtgtcgtgattatatatgtgggaagaaggggtaggggactagaatgagttacaggaagaaatatcttcctgcctggctggttcccaagctggctgatcatctgatgcctttgggaaacccttttaataattcaggttcccagggcccagccctagtagttctgattaagtaggtctgaagagagaaccactgttgaagatggtacaacatcattaaaggagttaattacagcaatcaaggacatttttccccagatagaactcttacatttctgttatttagttcctgaatgatttgaaaatggagtagccattgaatccactaattactgctcttgtgtcttatggcaacagaggtgaaattattagcagtacactcctctagcttcaccccagttttatggagtaaaatgttgtatttctgttagctttggcctgcaataatcagagcgtggaaggccatcctgactgtgggctatcttgacagcgggtcagcacccaggtcagggagctggcacacacagcccttttcaggattctcagcgtgaattgctttgagtcattgactaattcgcttcctgccagtttgcatattcctataattcaacttgtaaatgctgatgtgtattttctccctttctgttgaggtgagaggcataggctgctgatgttaccgcgtggcctgcagtgttgttgtcttaaatgactcagctttctccagcagctttattaaaacattacctattctacaaaaataatatgattatgaatcagccaaggcccagctgtagatatccagcatatctataaggatactccacatatccttgtagatacatagggtcaagcttccctgtgtacctacaacggtctctccttccaccagctcctgaatatacggttttacaagt

SEQ ID NO: 37179 - DNA, 7090 bp, Homo sapiens
ttacgggaaagacctgaccagcgtcatgcgcctgctcagcaagcaccgggcgttcgaggacgagatgagcggccgcagtggccactttgagcaggccatcaaggaaggcgaagacatgatcgcggaggagcacttcgggtcggagaagatccgtgagaggatcatttacatccgggagcagtgggccaacctagagcagctctcggccattcggaagaagcgcctggaggaggcctccctgctgcaccagttccaggcagatgctgatgacattgatgcctggatgctggacatcctcaagattgtctccagcagcgacgtgggccacgatgagtattccacacagtctctggtcaagaaacacaaggacgtggcggaagagatcgccaattacaggcccacccttgacacgctgcacgaacaagccagcgccctcccccaggagcatgccgagtctccagacgtgaggggcaggctgtcgggcatcgaggagcggtataaggaggtggcagagctgacgcggctgcggaagcaggcactccaggacactctggccctgtacaagatgttcagcgaggctgatgcctgtgagctctggatcgacgagaaggagcagtggctcaacaacatgcagatcccagagaagctggaggatctggaggtcatccagcacaggtgagcggggcgctggtcagccactggcctgttccttgtgaccaccagtggcccaggaggtgaccaccctgtcaaattgccatttcagatttgagagcctagaaccagaaatgaacaaccaggcttcccgggttgcagtggtgaaccagattgcacgccagctgatgcacagcggccacccaagtgagaaggaaatcaaagcccagcaggacaaactcaacacaaggtgagcacgtggccagcagtgtgccagcctcccacgtgtgggactggggagggtgaggtcactcatcgagctttgctgttgggaatttcccacatggggtcatcgacattgcaacactgatgtcatggcattggcacctgccttttgacatgtccttgttttgtaagaagtgtctctcagggcaacatcattggttgcaggaggattatctgagtcagcccagcatctgcccctcgccacaccaaagttagggccttggtttgacctgtgtccagtgtagaaggtattaagatgacacctgtgctatccattttatagtaacttcaggaacaggactctagcatgtttaacacttaatttgccaatgaaagtcctgattgtcagggcagacctttgttccagtcttatctttctgttgagtaaacatgtttgagtaggttatggcacctggccccagttttgaaggttaccatcagtcttagatttggaaaacgttcattaggtagagttcagagatgtgtaaaatgtgtcacagacatgaattaattgactctgggaatggatatcttgtaattgctcacattggagctctgtaacacattcctcttcgtgacaggctttttccagattacattgcatccctgagctatttccattatatttggtgttcacagtttgagtgagatgattttccaaaaaagcatgtagtcaaagcacagatggagaaaacagataagcagcattaacccatcactgttccttttgcaatccagccatggtcagtcttccctttttcacactcgctgtctgcccctgcactcacaggtggagccagttcagagaactggttgacaggaagaaggatgccctcctgtctgccctgagcatccagaactaccacctcgagtgcaatgaaaccaaatcctggattcgggaaaagaccaaggtcatcgagtccacccaggacctgggcaatgacctggctggcgtcatggccctgcagcgcaagctgaccggcatggagcgggacttggtggccattgaggcaaagctgagtgacctgcagaaggaggcggagaagctggagtccgagcaccccgaccaggcccaggccatcctgtctcggctggccgagatcagcgacgtgtgggaggagatgaagaccaccctgaaaaaccgagaggcctccctgggagaggccagcaagctgcagcagttcctacgggacttggacgacttccagtcctggctctctaggacccagacagcgatcgcctcggaggacatgccaaacaccctgaccgaggctgagaagctgctcacgcagcacgagaacatcaagaacgagatcgacaactacgaggaggactaccagaagatgagggacatgggcgagatggtcacccaggggcagaccgatgcccagtacatgtttctgcggcagcggctgcaggccctggacactggatggaacgagctccacaagatgtgggagaacagacaaaatctcctatcccagtcacatgcctaccagcagttcctcagagacacgaagcaagccgaagcctttcttaacaaccaggtaaggtttgttcctgcctttgcttcctttcggtgaaagcagccctggctgccttttgaaatgttttggctggggcagctggtttaaaccacacctgtatggaattatatggataatttagagactgatttttttttccccatactcttaaggcattgaaatccatcacgttgtaggggacaggaattgaaagttgccataagagctgctttgccttacaaagtactgtttgatttcaactgccattgaggatctcttatgtgttcatagtatgtcttcataattgaggtattgatccaatttaaaagatacagtgagggccaggcatgatgactcactcctgtaatcccagctcttggggaggctgggacaggagaatcacttgagcccagcaggtcaagggtgaagttagccgtgatcgtgccactgcactccagcctggtggcagggtgagaccctgtctcttaaaaaaaaaaaaaaaaaaaaagtacggtgaggatttttttttttcttgagaccagtctgtcttcttgctctagaagggtcagggacttcacctgaggacacaaagtagagattagagaaataaaaacagctgaggatagtcaccaacttcagggctgttactgtctcaaagagagagtatgaagggtacattgctgttgccttgataggcacgtgagaggacccttgaggctgatacacaaagctttggttcctttcctcactctctttggaaaaaaaaatttagagcattaacccctgagggaaattcggtcagttacagtgtcccactgggtttttttcctcctaacttttaatttgatgtgatttaattatttcatgtaagtgtaatgaagaaagtgttgtgaactatgttgcacggaaatgtagaacacaggaaaatgagatccttcattgatctgctatgatttgttcctctttttaaataaggagtatgttctggctcacactgaaatgcctaccaccttggaaggagctgaagcagcaattaaaaagcaagaggacttcatgaccaccatggacgccaatgaggagaagatcaatgctgtggtggagactggccggaggctggtgagcgatgggaacatcaactcagatcgcatccaggagaaggtggactctattgatgacaggtacagttttctgaggttcttaagggagccttgcaccttggggctctcaaacttctgaatcattggccagaagcccttgggagtttaggtataaatttcccagtgggcagaatatgggtgcccagcagaagttcatctacccatacagaaaattagtgagctgtgcatgactgcctgagaatgtgggtctggtgagacatgtacaagtgtccacaaaaggaaagaaagcctgagaagccaagctaattcttaaccgaggacctgtaagagccgtagtgctgcatcgcgatcaggtgtaagccatgccctttgaggattaacacacgcttgtgtcacctgataggacccctggcgccaggtattcccagccaagcccgtgttccccttcatccatgagaaagaagcctgtcaggagagtgggaagggagggtgaagcttgcttgttctgagtacctggcaaagctacaaaggaacattacctggacttttttagaaaattggcttggatagtgctgtaataggatctttttcatgatggagaggtaaataagagcaaaggttattttcctcttctgccagggcatctccaggattggatacactttcttcatttcttgtttaaaattatttttttatttacgtgtgtgtgtgtgtgtgcgtgtgtgtgtctgtctgtctgtctgaaagatttcctccccggctggaggccagtggactctgtttgaccctaactctttgactcactccttactcttgccttgccccggttacttaagttggaggttggggcagatcaggggttggatgcactagcacaggccagtctgggccagccactggatcaatcactagcccctgttccagtttgggttgaatttaagggcttgctgtgagactgatgtaatcaaaaaacaagcccttcctttctgcctctcttctggccttcaagtgtgttggaaaggaaaaatattcctttgcttaccacatctgagagggtttcctgggacccctggtcaggttgacttaaaataagatgggtggagaggggattactctgtttccaataaagattgagctcctgtctttaccacttccaatctttttttctgagctgattcccaggctgaactatatgttctagggtggtattgtggaatagagaataacttatgttaattataattttgtatctgttgcttttaaaacagctgcaaaaaagaaaaataaatccaccaaaccctccttaaatgagcatgagaaacagcaattgggcaaagcattcataacctagggaaaaagaatttcctttttttgtaatattaactctgagtattttgtaaataagatatcctatgtacttccatgttagatgcacacagctggtttcctgcaggcgggcttggctgttagggatgtgtgcattcaggcaggcatgcagctgccttgctgcttcctcggtttctttttatgtccccagtgctgcaactgcacaaagctgttggaagcagatgatgctgtctagactcctggatatgataaaacgtttcagcagcagcagccctcagttgtggcttaaccttcattttgcccttgaccaagagcctgggctactggtgttccagagcttccttaggattcctcagttttaaaaatgaaacgtaaagataaccctgtactatcaataagcataataaagatggaaggagggagctttccgatgacctgccatcaggagaactacattttcttatttttctccattgatgttaactgaattctgatttcactttaatatccccagaggcccacagaattgaaactgaccctagagggtacttgtcagttatgaaaacacacacatctgtgagttccaggtgctgtaggagcacaaactaagtaaacatctaaaccttcagatataatccccgctcctcgaaacatcctgacactgtggtgaagcgattctcctagaatgtaaagtcattataatgtgcttacgttcaggaagtttcctgagttgttgaaagagtaccagaacaaagacactgactctaacagatgtgggtggggcatgagtggccttcaaagtgcctgtgagtgggaagagactgtcctcagcctgccccaggggatgtgaacagggagggagggagctcctgaccaagagggaaattccagccacagcacagttcatggggagcaaggaacagtatccagcttcataaagcaagaccctgtctcacaccggaaaacaggctcagaagttacccagctgtttcactcaggcacctggggttcttgactattcacagaaaccagaacacccgcatctgcttcatgtgatgagggagcttttttgagtcttattacagggagagaaagtgagagatggaaaagcactctttaagactgtggaaactactccctagttttaaaaggtccttctcaggcccttccctgtaattgaatccgtgatccaacatggagagaatttcctgagtttcacttcccacgaatgatgtccgttgcactagtaaaccattaagccacactcacttcttttaagcgtcttctgagtcagcggcagtcccagatgcctgtgtggctgtgtttcacaccacacgaaggccgttgtcacacctgcgcatagatcggtgtcatttggacatgtgactctaaatccttgcctctttcttcccatcttgatggtcccactataggagaaaggctgcctgggccggtaactgccgggcatgcatgagagttgattatataagaaatacattcaggattctgtatggtcatatttctcccttaatgaatctttccagtgtttgaagttactttcatttctgttatttccgtgagaggcgaggatgtgtgtcctgttgttaatttccagtatctgggattcttccctgccactgtaggacttcaatgagatgccatgccaaagggaatggaatcctttatccctttgactactggcaggactcctgcatttgtcactaaactccaactcatattatctcctttctaaagatttgcgttcttgaactcccctagaaatagaactggaatttgagggaagggaatttccttttgacattcctaacccatccacattcttagatgactaattctttttagcccaaattcactaacaatcttttatttttttaaatttaattttggtttctgatgatagatggcaatggcataaaatgtctctggcctttattattttttgttgttgtaaaagcagtaaatgtctgacattttcaaggggaaaactactgcccttaatcccatctgtagcatatgccatttaagtgtttgctttctaacccatgccttggagttttatatcatttaatatgtataaactattttcatttagcattatagtataattatttttctacgtttgcattttgcctatgtggtata

SEQ ID NO: 37180 - DNA, 1832 bp, Homo sapiens
cccacccgccttggcctcccaaagtgctgggattacaggtgtgggccaccacgcctggccggtagtgttattttaatgtgatatcctgaaaaacgaatgaatgattttaaaggtattccttttgtgttgtatgtcctcacattacaccacctattctctggaactgatttttatttttccaggaaggcagtatatctacatgtgtctggtacagggatgtgagttagtcctttactgttagcttgattcaacgatcaaagcattttttccttatctttttccagtctgcacagtgttcttttctgcagagaatgagtaaattcttaaatgacctttgtaaatgcccacaaataataactgtagctttggttgcagagtgctgatgaactagcaagttccatagatccatttcattgtgctgtatcgcatgatgctttatctgtaggatgatgtgttcagcaaagagcagatttgtttataagcctctgatttttatgtagcgcgctctctctctctctctttttaatccctcttgggtaagtggttatgaatagcgaaaatatgtgaatgtccttggcactttgaatcaataaatgccttctgttttgtgtgtatgtacagaatactgggaaaaattttgtcattaagttttactttaacttcttttcccctaagattgaatagccatagtctttcagattttagctgcccagataactggaacatagataattttttccaagtaggaagtgcgtgcctttattgtctaatagatccatggtctttgatgacaaaggactttatgagatttgctagtttttccctcaacaaagagtgaaatcaaaaatctcactaccttttgcttttaaccccctcccacccccgccccctgccccattccctgtgtggtgaatagcctgagaatagggacagtgcccaagagttcacccactttcagagccagagggctcctgtgacccacgtcgctctccttgacatcatttccaaaaaacaaatctcggggagcctttcctggcagcagcccacagtgggagtggaagggccttggaagtgttaattctgtaagtacttctactggttttatgtgtcacttctagatctttgttggtagaaccatgaaggatttaaggtgccaatttgttgtgacaataactggtgtaaaagtgggcttctcacggtcactcaggagaagggacatggtcccttcagttggttacttctgattccaggctggctctgcattcttttgtgtatcttcagcctgggcaaacaaaaagctcttcctaggttagcaaagcaaatggggcgggaatcaggactctggcatggcccttacaggcaggcagtaatgagccagggccgattcgggatggaagccagcaaaagtgggtctgggcctggcgtttggctgaccccggtaagagagctcctttctcaggtctgtcagcggccagcagcctttgtgcggctctctagagttcagatccaagcagacatgttgggtctcaaaatcaagtcctgtgaagtgttcttggtgtgaatgaaaggttctttagagaactagaggctatagaaaaagaggtgaaggtgactcaaacttgaaggaaacattgaaagggcatgattgttgccttagccctacagtgagcaagttatttatgcctttttgcattcccttcgatgcacccacaaaaagggggaggtaataaataagtagttttttttttttttttttaataaaaagaactaagagagtaagaaggattgccaaatggagtaaaagtcaatcatgattaacatggtatagctga

SEQ ID NO: 37181 - DNA, 2042 bp, Homo sapiens
ttaggacagtttgccataccataggggaaaagccactttattctaattcacccaaaggtactgtaagtgctgatggctctgggtctgtctttctgtcaagttgccaagtcacataagtaatgaatccgcagctggaggagctgctgctggaggacaggcatgttttcagacaggagcatggcctttagctcatgaccataagagggcgctacagcaaagagtactaaataccaatcaaagtgagctcagagtacaagagggtaacttgcttttctccgaagtgaaagagaagacatagtcctcaaacacttgccctgtgccctgtccctgaactctccatggaggaattttttctgttgtttagtgttagcagaatttaggaagggcttgtaataaggaaggttgagggttgggtggggtcacactgtgttgtgtgaggatcattttcatgttaatgaaatgtttagttctttaaggggaatgtggtagagcctttatctccccctgcccttttttttaaactgcacaggtcctggcacaatgtttattgtgtcataaataaccaagaaatgggtttctacaaagatgcaaagactgctgcttctggaattccctaccacagcgaggtccctgtgagtttgaaagaagctgtctgcgaagtggcccttgattacaaaaagaagaaacacgtattcaagctaaggtgagagtcgccgtgcttcatggctgccagagtgggtttgcatttacttccactctggggtttggttttcttatacagctgctgtgattagttggttctgtcttctgccattttaaatccccaataaagtgaaaaaccagtttggcacgtgtctcggttaggctgaattctttggcaactgtggccagccaccagcttccctgtggttaacagtacatctgagcattgaaggataaggagcttttgcttttataaccaggcacttactgttccctaagacttaaagagagctagtcacatttcacagtttaagggaggctttgaaaaatagtttccccatcttttcagcttatcccgacccaggagatgctattctttgctcatgaattatctggagatgggtcaagtgagtcatcctggagctggatggagacaaacaggaaatgtttgggtggggcctgggaccctgtcctcccctgactctcccagcagatgctccagctgtctcagaaccatctagttccaaatgtctctaccctgtaggatacatgtatctccctacagagtggagctaagctcagaatttctcctcacacttggaagtaggcagaaaaattattttatcttgtaaaaagtggttagaatgcttgtttactgatttgtgctgttgctttgggatctgaaaagctttggtcttccatttatttgtatgtttcatgccagttggactaggcccagggctccagaggagagagtgtcagatggtttgatttattaagctctgctgctgcgcagtgcaggcaggctctttgggtcctggaacactttacattttgtaggacaatgcaccggcagcctggctccttggctgctttcccctttgtactcccttcatgcagcttcagagagctgggatattagcgaacggcccctaccctgtgttacacaacagtaccctcgtcctctccgcagccacagagtgaacctgtgacccttccaagcctggggacctcccagtgtcacactaatagggcttcttaattctgagacatacagtagaagaaaagttgaaggacattttctgtttgcctattctgaaactctggaacatgtgaatgtaggggatacaagctcagtagcagaatttcaaaagggctcattgtgttcaaaagctttctcctgaactcagtttagaccagtaagtgatcaggcatccacaagtgatttttgccacaataaacccaaatgttatgtttggggctttttaaaatccttccattggattgaagcacaggctccctgtgtgtatcattggcgcgattatatggcttcttgatct

SEQ ID NO: 37182 - DNA, 816 bp, Homo sapiens
atatgctatgtcattaaatgcttttaaatctagcacggtgactagttgttgttcttcctctgctgcgtgtgcatgcccagtagggaaactgcaaagggagaaatgacaaacaagaaacattttacaaccagtctgggctcacttttgcattttttatgcatgtctggtgcacaagctttgaaaactacagcaaacagtaataaatgtgactgttttgtagttatacattcaggctttatcttttatttatgaaaaagttaccagagcacttgtgaaacctgaactctgagataggggttggcaaatttgttctgtaaagggacagagatagtaaatattttaggctttgtaggccgtaactgtctctgttgctcaattctgctgttgcgtaatacaaaggcagccattgacggtatgtgaatgcctgggcatggctgtgttccagtaaaactatttaaggacataaatttgaatttcatataactttgacatgccatacaatattttgattttcttaatgatttcaaaatgtaaagtctattttatacagatcagaccaaaaagaagaaaaaaaaaaaacaggcaagaggttaggtttggcccatgggccatagtttgctgacttcagcatagagtcgtgggttatttacaagtgacatacttttcctgggttatctgggtatgttgactccatgccacttgcataaagcagcaatggatattagtattatggatgtccagtaagttattccacaaagaccatgcctaaggtggcatcagccctgggctccacagctgcgtggcatcaaagctttc

SEQ ID NO: 37183 - DNA, 603 bp, Homo sapiens
atttcaattccataggagaaaagtttgcgaagatgaacccatccttatgttctcttttcacctgtgacacacgatttccatcatttctctatcacagttgcctcaggaagcggggaaggagggggagcagcgctgtagctggaacataacctgatggccccctcgtgtctcagatcatcgggcaccagtactagtggcggctgtccttgtagcacttggcgcagaacgaagaggaataccatttctgctctggctctgacacagccagcatttggccaggcgcctactgtatgcgtcagtcaggtgctgcccttagcactttccccatgttaactcgttccaaccttcacaatgaccctgtgaggtagagacttattagtgaggtgttgttagacccacaacctgaactgtcagcccagagaaaagaagactgagctaagccagagctggtagaaccaagaccacagtgctctgaagctttaacacggtctggctgaccccaggactgaccttccccctgcctcatctccattcagctgccttgatatcttgagctgagaaggaggtgtgtgttcaggatctcagtggcatcctgcgctgtgt

SEQ ID NO: 37184 - DNA, 1555 bp, Homo sapiens
gatgacagtggtgggccttccggagcagccgctgccaccacgctggctgcagtggggaggcgcaggcggtggtggcaggagccgctgcaggagcagcagtggcggtggtgggtgtgccccacgtcccctgtgccccgcgttcctgaggcagccaactgcaccaccctcaccttcacacagcggggcaggacccactcccaggtttgggacctccactggggcctcaaccttgctcccgccacgtcttggcagcccccgagcccccagctgaaggcacaaccaggactcatggggccgcctgagagcgtcgggtttgtttgtgcagagtttgcaggggctgctgcgccgcctgcaccttgcctaccgctgctgcaggcaaaatgcggagaggaggctagcagaccctggagcccacccctgggagacccctcggagcctgccgtcctgggagcccccatggtggggccaggccgattcacccactggcaggggagcagtacggtggggcatggagggacaggcagagaggagcctggaggaggagctgggcccgtggcaatgctgtgttccatggagtcggcaggagccccgccttcccagggacagctgtagccgcccaagtcgtggctgtggacccaggcctccctgtgctcttgggggccgggagcaggcaggagccctgccctcccaggtgcagctacagccgcctagccgcggctgcggatccaggcatctccgcactcttgggggccaggaaggcccccctttacccccgcagccttggaggtgtctgctcctgctgcctggcttctcccagctcctgctgctcactctgatctcggagcaaggttggggccaagcccaggtgctgttgcagcccagctgggtgtgcgcacactcagggcagcgctgacacaccagtcccctgccgcctcagcctcctctgggctttgggcaccgataagcccgtgagggaggccgcggcaggggctgagggcagctttgcactggcctgctggtgcccctgggccggaaccgcctgggcaccataaaggcggcaggatcagacaggctcctgggaaacaggcaggtccctggtgaagccccaccttccatccggggaaggtctgaagtctggcggccgggctgctggtcccgtgatcagagtgggaacttgtggtgcttttttcgggccgtccatggctgctaatggactgactggcacacacttcctcccctctgaggcccataaaaagccacggactcagccagacctgaagagacgatgggacgacctacctaaagagaagacctacccttctctgctgagagctgaacactcattgggaaaaccctggctacctagaggagctacctactgcgggtctcctctgagctgttctgttgttcagtaaagctcctctttgtcttgttcatcctccacttgtccgtgtacctcattcttcctggacacccaggacaagaaatcgggacccgtcaaatggtggggctaaaagagctgtaacacaaacagggctgaaacacgccttttgct

SEQ ID NO: 37185 - DNA, 1491 bp, Homo sapiens
tttgttgattctgtttccttaaaaacaaagatgagaccaattcaaatcctcattactgcgggcagcaacaaatcatccaaactctggcacttccagttctttcgagctttcctaccaggtcggagggttgtcttaaaacttgagggagatgaactgagtaagcgattacactgaaagcatgggagggaaaggacgttccaaacgtccaatccatcatccttttgcagcctcttagtcactgggattttgaaatctctttccaaagactagctatggccctaaattggaaataggctacttgagaacacagtggattcatagttcatctcgggcagttttaggagaaatgccaccagcttctgcgtttgaaggccaaggttagctgttcatggcgtgagcaccttcctgcttccaacctccggttatctgtaaatacccaagtcctctaatttaggacgcaggtcatgggaagacgctggttcttagggcagaagtgagctcacattcccagcatttttcttaaacttggcagaactgcactttaacaaattaaaatccatgtgaatgaaaaggaaaacttaagtaggaaacaaacttaagcttgagtcagttacagcatggtgaggatgtcggttacagcaacactcagagaccgatgaaggagaaattccagtggtgggctgggagaccgtctccattccaactccaccgcttttctctacagagacccacgcacgccagctcccgcctcagtcacaagggaacgcccgcgtgggcaggcaatcgtccttggtgagccgggatctcctcaccccgagagccgcaggctccgctgacgccggtacaggtctcgctgcgactccctctgggcgcgcggaatcctgggacttgtggtcccttccgcgcgctgtccgccctaaccggcgcagagaggactacacttcccaggatgcgtcgggggaagaggccacagggacaggcagagggagggggcggccccagtcctccggggcgtcgctgtttccaagcggcgagatctcgcctagtaaccggcagctgaggttcactagcgcggcgttgtggccccgcccccggagccccggctggaggaagaacctgtctcccgcggcgccccagtgacgaagtccatccccgggtgcgggaggcggggaggggagggcaggcagaggatttcgctcgctcgcccgcgcgggatccgggacgcgccggtggcgtccgctggcagcagaggttagaggcagagagcgcgcggatgctccgcgggcgaggctggttcgagagtgggaggagtgcagggcgccgccagggcggcagtgcgcgcgggccgaacagtcctgagggcgggcatccctcgcgcagcgcgccgacccccgggacgtgtgcgtctgtggggggttgctgtcccccgggtccctcgggcgacccctctccacgctgggctcagggcaggacccgggattccgtgggacc

SEQ ID NO: 37186 - DNA, 583 bp, Homo sapiens
tgacatgaatttaacatgaactcccatcacggtatgtccatttgaggctttcagagaggtccctactgaaaaaactagccctcttctaagaatttctgcttgacactaggtccagatcaatttttttccttgatgtttgctgaaagcaatggcaacaattcctgtcacctgtttcttgaacaagggaagtactttggcacagagcagggccctgccacggtgagctccaggactatccatcgtgcactgtccacaatacccccttggcctggctgcccagcctgagggcccgatatttggcttttggatatggcccaggaagaactcaggtgacatgcagattgataatatttgactcctgggacgggactcaagctttagacctggaatggccaagctggaactctgccattccgatggcttcatagctacttactcaccagccagtctacagcattaggttgcttgctcctctgggaagccataaagagctggtgtgagcagttagcttattggcatcaccaccacagttttttggtgtttagagactttcagttcagggtaacagaacccaactcaaatt

SEQ ID NO: 37187 - DNA, 757 bp, Homo sapiens
gagtcaaggagtcccaagaagcttagctgggtgattctagttcagggtctctcatgaggttgcagtcatgtgaaggctagactgaggccagaggattcgcttcttccaagatggctcactcatgtggctcttggcaggaggcctcagttcctgctgtgtgagcctctccatagattgctccagtgtgcttatgacgtggcatatagagatccaagaaagacagcaaggcagaatctgcagtaccttttataacctcctcttagatgtcagcttcacttttgccatattctgttcattttgtatcagagaatttgtggacatatttttaaacctctgcaaagagataggctaattgatctgtgaggaaggtataaaggtcaaggaagcaaagaagaggccaacactttaagatctaaagagagttgggaagagcataccctgctccccaattactcaatcatgagccagcatttccagctgaccttagttggagccagtttgactttattacgaaactgatttaggtaactctttgaagtaggcaagtttgcttttgagacccaatgcttcctttcccttctgcagcagaattcccctaatttttctcagagcccctgatataatgaggcttatctggtcagagcatgctctcaaaaaatgtatgagcatgacatgtagcagtaattttcaccttcttacaaatcattgcctctccagtggacatttgaaatttaaacatgtgatagttgaacagatg

SEQ ID NO: 37188 - DNA, 676 bp, Homo sapiens
tagaaaagcagcttttctcaggctggtgccttgccccttgtttttcttctgtcctagcatctggtgaaggattgtcaatgtcaccagaatcagaagcaccgtttgtcatgaggctgcagcatgctggaaaggaggccccaccgtgtgcatctgccacttgctttcaaagcaggcaaattgtttccctaatcttccgtcttataaatagattttttgagaccgactgctgtttatagaccacctgtcctcccttaccccagccttcctgcctgctgaatcagcactaagtctgaacacgactttccactcctacttacattgagctcagctgtttgcccaaccctgatcaggggtcaaaatagttggcagccaaggcccagcaatacaatttgttgccgaggcgtgttgtcagtgtacctccctgctcgttcttctctgcattaatgatgtcctttctgtcttgcgatataaaatcattttgaagttaatagccttgaaccccaatattcactttttaaagtaatattttcctctacaatattaaataggaaaaaagttttgtggggatttaatgaatgaagatttataaattgctagagacctggaggagcagcagatggaggcatgaggactccaactgaccatcttcggagaaaaagggaagcttttctgatga

SEQ ID NO: 37189 - DNA, 2533 bp, Homo sapiens
tttttaaaatagcacagtcttgggacaaaaaattacaagaatgaactatttcaaatgtttctttgaccattttcccacttttaaaatactaagttcctggaagtaaattcctatataaaatgcttcgatgttaaccccacatttttcttaacagatacgggaaaataccttgccgtggcatcccatgataactttgtggatatttacaacgtacttacaagcaaaagggttggcatctgtaaaggtgcttctagttatattacacacattgactgggactctagaggtaaagtatgttgtggcttttaaaatagaatttctgtgtttaaaaaatgtccatttatgcattgtttctagagagaatggcagttgagtgttagaaatgggaaaggggaatcccacaacaatataaacgactgtaattttacaacccagaggcagctgctgctaacattttgaatactttttccatctttttacgcttaggatgattattgtcactattgattcaagccattgagttttaagacagttaaagatacatgatgccttttgttatcatagcaagccaccacctcacctttagttgggagtgctttctccttgtcttgggtcccctcatcctcctcctggctggtttcccttttccacccaaagctccacctcttggagaaccgcccaaaaaggctcaagcaaatttcctcctccagcagaggtagaaatctacattcagcctgcctaaaatttctctgctctataaaactcccaacctactcctacctcctccaagtcatgcccacaaatgccatgaggatttgtctatttaataactctagcttttatggtgttgcatagtcttaagctagcaaatgtggaggctctggaagtgagtaagacatggtttctgctccctgtggagtttataattgagtgagggagatacttatccataaataatacaagagcacaaaatgggtaccgtgtgagtaagcagtggtgagtcacaagggaagtggtgagcagggactccgaatgggccacggcagcattcagtacccagggtggaacattgcactatagggtgagtcactcgtaaatcctatcctcaagactcggctgatgttgagagtctggagcgggtacttgggaatggacagcattcccaccttcagagacgttgtagtccactgtggtagagaagcaccaagcccaatgtatgctctgagggaaagctccttggaggtaatccatggagcctctgtagaagggagtgacctttgaggttgatcttgagagataaggagaaatccaccagatagcgctatcaaggaagagccattccaggcaaaaggaatatggcatatgaagagtgaaggtgggaagaaccagggggtgatgaagaaatagaagtgctcagtggctgagggtgtgaagggaggggaatgtggagacacaggctgggatagagcagaactttcatgctgaactgtgtacttgtaggcactatgtaactctgagggatctagcgtggggcattccctcccatcttggggagaagaagtgagcctggagttggagcaatcaaattaatcaggagaacgatgatgaaggcctctgccaaaaaggttatttcagagtatttcttggagtagtggccatagaccaggacttggaaacccttctgcctggcaggtatttagttgtaactatacttgccacactggaatttggactttatttcagctttacaacattcaggagttttatacggtgcagtagatagagaaaaaagcatgtgatgcattgcatttataaaaggtacaagtcccaacaagggcaaagggagatcagataagtctgtttcgctttcatgtcagggcagtgctggccagacaaagtgccgagggctttgaccggcatttatgaccaggcagggcactgtgactttatctaggaactggtgaggccgatgaaagcagctgcttctcagacccttctttgatattctctgcttttttttttaaagcagtgatttctccctatttattatcttgctattctcttgccaggtagaatagggtctgattaactttatttagaatccgacacacacacacacacacacacacacacacacacacacacacacacacacacacacaaaatacctgatacaatacgtgaaatcccaccactcaatgactattagggattaaaacccattattgtttctattacggagtgaagagtccagagaaaagagggtatatatagagtaaattttgactgggaagatttcttaattattttgaattgtgaagtacacataacaaaaatgtaccattttaatcattttttaagtgtacagttcaaggacgttaaaaacattgacactgttgtgcaaccatcactgcccccatctcagaattcttttcatcttgtaatactgatgacattcccattaaatgataacttttcatttccccaacacctggcatctaccattttactttctgtctctatgaatgtaacc

SEQ ID NO: 37190 - DNA, 957 bp, Homo sapiens
ctggaaaccagcttaaattttaaagtaataataacagatgagtttattggaaagatacggagatattttatagaatccaagagcaggaaagaacacctgccaaggaactgagtttagcaatgaactagaaaacgcacaggaaccaagcaagcagttcctctcccctcctctcccactcttaggcagctagtttcagcatccactgctcttctgggtcttatctctgcctttgacccctctctctgcacaagcagcctttctctacttcatctgcacatggcccagcctcggctgccccaaaatgccacccacaggcccaaagtccacatctcatccctgtaggcaccaactgattcagcctctcagattccagtttaccaagagagaactttgattacccagcccagtgtgagcctggcccctccaggatcaacatctgcccgcagagtataaacatgaccgcgggggcagttctcggggaaggggcatgtgctagataggggaccctacaagctgtctacaatgctacacagcacttacggtacttgtctatgtgtttagattctcgaatatttttgcaatcataaattacttcactgagagatttttctcatttttggttttaagtgaagtatgatctttgaaactatggtgtaaagtgagttgttgggatttatctgaggattacagtcctctgaattatcttagtatctcatggccaaatatcatctaaaattagccatattcaaagaatgtgttcactgaataaccgtccacgtgctttgtcatttgcaatcactcttgagtgtcctaaaaatagaattactttacagatgtatttagttcatcggaaaagtattggttactcattttcttataattctaaatagtcaaagataactaactcccttttttcttttctcacttacatatattcagccataaagtcagaagatg

SEQ ID NO: 37191 - DNA, 4137 bp, Homo sapiens
gtattttgattctgtaacctaaaacatatccttctgaaaaacagtatttctaaccaatatatatgaaaatgtctgtctcaaaacatttctctgtgtctcatggtaaatctgccacgagttcaattagccaattcctggcaaggaatccacaggttttcccttctttaggaatgtcaaccattttgccttttatttttttctgtaagattcaattatgatgcactaagaggctgggccaagtccacactaacagcaattcctccgaccctgcagctgaaaccccggcagaactacgccccctcgaacacaatgcctagatcccctttccctggctcggtttagctggtggggagcagtccacatcacaccccggggagctgggcggtggcaggactttaccagaactctctccttcccatttctccacgcaccacaccactggaggcgctctcccttcactgcggttgggtcaatgtggacgttttccactcggccagctccccacgagcacaggaggagggggaggggaagcgcaaaggggccacccacgccagccaggaggtgaggagggagcccggggcagaatgcaggccaacagacccgcagcaaaactgcaccttttccaaaggagcaacccagacgggtagacaaaagcacctcctaaaaatatctgggtgccaaggcctttccttcctcacctcgaagcccaaccaacccgataaatccacaaccctggctctcgggtatatacccggctcctactacgggtgggtgcctaacttccgagaatccgtacgctgggcatcacacagggtgaaagtgggagccgggagcggtgcacgtgttccccgaaaccaagacggacaataagaacaaacccgggctccaagggccgccccacccttctccccgcgcttccaaccagacggggcgccatcgccccgaagtccgcagacaaagcgccctcggggcggagaggagggaccagcccaaagcatctggggctgcacacaaaagagggaggggcgcgaggggcggcgcgaagcgagaggtcgcggcactcacccactgagcccgaggagcccctgcgcttgggcgcggccggggtggaggggggcgcggcgggagccggggctggcggggtccacacgggctctgcctgggggctcacgctggccgggggaggagggggaggccgggccggaggctcgtcgtcctcagggagcttggagggcgagactgcggcagcagacagcggggatggcgcgggcacggtcgacgacaccgggctcgggtcccaagacggctgccgctccggggcgacggggggagcggccggcaggggtccccggggcgccggcggcacgaagtcatttccgaagtccatcaggggcgcgccggcggcaggggcggtgggcactggggccgcggacagcccggcggcgggcttcctctccagcacctccagctcctccaggtcttcgtcctcgtcctcctcttcctcctcctcttcttcctcctcgtcctcgggctccctcacgaactggtacttgaacgcgggctgcggccggggtgggctgtccgaggacgagaccagaggagactggtccaggtcttccatggctggagggtggagatgatgctgcagctgctgccgccgccgccggggccgcgtctcagagccgcgggcggttgtgggggttggggaggactgagaggggctgggccgactgagccgagggacctactgtggtgacggctcccggaacaatgagactgctcctcctgcctccgcgccggtgatgcgccacccgccctgtccccacttgccgccgccgcccagatgagctaggagtgaggccagcggactctccgcccagtttggcgtgactcaccctccccaggggagggcagggactggcgcgggagggagagagccaatcggctacaggatcgagaagataggcgaccagccgggccaacagaaagggaaggagatgaaagtgggtggggactacggcacttcctctctcttaccggctgggattgcgttcaatgggcggggctgagagctgggagctccacccccactttgggtaaccgtgagttggggtggggtcttggccttgcccgcagctggcgtccgtatgtcgttagagcactgggaaagggggcgggctgctggctgggaggggtcggcgcggtttctggcgcgccaccggaagggcgttatcctgggggaactgagagtggaaactttcctcccgggaaaggaagaaacccgactggagaaaggtattagcgggactgggaagtgggccctaaggatttttaaagatttttgaaataaaagattatttgttcactcaaagttccaaactacatcactactactaccaccctaaaataagaaaaaaattgttttttgacagttaggctcactcagtctaaaccgcagcccccgaaattgggaggaaaacagctgtgctgaattaactagggatctggggccgaccatttgaaagtctgctcttcttccaaagagagtttggggccttgcctgctggactcttacatggtaagagagtgagtcacccaaagagagaggcagcggggagacaggaaagtggaaatacaaagatgccttggaaagctaatttggttcacgttacatttcagtcaccttaggttcatgagtcaacatttcggatgattcaggctttctgggagtcaggaagccccatagtcattggtttgatatgcaggaataagcatgatccccattccactttttatgaggctggagagtttaaagagagtagttgcagaacatctttgtaagaatcaggatccttttatctttctgatttacctttcaaaaatattcactgcatgcctactctggaggccctggagagaagaggataacctgctttcaagttgctcaaagtctaaatctgtgctgtacctgacaggtactggctacttgtggctactgattgaacactcggaatgtatgtagctaggctgaaattagatgtgctgtaagtgtaaaatgcgcactggatttcaagaattagtacctccgaaatgtaaaatatctcagctttcctgttgactgaatgttgaaattgatattttggatatattgggataagtataatattattaaattaattttacttgttccttttaaagcagcttctagagttttttaaatacataatggctcacattatatttcttttggacagtgctagtctagattaataattaagaaagtttgattgccatggggaatcactggcaaattcttagctccaactaatttatattactgtggcttaatttgggtattaaaaaagaaaagtaagagttggagggagggataaataggtggaacacagaagattttgggggcagtgaaactgttctgtattatcctgtaatggtggatacataacattatgcatttgacaaaacccacaggactatacaacagaaagagtgaaccctaatgtagactattgactttagttaatgatatatcaatatcagttcatcagttgtaacaaatgtaccacctcaatgcgttatgttaataataatagaggaaactgtggttagggggcaggagtgagagtgtatgggaactctgtacttcctgttcaacttttctgtaaacctaaaactgctctaagaaataaagtttatgaacctttaaaaaaggaaaagaataaagatttcctggcaatgttacttgattgggttaattatcaacaatatattcaagacctatcacattaattccacggagaactggctttatttgtgcaaaacgtttgtgacttgctttgagtttggtgttattttttggaggggttgggaagagtaggaagagagatgtattgatgtagaattttggggcgggaagttaatgccaaatgaatttaaacaaaacaaatttctacaatggtgactacaagagacatatttgaagtctttgtcaaatatttatcaaaaattataaaaaatttgcctgattttcaaccaattgcataaacatacaaaaatatactaacagtattttatgatacgaccttttctattgtcacagtttagctatcagcagtcttc

SEQ ID NO: 37192 - DNA, 1664 bp, Homo sapiens
gtctcaaaaaactaaaactaaaaataaaaaaatttgtgggtacatagtaagtatatttatatatggggttcataagatgtgttgatacaggcatgcaatgtgaaataagcacatcatggagaatgcggtgttgtcttttgcttgtttactttttatttttcagtttatttgttccctctccctgccttttttttacttgcaaaagcaataaatacttgtaaaaattgtcagaaaggtataaatctacttcccaataatacgggaggactgtgtcatgtgtatttcttgtaacctcctccttatgcaggatactgcccacaccggtatgtgttcagttcaattccgttagaactactgttcctcacaaggctgtaaggtacccttgaggtgtctagtccaattcctccattctatggagggagaaactgaggccctgagaagaagggaaacttagttagggaccctgagctggttaagtgacagaaccataaatagctctcaccgtccttaacatagcccctgccagataacccctaaggagacccagcagccacacggctgataaagccactgcttgtcaagatgtcacagggtgaaccccaaaattggggttcagcccaggaagtcatgtgggttcttggctccaaacaggaagagcgagccaagagagcaaagtgaaagcaagtttattaagtaaaggaatgaaagggtggagagtccacaggcaaagcaaccccaaaggctgctggttggctattttgatggtgatttcttaatcacatgctaaacaaagagtggattttcatgagctttctgggaaaggggtggggaatttccacaactgagggttcctctccctttcagaccatatatggtaacttccagacggttgccatggcttttgtaaactgtcatgtcgctagtgggcatttcctttagtatgctaatttattataattagtgtataacgagcagagaggacaaccagagattgcttttgtggtcacgtgggttttgattgattttcacttgcctctttaccgcatcctgttttatctgtggggtctttatgatttgtatcttgtgaactcctatctcactaccatcagcattcccctcttccccccactcctcctgacctcttgacagaagctgaggaaatgggaaagcagatcctagacttggagaaggtctgtgtggggtccaaggccactcagtaataagactcccccaggtccaaagtccagagacagcccccagactcactccatctctcagaggctgatgcccacccagcaggcattcaccttagctcagagcagcaccaatttcctgcatgcagtcaataaagtgcagtttgcttcctgacataaacagctgttctcagaaagcaaatatgcaaagagaatattattcttcaagtttaaatgaggaagaagaaagggtgggtgaagcgggaggtgggagcttacacagagttctaggtttataatctaattctccagagccagcctctgacctgcagccccctgagtgcccaagctttttgggcccaccgaaaagggctcttgaggcaactcaaaaccgcttcagaagtaaatgcgaggagttacttactcagggtttgcccagtcctgaggaggaaacaattctgatcggggctt

SEQ ID NO: 37193 - DNA, 2111 bp, Homo sapiens
tttggggatggggtcgcagagggcagaggatgaagaaataaatacagaagacattagaaaggactctggtttgtggagtggagaaaggacagggagaacttgcttctaattggcctccttgccggaagaagcaccccatacatactccaaaaacttcctctcagatccaagactcccaatgcccaaatttggaaattctacaactaaataaccattctgcaggtttcttttccgtacggcttcactttaaaatttgaaaactcctgagatttttcaacatattaaagcgtgtcacactaaggagtgacacacaagacccagactcttccctaggctgggagagactcggcggttgaaagcagggaggcgctacaggagagaaagggctgaacccccgcttccgcagatttcacctatttttcagtttgcctggagcaggccacgcaaattcccttcccttgaaggcccaaggagcgtctggtagattgctgattctctgcccatcaccgcttctggaagtgagtgaaggacacctttcgtgccccgcaccctttgccccccgcttaacatttgctctagtcacttccggcccgttcccacgctccggaaaccattattccgcttcatcctacctccagtcctcacctgagtccttttctccaaacaccgacttcagtgcttagagatagtaactagggaatctgggaggtggaactgcatcttgggacaagtagtccaaggtagaagaaagcagtggagaactacagttcccagaatgcacttccatttcctacctcttccccaagaggcccccctcgacctccttttaaaaattctcttagccacgttgattgtacgggaaaagcctttttaaaacatcttttacgttgcttaaacctacagtttcgaaagcattccgaaggctaaagtgagaaataagcccaggctagggagaggagaaacgaagttcacgtcctagtctggcaccgggttggattgtcgctgggacggcagtcaggcatttggtgtggtcgcctaaggggtgggtccttcggcgggagctccgggaaaccccgtgggcctgcgcggcgttcttccttttcgatccgccatctgcggtgggtgtctgcacttcggctgctctcgggttagcaccctatggtgccttctcttgtgatccctgacctaacctgtctcttccttttcctcaacctcaggtggagccgccaccaaaatgcagattttcgtgaaaacccttacggggaagaccatcaccctcgaggtacgggccgggtggtcatgaggaagccaaggtccgaataaggtcctgaggtggattttaggaccggcgctgctttccatgtcttagaccatgattccgaatttgggttctaaaacttaagctttgaaatgagtaccttttgctgagcaacgacctagaggtgattttcggtggccaaaggctggacctgtctcctctcgaggggttccagctagttagttaaaacggaggagctgcggtggggaaggagacgctctgcccgccgggtgcgagcacgtgtggccctgcggccgccgcccgctctgggctggggagatgaaggtgctttccggtagccgacttgggaggttgcccactgggtgggtaataggtctctcgagtaggtctcagccctgtcgctggttcggttcagtggtaattgtcaaactaaatgagttctgctgtagttccttaatgtgtaaccaacatgctttcactttaacactcataggttgaaccctcggatacgatagaaaatgtaaaggccaagatccaggataaggaaggcaagtagtattttgtagttaagaaaacttaacctgcggagacttcggcctacctgtaggtgctagacatacctgctcttggtgatgggggaaggggtcagattgacaaagcgaaatacttgtggaataacacaatagacattggtgatcggggagcacagtacctagattggaatccttgaggtgtatttcacttgcgtgaatttggacacttatttatttattttgtgtgagatggagtctcctctgtcgcccaggctggagtgcattcgcttgtcccggct

SEQ ID NO: 37194 - DNA, 1857 bp, Homo sapiens
gaaaaaaaaaagaagatttggaaattcattcaatagtatttacacacattaaatacttctaagaatggcacatggaaaatatcttatttacgtttgtgcccctggaccaagaagtagagtgctcaggtaacacaggattccttgagaaaataatttttaaatcagtatgaaaccagatttgagaagagcacagattaatggagtgggaggaaggaccctacgagatattaaccaaagcacagatatgtaattgaggcaggaactggaaagacacattggaggcaataacccaaatgtcaaaactggaaggaaacttgtcacttactccaagctcctcattttacagaaaaggaaacggaaatccagaagggtcaaaaaagcttctccaatgtcataccgctagttaatggcagtcaagactagaacccagacgttctgactcccagtacggtgttgtttcgccgctaggatatccttgtcaaggaatctgaaaaaagtatgttgcaaatacgtagttgcgttagggaaaacgtctgaatgtgagctggaagctttggaacttaccagaaaggtaaaaataaatcactgcagaaaaattacggatctggggtggctcgcctcaaattggagcccagaaggccttgggcccatgggaggctgggaagtgaggacctgcacccacagccgcgcgcgaggaggggaagccggccagccgcttccgagagaacagtgcacatgccttcgtgaatgcctaacgtgggctcacgcagggattaaatgcatcttggaaaggcttccgaacgcacaatgtttatgaagttcgcgtgatttgtgccactgacacgttaggcgaaacaacacacaccacctgcaccggacaaccctggttaagggatcctacccacttaactcctacctacagccccgggcccctggattctgagcacgggcggagatcaccttctggacccggaagaatggtcggtaggtcagtccgtccccgctacggtccccgccgggcttccggtcccgctggaaaaggttctttccggaattcagagagttgctgtcgccgctgggggtgggactgtctgcggtgtccgcggcgggcgtccagcctgggaggcgctggttcaacctgtggctcctcccagggtcagccgcgcgtggtgaatcgtttctgcaggtcccttccatttcttactttcctttcctttctttctctctttcctttttttctttctgtccctctcctttctttccttccttcctttcttcatttcttccttcctttcctcttccttcctttccgtttttctttctcttttttttttttttaagaaaactgcctttattcaattagaagttggaaaaattaactggtacagaaaaaaagtgtaatcagctggagaaaaagtgccacccatgagaactgatggctcctctgggagggaatctggatacagtgaggatttctaggaagcaaattacttcttctctggggctatgagaggcctcggtggtgcttaacactgtaggaaacgttaaatggagaattgtgggagaaatgatacctccttcaaagatacgtgttcctaacaagaaggaaaaaacaaatgcaagcgaacagtggcggtagaaccagttagtattgtgcgaacagtactttctgttttctcctaagtcagctcgtgtgtatggcattaggagtaatagagccagagtgcctggtttcctatcccagctcattcctagtgtgtggttgggaatgttttgtcaactgtccatgtcccagtttgttcatctacattatagtaatgacagtagctagttcacaggattgtaataaggtttttg

SEQ ID NO: 37195 - DNA, 1704 bp, Homo sapiens
aaaaggtaaaatgtaaaattataatttacaacaaaagaagttgaaaagccttagaacagtatggatctgggccccttccacactccctaatctgggagttactatgtgggtttgattgactattgattatttatttatttttagagacacggtctcattatgttgcccaggctggtctcaaactgtggactctgagcgatcctcctgcctcagcctcccaaactgttgggattacagacgtgagccaccgggcaccgcctgcctatctgcggtttaaacaataaaagcggcgggaagcggtggttcagtcctgtaaccccaacactttgggaggctggaggatcgcttgaatccaggagttcgagaccagcctgggcaacaaggcgagaccctgtctctacaaaaagtacaaaaattagacggctgtggttgctggtgccagtaatcccagctactcgggaggctgaggcgggggaatcactagatcccaggaggcggaggttgcattgggccgcgatcgcgccactgcactccagcctgggtgacagagcaaggctgcgtctcgaaaaacaaaaaactcccaaaccgtcaacagaagatatggtgatctgggaaacttgaagtgggatcagggagggctgtgagatcgcaggcgccgccccgcagcgaggcgcctgttgagagctcccgcaggccttcgcaagccggagccctcagcggacgatgttcagggactagcgggcgaggcgctcagacagggcggacccgccttcaccaggcaccagcactacgctgccggcgtcggccgagatccctctgggcagttccgcctcaggcttcggtctgcgcagccgcgggaagccgtgccgtttttccgcccatcgccacgatagcggctccacggcgggcgcggagttgggagcggcgctcgagcagcggctcggtgccctggccatccacactgaggtcgtggagcaccccgaggtgaggcccctagaagcgaccgccgagacaggcccagcggggtgggctgtgctgcacgtccgtcgggcgaggccgctgagatcaggtgtcccagggtcaatgtaccgtgagaacgtcgctcctggaatatttccccggtctcaaaatacgaaagtgaccctgcagggacagcagaggacttccatcttgggaccatgaggttactgcacggaaatctttactcttgggagtgatctgcttacattccgtgttgagaaccagcacaacatacggaggactgtgcatcttaaatcggtctgggatgctgggtcagtttgtccactttttgtgtagataaaataagcaagtggttaatagtgtgttcagtaggtacgacgtatcaggcaccatacatagagcaggacactgaggttcacagtgatatttttctactgtggtcagggttgatcacaaagtatgcagcatggcagaaaccaccaccacccgtaaagtgcttaccaaaattgacatgcctgtattttcataaattgtaacatttgttgtgttttgatagaaagtcttacttgcatttattttatttatttatttatttgagacagagtctctgtggcccaggctggagtgcagtggtgcgatctcggctcaatgcaacctctgcctcctgggttcaagcgattctcctgccttagcctcccgaatatctgggactacgaatatctg

SEQ ID NO: 37196 - DNA, 2105 bp, Homo sapiens
ttcacaattttaacaggtaaaatatctaggttgtgataatgggctgagcccataacattagcattcctttcaagatccaattcttaaaccacctgaatatttctggccaatgaaccaaattaggggcttaaaacatcgtgtctcaaagttcaccatatgctatttctcaaagaaaacgttacctaggaaagaaggaagaacttacatttggagcatgacctggttcaagaataccccatccaccaaagccacatattcatcaaggttggtcccatttcctgcggccagaggtccaaacgttttaacctagaacaaacagaaggatcaccacgacatgaacgcccacctccatctctgcagccacaaataactcagcaaaatatacaataaaggacaccccacttacccaagtgaccaaagggctggtcatgaactgctccagaaggggagtaaaaatttcgttctccattttacagagtatgtatttgaaaaaaggaactaccacaaaaatacgcctagggaattggtcactaaacgtggaagtaagtagaaatcaatgaaagtccatttcggcaagggagaaaaatcccatcgtggaggaggggggcactctccctcctcaaaaaacaccccagagtgaaacgagccgaaatcccaagaagtggcttcgacgacggacaccacgagcagcagcctgcgctggaaatgtctgtaccgggcgaggaggggcagagaaaaggcatctggaggaggaggaagggaaagggggctggaacccaagacaaaaagcccgtcaaggttgtccagctcctggaggatccagaccagcgaaactgctcccaatgaatcaatcccaacgggggctaaatgaaatacgttaaacagagaccacgttaaggataccgaggcgccaccagactcgacctcggcgttccgacctctacacgttccacccaccgatgggcatggagccgctttcgacccgcggagcctccactgcccgcagcccctcagtaccaacaggcagggctcgccccttccccccgagcagacaccattcctccgccgccctcaagcctcgcctccagcccccttcccctcccgggggtgggggcttgaatgtgtgtccctaaccccccagcttcctaagccctgccagcctttcagcgcgtctctgggaatccctggcacaaaatcaccgccgcgctccagccttctccgccctctatggagaagccggagtaacggcctcagaaccgcagtgccgcatcacaccccacccctcgccgcccgccagcgccgcccgccaatgccgggggccgccgtcaaagggagcgcgctgctccctccgcgccgatatccttccgccgactccccgcccctcccgtgcagctgcctctggattgtgggagaagaaaaccgctgcatgagcgcgctcccgagcgagcgcgcccccgggctagcctcgccgccgcccagatcctggcggcgggcgcgggctcgggcgtgggcgcgcgctcgctgcagctgctgcggagacaacccgctcctcggttgcgcccaggacggttgcctggtgggcggggacagggaaggcagagcaaggggtctgtctgctcgctcgctcatgcctaattatggtttatttcctccccgagtgacttctttgatacgtgaaggaaggggaaagaaatccttctcttataaacatgagggatgcagacagcctttttcggacagtttgatgtgttctgtaaagcatgccttctccccagcaaaatggaataggaaaactcactgcagcaaatggcagagggacttgagccacaacttggtgggggtttttttctcctttttgttttcttccaaatgcagtccactaacgcatgaatgttcttcaaagttgcaagtgacatacagtaagattttttaaaaaccagagctgtctgtcagcacgttggtattccctgactggagcaaacatgactcagacattgttttttggttttgttttgttttttactatttgggcatgggtcgggggaaacccaagcaaaatcaagagctacaaagaagaaacatttagaagtcatccaagttgggtg

SEQ ID NO: 37197 - DNA, 1479 bp, Homo sapiens
tgaaaatggttgggactgaggtgctggggatacaatgatgaactgcagccgctgaagccctgtcaggtggagacccggttacctcagaccctcactgagccttttcttttttcttttctttcttcctgtttttcttttgagacgcagtctcccaggctgcagtgcagtggctcactgcaacctcggcttcccgggttcaagcgattctcctgcctcagcctcccgagtacctgggattacaggcggcgccaccacgccaggctaatttttgtatttttggtagagacgaggtttcaccatgttggccaagctggtctcgacctcctgacctcaggtgatccgcaagcctcggcctcccaaagtgctggaattacaggcgtgagccaccgcgcccgtctactgcgcgttttctaaaccttggctcctacgcatttatcagaagagagagcgcaatctgtctatgacttccagccaatagctacacttcttttctcagccctcgtccactgttcttttttaaccaatcagaaacgtttttcaaacgtttgccctccccgctaagtgcgcaggctcctggaaagttgtcttcacttccgggccgcggtctagggcggctacgtgtgttgccatagcgaccattttgcattaactggttggtagcttctatcctgggggctgagcgactgcgggccagctcttcccctactccctctcggctccttgtggcccaaaggcctaaccggggtccggcggtctggcctagggatcttccccgttgcccctttggggcgggatggctgcggaagaagaagacgaggtggagtgggtagtggagagcatcgcggggttcctgcgaggcccagactggtccatccccatcttggactttgtggaacagaaatgtgaaggtaaaaaccagagcccgaaccgacaatccttttctcctctctcacaccagcggcgggcagggggttggtaaccacaagccatctctcgtctccccgaccccctgtctccacccctgtcgcaaggtctcgttcccctcaccaccttctccacccgcgtcatcaggtttagagctggttgtgtgggaggaattcctttcaccctgccaatgtgttccttcgcagacctgaaaacggggaccgagactccccttctctggggccgaagcgcacgtccgaagaacattagacttgaatcgtaaattcggtctctcaccctgtcccgaacgtttctgccctcggcaggtggactgtttggctgggcttcttcaacagctttgccagacttgagaggagaagcgtcggtttacctgagttccttatgatccctagcatttcgcccggtgtagtcagcttaggaaatgagaaatgatttcactccaaaccaacagttaactgcaaaggagggcatgtgataactccaggaagcccagagccggtgattttggtggcctgtgttccccttggtgagctc

SEQ ID NO: 37198 - DNA, 590 bp, Homo sapiens
agaagcaaaataacaggtttctctactgtgaatctgtgacgtgtttattttagtatccacaaatggcttctcattctgattttatatttttcctcatagaaaatatacgttttacagttacacaactaaagaagtattttgtgtctttatgacatttatatcataaaaacaaatgttttaattcattagtagctaatgtctagccagccttcaactatagcaattaacactgttagtgaaactggctaaaccaaagggcaattggtgataaagaatctgtcaccacttaggaatgtgggcatggtttgttaagaaggttgagagcaaattaaagtggtgcttaacttctgtcaactcctgtcttgcttaatttcaaaattctgtgtctacagtgatagagcaactgtttcccaagaacactgtttttatccctatctctaaaaaggatgtataacagatgtattctgtaatctgctgttactgtcaagaagagtgaaaaaggtgttggtgcttgcatttaattttgctcattcataagtaaattatctgaaaggataataaaaactcagagaaatataacagaaaatata

SEQ ID NO: 37199 - DNA, 1148 bp, Homo sapiens
ctgaggtgggagcctgagcgcaggaagttaaagctgcagtaagccatgatcacgccactgcactccagcctcggcaacaaagcaagactgtgtctcaaaaaaaaaaaaaacaaaaaaaacaaaaaaactctttccatttattttactgtatgtaacttcaaagcccggatggaaaagaaaaaaaaagcaaagcacaaaacagtatacagtatgctaccagttataccaataaaagggaaaaaatacatacaattgtatgcatatttgcttacatatgcatacctccagcaagatatataagaaactggtgatgtcagtggcctctagcaagggaaactgtacggacagaatctggcgtgggaaagagacttcaataaataccttttgaatttttaactgggctaatatattacacactaaaaaaaattttttttaataagcctcaaaccaaaagattaatgtaaacctgcttaacttcccactttctggaaagaaccatcaccttcctggccagactcaaaaacactatcagtgacctttgattccttctctttaatatttaatcatttactaaattttccagcactttctggaaaatatactggagctctgttccttcaagtccatttaccgtggtggaatagactttcattttttgtatctgaattattgcaaaaggtcttgctactcaaagatcttctgctccaccctatccctcctccccaatttattattcatgacattgccacactcatttctttaaacacagtatcactttaggcccctactcaagaacctgtaatgtccccttctgaacctgtgtattatcatatttgggattggtggtaggagggggagaaaccactgctacaaataggcttaataccttttgtagcaagtgtatttcctttcctatcacagttccttccactaccaccaccaagaatgaagtttttcttaatgattccagcttatattaacctcttccttaattttctactgctctaagtctgtggaaaatgcaagtttactttttatattttgtgttggcacatacctgctgtataatctcagtcaagaatcttaccctttctgtacctttgttgcctcatgtgtgaaatgctttcacgggctttcagtgaagactg

SEQ ID NO: 37200 - DNA, 3244 bp, Homo sapiens
atttaaaccccgccccccgcccccgcaaacttttcaagtctttttaccgagttggacatcttaataaaatgtattcgaattcacattttctctccaaatctaggcttcacatttaatctaaaatatttcaccctattcccatacacccttaaaggaaaaattaatctaaaaccaacaatcaaaccaaggaatgaggagactagatgactattaaaattttattgaaataaaaattttaaggtctaaatgaccacttcaagccattcgttttaacaaaagttgttttattgcattcccagtttaacaaataatgcaaattacaaaacaaaaacatcatgacagggattaaatacttagtatagaaattacagtgctgcatttatcctttcctcattaagaacaaaagaacaccttctgtagaagtgatgactatttaaaataaaagggaacaagcaagaatacaaaatatgtcaagactaaacctaagattatttttctaactgcctatatcagttgttcaaatcaagtccagattatactataaaaggcattttaattacggctctacattttgtaatttaaaatacttcacatgactacaataaaccaaagaacacagcagtttacaacctgctttggtgtcccaacttgcttagattgtaaggcattcactttctcatagcgccttctacaaaggcagcccgaagaaatgcagactacagatgtatgtgcttgtgtgtccatgtatcgtggcaacagtcagcaatacagccaggaaaacgtgcctttcggttttccccagcacctgtcgactgtggcacctggggcccgttggtacaattttttttttttaaaaacactcggaaagaaaagtttccctaaaccgtttgtactagacgtataatggataagtaaataaagggggaggaaggtgtcagctcctagggcgacatcagtacctagtctctcactacttcctcccttctctctcacactctcccctcttcaaaagaggagggactggaaaggaaggagtccaatccttaagagagatgggagaaggacagagagtctcggtctccgaggataagtccagtcaaaagtacagtactttgtttttgccgtacacaagagccagttcagaaccaacgcgctgtcccgaaggagtagcaacggtaacgggcccagggccctaaacccaagctgtgccccaaccagaggcactatcccctattctacagttccgataaccttaccgtcggactctgcccgaaccagcagcgacatccccttgagctcctccacgtaagtggaggagacgtgcccggtgcctcggtcgtcccattgccggtcttcgttcagggtatagaccttcactcgccgccgcgtatccgacatggtggctgctgtctccaccgctctagccgccgcctcctcgcttacctcgtccgcgctcctcactcttaggagacggtaaaggcagtagtggcggtggcggcggcggcggcttcggagaggcccgaattcaccatggctccaaaggttcagccgcgagaaggggtgacaagagccactgaggcctctccgcccggagccccgttacctctcacttcacccgcgcatacacccactctcccgtctctttgccccccagggctcgcttgctctcccgccgccgcggtaactactacagatccgccatcttgtaacccgactctctctgcctttctcttcctcctccagcaggctcgcacgggctgtcctagcaggggctacggcggccgacaagtcccatgagcagcacctccgcttctgcacgcgcttcccaggccggaatgctcggcgctctcgcgaggaggggtaccgactggggcgggagtacttcggcgagacttcctcctctttcggcccgacttcctcctctttcggccccgcctcttggcgcggggtcgcaattgggcgggaggttctcgcgatctccccgtccacgcctgcgccgcgagaggccgctaggtggaaggggacttcggttccgcacgtcgtcatgttgttggatggcaccagtatgtgacgttcctaggaacttagctctgaggaaaaaacaaagcaaaccggggaagtacgtagccttgaaccggagtaaccagggacagaaaggaaggaaaagggtttcataccttcacggaacgacgctcacttcgtccgcctgaggaggaaaaataagtttaaacctttctgtgaaaaagaacgtggagccctttctgccgaatggaaacccgctaaaccccgttatggagtctgctacaattaagcatctaaccaggaattgtctatggacacaactctccaggcaattcatgcagaaagtgtgttgacgatttcctgtttcttgcagagcgcttcaccgttaaggctcttagtagctggcgattgtaaagcacattttccgcttcatgaaaatacagtgctcttcttgtgtttgtaaccttggaaagtaagtctgctatgataagtttagggaagtggcggggagctactttcctaacatatctgtgattgttttgatacttctcagtttctcgcgggcatttcctgcgttctctatagggctctcttgcactgaataaggaaaggaggaattctctctgcattgaggctattatcgcacattgtgcggtggatatagtcacgcgctgggtcgtagtagcgtgtcgtttatttcagtccagctcactcttggtagaatccctttattcgttttgttgtttttgatagtctctctctgcttcccaggctagagtgcaatggcgctatctcgactcactgtagcctccgccttgagggctcaagcgatcctctcacctcagcctcccgagtagctgggaccgtagacgcctgctccccatccccgctatattcgttctttaatacagtctctcagcttgttcagctgccacttctgtgcagctcattagcctgatcggtgaaaactaggcgagacgcgcacactgaccctgcagtgcatcttgggagttgtagtcataactaatcaatggtcttgttaaaacgtgcttatgttttgaccagatcgcttaagtgtggacacccttcagcagtacactacaacgtgggtcagtgtacagaacacatgctgatagaaataatttcaaaatctggattcatagtttttttttttaatctagagacctcagaaaatgtacttgaagaaaatcatcataatata

SEQ ID NO: 37201 - DNA, 1162 bp, Homo sapiens
tgtctgtgaactggacctggtgttcaacttctacaaggtaggctcctggtgaagaggaggctgaaggagcccgaggagtgggacgtgggggacccgtggtgcactagccacccggagcctctgctgaggtctgtgtcccagctcgaggggcatcagagccccagcttccagggtccgggccagcatcccggggggcctcgtctcacccacgtcaactcgttattcctaggtggaatgtttcccacttaagagcccagtggtcccggaaagtaaagagatcggaagtcaggtggacggacagagtcggatggagcaaagaagcccggcacacaccaacagagagaacgacatagcgcgggaaggagggtccgaggagacacattccaaacccggaaagggaaatttggaatttaggtttagggtaaggagagattaaatagagctgggataccgggtttctaccctgggagatgaatacgctcaagctggctggacaagacaccttatgacaatacagtgaacgcacgtcactccttacctgttgcctaagtccacggccacagctcgagaccctgcgctactccatagtgctcgcacttgcaactgggtgagtgcccgatcccgccgtggcagaaggaaaggaccatcgctcaggggccggagccggaggcacgagcagcagtacctgcaggccgccatgacacccggcacgcggtcaacgcaggctgtgccctgattggctcactccgcagaccgtggggcggagcctgatggagtttcgtttccgcggtgcccgagggacgccggggtaacggaaaccttggccaccttctacgaagactagagagggtcaaacctatcagaacgcgattatgttgcaaacgatctttgtctttatgtgccaacgaaaggcaattagataaataaggtttttgtgtgtgtactatcgtaatttaaaggagaagtcctagaataatgtaaatgtttaatatgcagagtaaatttatatttacttttaatactagaagtcatagaacaacacattattattatttggatctgtgaactaagaattagaatttgggtggtgggccttggaaagagatctccttctccccttctccgccctggtttttattttaaaaatttcacatagcagata

SEQ ID NO: 37202 - DNA, 813 bp, Homo sapiens
gtgaaaagaggcgaccacccagaatcctgcagtacttagtgttaatagatatttacaaacttactaacttgaaattcctttaggcatcatattccagattgaagctgctgggaattcctacccttattaatttttatctcctctactctgtcctccctacatttataaaaagctactgctcaaagggttatttgttagtggtgtcgagtgtctccaccattgaggactcgccgtatttaaagtactctactggtgttgagtaaatatttgccaatgttctaaatgccagggcctcttgacaactcaacaggaatgttgcttaggcaggaatgggggaagggcagaatatttcctatccctgcagctgtgcagcaaattttggaggactgggcttaatgcctccaaaaaaatgtaccgcattactaccaccttgattgttgttactgtgttggtgaccacatctccctcaggctgccttaaaatattgtctttcatgttgacactttggaggagatcaagaattctcttctgctttggatttcgataagtgtttgaaaaaggaatcatgaaaacgtaggtctgcaagggtatgacaaagcaagctgtcgacctcacaatgagggctcagcaagttgcttcatgttttctattcatagcctcctcctctctgtcagctcttttgaagtactcataaagcaaaataggctcattaaatatgagggggtaaatgaagttggcagttgcacctagttcaaaaagcctttcctttttagatgtttacgctccagaaaaaaacaaaacaaaacaaaaaac

SEQ ID NO: 37203 - DNA, 835 bp, Homo sapiens
aaagagagtaaaaatattgcaaattctgaaatagaaatacaaaactttataagcagctaaaaggcaaattctaacaatatcagcttatttccctctatgacttcatagcacaaaaagtttttcttatcatgacttttactgaatcattgctgacaatttggctaatcctggacctaactacactactgaatgaattggcttgtggttgacggccttcattttggactctgcagacccatccaggatgtagagttcatgtttgtcttctcagaaattgggtgactttgaagccaagttcatttgagctttgaatgccaagtcccctaacctgtgcaagcttccagaatgacagcttggcaggatctgactttcaggggaagaatgctttgcatttctgaatagtgatgtccctacagtttactcagaagggcagaggcagctgtcctgaggtagcctctttcagttttgagtgtaatggcatgatgtgaggcctctctcggtggggtttgagctttgtgtaaagctgagtgaaccgtgaggaggtcagggacatcaagtgtctgtggcatccccctcaggatgtctaatgccttttgaattatataacgaaatgtgcacatgcaatggaccctgaaggtcatgaatctagttaaatggccctcctcttgttcatgtggaaagtgaaacccaggcaactcaagaaatgtgcccaagtcacacagtagcaggaatagaaccagaaaccagatctcctgatttttattttaatgttttgacatgcacttggctattctgaaacttaaatgtgcacaccagtcacctgcagtttttgttg

SEQ ID NO: 37204 - DNA, 501 bp, Homo sapiens
attccctcatttttcaaaaatgtgcccacgtgctccctcctagtgatttatactattgtaggtccctctcttgctgactttggcaccgttagttgctttaaataacacaggctaatctttgctcagctcttctagcctctttatcacaccgacccccacgtctagggaaccgcacatttgattttctctcaaagttaatggagacaactttgtccacatctctgtggtgtccattaagtccctgcttaggccctcattctctatgtttttggctccttcccttcagtctgactcatatttcccaaacccctgactcatgctgctttctctctcttatgcaacattttaatctctgcaatgttctttccataatttgataacttaccacaacatggagtccctttagcatgttttcatgggcaaaaattatctgcaccttgaatggtgttgagtaccatttagacttttataatttgtgctgcttttggtttaagaaataat

SEQ ID NO: 37205 - DNA, 2375 bp, Homo sapiens
acactaacataatagtgtatagaggccaaaattcttctcaatgtttgggtccagatacttgtcttaggcacgatttttaaaatgcacttcctccctcaagattttatgccttaattcctatgtctgtgaatatgatatcacacccattcaaatacaatgttaccagaagaaaaggatttgggatatgtaattaatgttgctaattgtttgatggtaaaatagggagattatcctggattattgtttgggcataatctaatcacataaacccttataaagcagaatattttatttggctagcgtagaagaggaagtcagagatttgaagcacaaaggagattcgatgtaccatttctggctttgtaggtggagggggccatgtgcttagaaatgcaagtggccctgaggaatggaaaacattcctcagggtgtgacagcaagaaaggaactggagacctcaactttacaactccaaggaacagaattcggccaataatctaaatgagtctggaagtgggttattcccccaaagactctagataaaagcctagcttgtctaacaccttgattttaggcctgtgagatgctaaactgagaaccaaaccacactgtacttacacttctgacctgtagaaattatgagataataaatggtgttgtttcaaaccaccaagtttgtggcaatttgttatggtagtaatataagctcccatataatacctgcattgggactcatattcacaagggcatagatgacataacacagtgggtggggagggtgaactgtgactcagagtttgtgccaaagaactctttatagttgtggaaatggaggctcagagaggttaattgacatggagtaagtcacagagctgactagtgttgtagcagaggctgaaggccattgcccatcagataatgattcactgagtgttctcacatgctctagactgaaggcatattcagttagaggcaactcgaacaaatgagctgtgggtcagaggaaatgtggaagggagtgttatttagagtctggtgtcagtttccacgcgattacttcagctatgtcacttgggtcgccataaaaccatccactgatttactctgggctcctgggcctgcctcataaaggcatctttgtaattctcaccagagactatcctctggaatgacaaataacatcgatcattaaaaatgacatctgtaattttgcagcctgagaagatgatcttttaaagctgtcagtgaaacaaaagagattttaggagatgctgatgcaatctctttaaaatttttggaaattctaaagcataaagatgaactgtctattttgaaattgcaggatgaatcgtgtgctaaggcatgccccacgcatgcccactgtgtcagtgcaggtgaagtatgaggcaaccagagttcctgcagctcaatcattaacttgcggaacgacctaagagccaaaggagttaatgggcttcatccagagctggaggaatggagcgaaggcagagagacagggagaaaacacattgtctgttgtaggaagaaacggtgggaagcaaagccacaaagggaggtgagggagacacagaagttcaggagacgccagctccactttggggctggtgatcatttaagcaatgaaacaaattctgcgtcacaaactctcaattttactaaagataaagtccccttaataaataatatcgtctccctccccccttcattaaattttccccaacagcaaaattgctgaatcgtcagcatgtcaatctctacagctctgtgaaaaatagaggaagaaaagaacagaaatcagatgtccattttcctaaaaaaggagagggaagaagagaggaataagcctggatcttgtgtccttttctcaccagaggcaggaagccaattagcttaaataaacagaagctcagaataccaagactaatgaacagacttgctttctccaagtggaaagcaggaattctgcaaacagctgaaactgcagaagggatggagctgagggcatgaaggtcacctgtctggggtggggcaatgttgcatctgagggatatatctccacttaaagtctccatgtctgagtcaacataaagctgagctggagtgccaatgtagtctatggcctcaatatacctatttgcagcaattttgcttctccatgccaattccaaatatgctttttattacattggttatattttagagaaaactaactgcaacagttattgtacaagagtctgagaaactgatgacctacattgttagctgtacttagttccttgagagctttctctgttttataacctgatttgatgttttctttctgttttttttttttttttttttttttttgtctg

SEQ ID NO: 37206 - DNA, 961 bp, Homo sapiens
aactcctccaacttcaagggagaagatgaagtaggaggagaagaggtcttagggatgaggggaacttggaacgaggacattagagatgctgggagcacaggattgcagcatattaacaatctggctcacttgcagttttgtgccattgacaatttatccctcagatagtgaactgtatattgatttttaagtggagctctgttttaatagccataggagaaaagtctctgaagaaaataaatattaccatgccttttgtaggtgtcagagaagcttatctcagtgacttgtttagagtggaaataaaggtgctttcatttttatcagagtgaatttttataaacctagttagtcacttgccttgtgttgacctcagcacctagcaatgattcaagtgagttgatttccctctcaactccttcttttgttacctctccaaataatgggggtgatatgagaataaataaatagcactatagggaaaaatgctataagcagctctcacctgtcaaacttaagatacgactatatgccactaagtccatgccacttatttaatcacttttaataggtatctgagcacattgtaatggcttatctgtgccaatggtgtaactcgagagaatgagttaaaaatagcacatgggcaattatgcaaccttcactggactgtgcatattatcctcaaattgccctgacagcatgctgtcctggaacgattccagagaagtcatttctttgcactctctgccatcagaacatcccagggaagtgtgatttcaggttctggtaacatgatactgctaccgttatacaaggctcagagctagtgggactagagataaggtaatcaaaaacaaatacaaaatgtacttaattcattaaaaaggtgaatctttctagaacatgcagggctttacttttacactactcaactttaagggaaaagatactaaaaaca

SEQ ID NO: 37207 - DNA, 906 bp, Homo sapiens
agagtgagattccatctcaaacaaaaacaaaaacaaaaacaaaaaacaaaaacaaacaaacaaaaaaacaaagcagagtctgaatgaaaagccctgagccagattataatttgccagaatggttttaccttagggtagagaatggctttatgagagtgcttcagctctgacattccaggaagggctctttgcttgaatattaacaagtagtttggcaacgtacgtgatattcagcagccattgactcatgccctttcatttaaactaaagtgaataatcagtgctgtgctcaacataaggcctttcacacagtgggctcttgacaaatatttgatgaacaaatgctgttcttatgcgtagtagagagctctacttctctaaacgagttggtgaaaagcaatgagaagtcatggcccagagttaattttggcttcttatccactctacacagggtattggatttcaccccatgggatggctgccaatgataaaattttcccagctctgtttgtatttatggcctgggcaggagctggaagggctgtggcagcagaaacatgagacccagacccggagccaacctgactccatcaatatcttcctgctcagcacttcagaaatgtttcctgtattaacttctttggacagtaattaaggaaggaaggatatttttgaaagagcaacttataaatgcggaacagatatctaaatgtgctctgggttggacatgttttacaactaggattttcacaagtgaattttttccctgtttttcttgctctggcctctcatggctatggggaagtgacttcaaggcgttatggattttggatgttgccaagtcaatctaccacagaatgtgtggctttggagagcagtaagtcattttcctgggttcgttgactt

SEQ ID NO: 37208 - DNA, 524 bp, Homo sapiens
taataagttaacaaccattgatctatagagtatctgtttcatgtacaatacattagaaaaatatctcaatgccttaaatttcctctatctaaatagttgcttaaattcatagtaattaaacccctgaagaagaaaatttgagccctgatattgaagacgagaaatagagactaataatgatatatagataaatgttttatcagatgttctacattattcttccaaattttcatactctaccaacattattgttcacatagaacctacagtggatgcttttaatgatatacagtggaccctggggttaaattgtgaaaccctggaaatagcacagcatagctaattattaatattaactcagctctcacacacaatcatggaaatgttggcatatgtcctgctattgcgtattcccaaatttgttttttttttctatttctttggaagacccaagacattacccacacagatgcatacttattaatcctaaaggatcttttaaaaacaaatctaatattagcttt

SEQ ID NO: 37209 - DNA, 639 bp, Homo sapiens
taaataagtttagaatatcaacttgactagattaagggatgcctaggtatctggtaaagcagtattagcaggtgtgtcttgtgagagtgtttccacaggagatggcacgtgagctggtggaccaagtggggaatatcccacctcactatgggccaggaaccatccaataggctgggagccctgatagaacaaaaacacagtggagaggagaattcactctttgttttctgaagttgggacagccttcttctctggcctttggatatgggcatcagaatgccaggtttttgttctttggactcctggacttgtacgagcatgccctcacctcctgctcctaccacattcacaggcttttggccttgggctcagagttacacaattatttctctgattctaagggttttggtcttgaacagccatgctaccagcttccctggcttcccagttttcagacaacatgctatgagacttcttagcctacatagtcatgtgaacgaatccccttaatcaatctcctctctatgatctatgtatctatctatttacctatctatctaactacctatctatctatgtatctatctgtttacatatctatatactattcattgggtctttctggaaaatcctgaataa

SEQ ID NO: 37210 - DNA, 2081 bp, Homo sapiens
gtttaacctgtttagccatacaccaggaaaagagaaagtaaacaaagaccctttctttccctgttgtttgcattttatcactcatctccccaagactgatttattttctaaatttgcattaacagccccaacgtgtcagagttatttcagcagcatgtaatagggccccaacagtggagaaggagagctctacttgttctccctcctccacacctctgagcccatgaggatctgaggccaactctaatgctaccccttctatgccaaatgacaatttccagggccaaggcatatgacattcctgccttctaggcctttgccaatcattccacatttctgaaaagactcttattcagagatgttttcagtcagaccacctatgcttcctattcatgctgtcaataaaaatagaatgctatccacttctgtatgatgttacagcctttcaactcaggcccttaacgcacttcatgaactttctctgggtgccaagtactgctcttctcccccttctcccagtggacaagcaggcatacaagagtcaagaatctgacccaaagcctgacttaaataagtcaacactaaggatagaaaaagccttgaaaatctgatgttctaaccatccacttacccagcctctctttgttcgttataatttctgcaataccttagcaggtcaaggagaccacagctggcaaagtactattgttatctgtggagacttgttgcagtgttcagtgtgatttaaacttctatgtaaacttgctgtttcttttcatttacaaagttaatatattatcctctaaagttggcaataggtgggtctgactcaccctgattgggcaaagataatcacagggcttcagctttttgtaggccatgagaatctaaattcaccatataaaacctccatgtttaattgttttgtttttaggaagtcccttctagaaacatagctgccagtgatgttgtattcattccccctccaaacgtaaaatcaaaactttcaagaggacgttttgctctggaaacttctgagatcaaaggtcaaaaggttcgtgatgggcaattggctgttagtctcctgagtcatcttgatggactaaagaatgttcccggtggctactcattcctccccaccctactcccagtgcccataaagtcagtttgactgccctcccccagctttcctgaatagtaaatttccactttcattgttgggataattttccttcacaagaattaattctcaatggtttttcagtccttattttaaaaatccatgattcactcctaatgactggtcctgtcagttctgcctcctaaatatatcacagatacctctcccctctctaaccacactgtccctttaaccaagtccttccttgtaattacaagtgaactatgccacggtttatgctcctcaagggccaggatttttgcctgtgttcttcactaatagagttcaagcatctagaacaatgtctggcacatagtaggcgcatcaaaaaatacaggttaagtcaatgagtgattaacagaatttcacgaaagaatgagtgaacagacaagttcaatactcttaaaacgaaactcccagttttcagcctcacatctctcctctccaatctccataccagagccagaatagaacttctaaaatacacatctaatcatataattccatcccttaaagtttctcagtaactcgttatccactacaagctaaaatcactcaacaaataaggctattcaggatctggcccctgtcccatttccagcctctcgttattcctcccatacacaacatggactctaaccatgctgagccgctttcattttctcaaacacatcattctcttttacatttgctccctggctaatgctgccctctctggtttaatacctttgcttgccctgtttacctgtcattctctacttctactttggcacttctattaatattgttctttctgacatttcctggccagttcgtgctttcccttctgtgtttccatagctacatgattacatggctatcttcccaatagactgggagtcatctttcattttggtataat

SEQ ID NO: 37211 - DNA, 1842 bp, Homo sapiens
aagcgcttctcctacctcagcctgccgagtagctgggattacaggcgtccgccaccacgcctggctaattttttgtatttttagtagagatagggtttcaccatgttggccaggctggtctcaaactcctgacctcagatgatccacccgcctcggcctcccaacgtgctgggagtacaggcgtgagccaccgcacctggccactatgagtctttatgtattagaaaactgcttaataaagtcctcaccttattgtcataatcttataaccaataaccttataatctaacaacaagggttatttccatttcacagacaaaaaaacctgaagtttgttaattacggtgttaaattatcctacgattaatggcagaaataggtcctgaaccaatatgcctttgagaacttaaacgcggtgagttacatacaggccctcctaactggagtcttcgctagtaccaatagttagttgctcggcgagagctcggtaaggactagccatttggaagctcgtagtactcaggttgtggtacaggagatctaacactcctacacaaatgcatgtcgtgcttatttcgtaccaaactggtctggcggcggttcttcgtccagacgctggcgggccagggtggaggtagtaacacagctcccattccccatgtagccgcgccctctccttcccctgggcgtctccggggcgtggacaggccgctgaaaggaaccggctgcggcctgtgtgaggctccgcgggccgctgcactgcgaggccgacgcagctggagagaagttaggcaggtcctagggagggcaggctcgagtgctgggcccgcctccccgcgggactgtaggcccgggggctccgcctcgtcgcagcggcaggtaggaggcggtgcgcgcggcccggcgacgggggatcctgaggcccggtcagtctcttgctctggggtcttgggtggcgggcggcacctccgcttgcagtgccggagccgcggccccgctcggaaaagggctgccgtcggagttagatgccggggactccgggccgtcccagcccccgggcctcagctccggcccgggcagagtcgctgcttccgcgtttggttcttttttccccgctgggagtgagaacaaggcgtccccttctactcacgtttgccaaaagcgggtccgacgtgttagcggaaaagtgggtggagtttctctttttgccggtgcagagagaacttgtggcgggaagttggggcgcggggttggccgtaggtccccggcgtgctaagggcggacggaccaggcggctgggccgcgctgcttctcgttaccttccgcagggtcaggggccgcggcggggttggaggtcagcccaggcacatgttaacccctgggtaccagtttgctcggaaactcgtgttgaggactcatcttagccctgggaaggtacccagaagccgaagggacacccctgacagggacgggccctgagaggctgtcgtttcccttggcagatgaactcgggactcgcccccaggatgtacatttcgtagagtctcccttaccgcctcaagccctgaggccgctgccttgccccaaagtgtatttatcttttttataattatttagaatttattccttaatcagtagtttacactttggagactttaagttttaaatcagtaaatctgtaataggcaccagcctatataatgtactggtcaagggaaacctccacaaaaacttttcctgctttatgatacaatcaatgctctaggcatagttcaccatccaaattcccagcccttgtgtgcctatcaggaggaaggtgaatattgttaaagatacacgcag

SEQ ID NO: 37212 - DNA, 1116 bp, Homo sapiens
taaactccatatgagaggccactggaatcagcaaagttaattaattccattgctgtcatgcttctcctagaagatattgtaactgtgggtgtacaggtacatacgacttggcaaagggccaaaataaggttttcttcccaaatgttctttctacaggaaacacgaaaataattagcccagattcccgagtgaactcatcaacatccgtggaggtggagggtgttaaaatcgagttaaggcaaaatttacaaaaaaaaaattaaaaaacagtcaattgcgggacactgaacgaagaaggaagccaaactcggggaagggctagggagagaggaggcgtggccccagccccgctccacgccgcgcgcctcctcgctccccatccagcgcggcgaccaccggggtggcggcgacagcggcgcttctcaaacctttagtctcccaagagccgttacgcgccgcccctctcaatccccacaagtctgggcccctaacctcctagcccgtcacagacttctccgcgcagctacgctgcaagaggctctcttagctagaaagcaaccactgggcgggtacctgagccgagatgaatccctcatacacggttttcgaccggttctggggcagaagcagggggcactggcgcaacaggctcgcttccgtcaccgccatggctcgaagtccggagaaacacagaaaagctctagacctgctgggtcctgcacatgcgcagtccgctggcgctcggacgccgcggagcggaaaccccagccttggcgggaagatcctggaggattccgcgggcggaaatgaaggtgaagcgcaggccaggccaagtggcgctctgcgggaggcgacatcagggctccccaaccggtagtgggagggaagattgccctcaagtccacaggactgactgaccaagatcattctagcctcaattgtcccaggagccctttcgatgattctgttttactttattgaaagactgttacaactttggtgttgcatttcctccagaataaaatgacttttacagcctggacgttgtagcactctgtcttctttgctgttgtcctctctcccttaacatacagaataatgtattattttgtgtat

SEQ ID NO: 37213 - DNA, 1385 bp, Homo sapiens
tgagcatcatttggggaagatgcattcgttggctgtcatagataatggatagaaattgtggtcatatacattgaattgtacctgtattttcacctcattaagactggtgaacacctaaccagaataattaaagaaggtgcatgtatgtctgtgtgtatgtgatgggtttgggaagcagggaggggaaaggacaccactgaataccctctgccacaagtagtgagaactgataagaaagatggttaatgaattactagtgagtagaaagaaaaatttttcttgctgtagctatcaagtccagcttttcattttttgtttttgtgaatgaggaaatgatctcgttattactttattgatctaggccaagtgcttagatacatttctctcaatttttgaagtaaaagtttctttgttctcaatttgaaaaggattttcttttctcttctttttttggtcaacccctctgtgtttctgcaatatcgggccaccaatatgactccaatagcacagtcacacatgtgatgagatgagggacagacatgggagcagattgtcccaggcggctacttttctgttgacttggacgcaatcctaggggaaaaatcattttaaataagttactctctttaaatcttaaaagtttctgggacagcaggcagggacttggcaatgtgctggtaatgtgttttagccaggatggtcttcagaaatatgcttgagaattattaacttgtctgggcataatttagcagtatttactgtctgttcctctgagtcattgcacaatctgtactgtccctgggatatttagaccttcctggcctggcctattttgtcatgtaataatatataaaaatacaaccattcttaaagtgcaagcatgtaccctgtcggagtgtgacctctttaagttaatttttatgcatcaaagtatttgatatttacccaaacatattcagatctctcacgcggtgttttttgtttttttaatttttaatttttttttttttttaatgacaaaaacatcattgatctgacagcttgctctccagggaagagatattgtggatagctttaaagcctagatgcttccaaagtccttttcttccaccagtcccaaagcagtatgtctggagtcggggcaatgcagcttgccaccatggcagctgggagtttgacagtgttatgaagaattgcaactgttgatcagtgaattgttacagtgttgatgacagcgttgcaaattaattctgaaattaactgaggggacatgaagaggtcccactgcttatctgagagaaggagggcagggtaaaaattattggtggagatgagtgaatatgagaatcacattcagaaaattgtgtctaccaatcaaggtggtg

SEQ ID NO: 37214 - DNA, 1581 bp, Homo sapiens
aaagatgattcattgcttacacggaaattgatctaaccactgttttatgaaaaatgcaggagttccatatctttagaaggacttcttgaagaaatttgaattagggaacaaagtagttaaatttttctgtcttttctggtctttttagctactgattaatgcacagtcgtggatgttggaaagacttaaggaaatcaataataatattaacccttatgaaaaggtttgctatgagatgggattgtagctcaaggtctttaatggtaaatagtcaaaagttagagttcatgggtgccagctccgttggcaggtgtgaaccttcttgctactatgaccttcaacatttccttaggacctgacactctcttggtccaaaagagatagtgatcccttcctgtaacaatacctagacccagaagagagaaaaaacagtagggttggcttctacagccaggcaacaatattgaaagtgaatggtgccctcccccaacaccctcccagccaggcagatcatccaccccccagctttgtcctcttaagaagaatgccccttgtctctcaggccacagttggtcatgaggattaacccctcccaccctttcaccccctccccagcatggcccccctttccaactgtcctttgggcagacatgactgacaagagtaccacaggcgatgatgtcacaaagagaggaggcagtgtgccctgttagaccatctttcactccagtggactcgccttcacagacaaattgatttgcaaaggttcaggctgccagcccagcctgctttgcatacagaatgctccctggtgacacaataaaaagtggccaggctaacagaggagcgcagcggggtctggccggttcaaagtccaaactccacaccccctcacctcagtctggtttgaaaggtcactgtgtgtctgggaaaatagtcacaggatacaatcctttattaaaggtcactatttttcaccagcacttaacacacacttacacacaaattgagactggagatggaaaaaaaaaactgggggctgcatcgcattgtatattgtgcttgcaagatttatgtcttgtggtcaccagcaataaacacacactgcttcggtattaaagttcacattaatccactgattccccctccccttgaaaccagcctcttctttgccaggcaaacctgggcaaatggagacttttgttcatctcttttgttcctttcccatctttcccttcccttgttgcaagttgtttttgtattgctttgtttttttaattatttttggtgttggtgttgttgacatgctgccaggaactttactcctagttccctctcttgcccagtgaatgatgtgtacccagcatttgggtccaaggccatgtgctgtcaccatgcccgagatgcagtgtccatggatctgtatgagtctcagaccttgaaaagcaaaagtcaagttcttttatgagctgctggtgaaaatccaggggagcaccttggttaagccagtaactataaagccaccaacgagagtaccagtcctgcctatccattatggcatatattttattttagtaaatg

SEQ ID NO: 37215 - DNA, 576 bp, Homo sapiens
aaggtgggcagccctcactctgcctgccgccagtgccaccaacagagccaagtgcaggttaactacctagcgggagataacttgggtatattgtggtttaattattcctgatagtaacaggttaccatatgcaccatttggagcataaacataggccacatcctaagggccaacctgatccttctccaacaattcaagtcgggtgaaaagctaggctcccggctcgttctatttgtgcaagtcctagtcttagaggccacagggcctgagcttccacccatgaaatgtggggaattctgtgactatactagaatgaacttcttatctcactcccatagaggacaaattccagaaattccattcagaaaatctgcctctctgctcatggcgatcctccagaatgtttgcctagaatcgaacttcagaattaacaattcagagcaaatgccaactccaccaggaagctttcccagattctctcaataggaataaattacttccctgttacattcctacagaaccctgcatgtgcctgtatcgtggtctttaattcatttcttttacaccatagtctcc

SEQ ID NO: 37216 - DNA, 1930 bp, Homo sapiens
ttgcagtgagccaagatcgtgccattgccctccagtgtgggcaataagagcaaaactccatctcaaaaaaaaaaaagcatttctctaatgcaaggtcacatcgattttctccatgttttcttttatagttgttgccctgcatttagatctgtgatccactttaagttaacttttgtgtgtggtgtgacttgtaggttgaagttctttttttgcatataaattctaattattccagctcctttgatgaaaagattgccctttcccccattaaactgcttgtgcatctttgtcaaaattcagttaatcttatatgcatgggtctatctctggactttgttctattgatcctgtctgtctgtacactaacaccacaagttttgaagtcagatagcactgtataagtcctccaaatgtgtttttctttttcaaaattgctttaactattttaggcatttgcatttccacatacattttagaatcagtttgtcaatttcaacaaaaaaagcctgctgggattttgattggatttgcattgactattgatcaatttctctccctgttatgttttaagctcctggaggacaaggaacctatcttgcatttccccatggttcctgagccatagtaaactatgtgcttatctctggcaatgcggctgtgattgggggcggggagggtgaaagccaagcgagagagggtaaagcagaaggcaaggaatggtgtagagtcacaggcagacgtgaggatgatgaatgcgaactcttggctggtgtcatgtattctggcagtggcacaaggaagtggtgactcgggagaggccagttttcttctcatagccaaggtcactgtttcacaatcagggaaagttgcaagatccccagaacttgagatttctaggacaagctagggttcctagagtctgggatctggtgaacaatcgccaaagaatagaatggaagttgatttcatgtctgtctgactttagcttccttctagaaagagctagaaaggtctcagagatcatctagtccacattttatagatgagcaaaacaagaactggaaagactgaggtcacagagttaaacagtgaattggtagcaccctaagactacgaaaaaaatcaggtcttctgtcctcaaggctgttgaccttttggctacatcacatctccccccacttttttttttttttagtaatgtttgtcctctcctgtctgtcaccagagccatttacgtcacagaactggagctcttagaagtcaatcagttggctgtgccagaaagtcagaatttggtcttcaagtccccccgatgcctcctcctttcctgtgcatctatcaacacaagacattattaagaaagcttagtgacttctcatcaaaatcccctctataaccagactccctttccctgccatttgcttcaagccagctttggccttcccaggtattttggtgagatgggatgggctataaaccagaaatcagggacatggtttttaaaccacctattccttactcatcaggcaaatcactgaacttctccacccatggttttctctctcaaatgaggacggtaatactcaccctatctgcttgaaggcttataagaacacagtgaaaatagagcagaagtcccctccaatgcctacaaggtggcatataatggaagatacagggaagaagataacacactccagaaacaaactttttctgaaacctcactgccagaagcaggaattacaaaggagatttatgggtacattgtcaggcctctgagcccaacctaagccatcatatcccctgtgacctgcatgtatacatccagatggcctgaagtaactgaagaatcacaaaagaagtgaaaatgacttgttcctgccttaactgatgacattaccttgtgaaattccttctcctggctcatcct

SEQ ID NO: 37217 - DNA, 1108 bp, Homo sapiens
gactgctgcctccatgcccgtccagctcggccagctcggccgcggggtgacggttccctgggcctgccagttggtgaaaaaggaagtgaggtttggaaaacccggctggttaacctggtgcagtctcagtatctccgcacacacctcaagcgcgggtcctgagattcattctgtgtccacaagcttacactttttactttgggggatctctgcaaatgcatttcccccgcaattctgggcactgggtgtgcgcggcggcggctgcggttattcattattaatgacgctgcctgcccgcatcattatgatgataactattactattgttgtgattccgagctccgaggcgagagggggggtgtcgggctgcagagccgcccagcaagccagccgaggccaccgaggtctgtgctttgcatgggggtgagggggtggaagaagtgaggctggagaccaagtgcaaacttgccatatccccctcttcggccatgccccgaagccctagagcgcgcactcccggttcctccctaccaaaaatgccggccccgaaagaaagcgaaaactgcaccgtgctccgagcccggcgcgcgctggtctcagctcgcgcacgggggtgtcggccgcgcgcccggtcgcttctccgcggccccggccagaagcatttttaaagtcaaaatgaagaacaaagacatacggggtgatgggggagagaaagggaattctgcctaaccgttctttccccccacccccaccctcgcaaagctcgttcctccccggacgagaatcgccgggcaggaggtgggggaggctctggtacaggttcaagttcgctgagctttcttgatcttgttctgcctcctagcgaccgaatggctcattcagcccacatagcagaggcggggggcgggggggtggtactgaggaccgggatggctcctgccccctctgagcacccagaaaatgaggacagaaagaagtggccccctcaccccctcccaaactggccctttaaccccgggacaggaggagggggtactaaccctcccagcctagagtgtcccaagatggacccaggagggagaggggtacgagggagcagcctggactg

SEQ ID NO: 37218 - DNA, 1278 bp, Homo sapiens
gtttttgctaggcaagggtgtgacctttttaaaaaatgtatgatatatgctgccattcgagaggcaaggaaaacatatctccaaatttccttccaagcggtctaccggcattgacagtaccgcggacaaaggagagtaccaaataaatactccttcgaaccaacggtatactgagagccctgagcttgtgggcggggccccggagcctcccgggacctaaaggcagagggggcgtggctgagggtggtccagacctccaggggcggggctgagacctgcgagaggcaggctgggaagcggcgccatattggcgtcggccgcgctgtattgtcataaatagagccggttttgtggtgttttcactactcggttggatgcctcagccatagtaagtgggaaagtgagcgagcaagcgagctactagcgaccggaggaaagtgaacagggggagaagggaacagcaagaacaggactccagagcgataaacactcgctggagagggagacgcaggaagcgatgaaagagatgtctgcgtaagtggtggggggcggcggttggggtgaggcgggtaggggtgagctgaggtggtccgactgtgtccttgtttccgttccctgtcccttgcgccctgcacgcagctcgccgggatggtctccttcccggctcccggccggtccgcaagggcacctcccctaaacccggcggctcacctggccacccctgcacggactcggggactccgggagtccccagctgtcccgcctccgaggacgccctcagaaaaggatgaggagggaaagaggtgcctgtgtccgtagggagaaattgtcggtcactcgcctgcccccagcactgtctgagcccgtctgctcctgtctgcattggcgcaaataccatccccctgcctccccctcctcccttcccgaccggctgtctccaggtcttcaggagtgaaagacctatcgcagcccaagggtttctctttcatatgaggctacagtcttttcaccgccgtccccaccctctccctcaccccctgcttccccacctacccacaacatctaccggtctgtacctcttgttcacactttgataagtcagaaacagttcccgtacttggcaagattttgttgtagcttcttccattttggtctattaggaaataatttaaacatgcagaaaaatgtagagaataacataagcatcatttgtggagccaccacccatttctcccaaaacgtaactgtacacacatacacgtacatgcacacacgcac

SEQ ID NO: 37219 - DNA, 2353 bp, Homo sapiens
gtacgttttagtacatatccaataataaaactgtttcattcttttgttgtacattgcgcatttcgtggaaagaacagtttggggttggcaggatattttaaattatttgcccatatgggtcccccagttttgggcacttgtatggcaggctgatattccccattacctctccgtactaattttaactagtaagggacaggggcaagggcatggagctttggagtcagacaaccctggctttaaactgtgccttttatcagcattctgaagtactgtatgttgaagtaacttctctgaaccccgaatacttcatctataaagttaggaataataaatacgtcatagattaagtatggacattatctgatgcatagcaggtactattcaaatgaaggaaacgaagttatcctaggtcctttaatgcactaaatgtgtgctccatttccgcctttcttggcatctgtgtgaaatctcaggatatagtgtccactaaacttcagtgcactgcctaatgagacaacgaactccaagtgcggaccttttgagtttaaacgggtttcagtaggtaaaatacgtaaagttcacagtaccctcgcaatttagatggaggaaaaaaaatcagtcggggggggggtccccgtatgcaaatacaggaattacagaagaagacaggacccccgccgcagcaccacttccccctacagggcgcaacgtcccgccgctggcgcgggggtggagatttgcatgtgcgaagtcgggaagagggggaaccacctctcgaaaaccccggccgtcgccctcccaggccgggagagtcggccccgcgcgcccccaaaagctccccagcggccggccctctctacgtcatccgcaccctcccgcccgctcctgaactttaaaccacactcggaagaacaacctggaggagggggatttctcaggagccagcggccttctcacgctgctagccgtcacctcccggctcccgccgttccctgcgctcccgaagcccaccccaagctcccgctccctcgaccccctcccaagccagccgccgcagcagcgccgggggcgtatgcgtgggggccggcggggagcgtgcgcggggacaggcaggggcggggcgctgggggcggtcgcgcgcgcggcggccgcgaggtcgccccgcccacgcctccgggtgagggttgctgcgtcgggcctacgtcagccgcgggaaattcccctcccgccaggctgctcgcctctcggctgggccagcactcggctctccccgctccgccccctgcccctggctcccgtacggtggacggcgacgctgggtgacccggggtgcaagaattcaggggttgggaaggtgtgagccgcaaacccagcggagggcgggaagaaggaggaggcctctagggtggtcgggggactgggggccccgccggcagaggtccctcggcctcctgactgactgactgcggccgcctccggccaggacgctgggagctgcctgcgggaaggtgcggggagcggagccatggcctccggtgagtgttcatggggcgcgggcctgggccgggggaaaggagctcttctgaagggggtcctgccgcagtgagtttagggagctcagtttttgctggggcgcgttctgtctttaaaatctcatatggtaaaattgtcagcttttaaaaaagttacctgcttcagggtttgcgtgcagaatccaagccacgctctgtaattcgatcctgttgtcatagcaggaaccttagaaattcccaacgacttgattttaggattagggaagtcataagcgaaccaaaggaggacgaagagttctcattaaaaatgtatatgtattgaagatggtggttttatgttttagaacaggaatgaggaaccttcagacctcgggcaagctctctccccctttttagtttaatttcatcaaatgcaaagaggtgatcccccttgtactgacagttgtacaaaatgtgtcacggctttaaaaatcatccgtggtattttaacacgaattagaaaatccgtggtattttaagtgttaatgttgcttcgaccaagtgtaggccgggcgcggtggctcatgcctgtattcccagcactttgggaggccgaggcgggtggataaccagaggtcaggagtttgagaccagcctggcaaacatggtgaaaccccgtctctactaaaaatacaaaaatcagcggggcgtggtggcgcgcgcctgtaatcccagctactcgggaagctgaggcaggagaatcgcttgaacctgggaggtggaggttgcagtgagccgagatcgcgcccctgcactccagcctgggcgacagagggaga

SEQ ID NO: 37220 - DNA, 579 bp, Homo sapiens
aggttctgctacctctgtgtgtagaatattcccaatggatttttcatttttcaggtgctattttttgaccctgtatagactttaatttaaaatgaatttggtaacgtttctcctctgtctctacatatattcatgctttcacctgctcttttaacacctgcttttagtatctgaggcactttttctgaactctacttgtgcactggatccctcctcctttctctgccaggctgtgtttactttatccttacatcaccacttagtgattcctttctttgtataaacatggtaaatgtcttcattagcctaaaaggaaagaccaaataaaacctttcctaccacttggatgcatttgcatcctgacttctgaaatgcctccagcctccattttctcccttcccagttattccttagcccagccatctctgtctttagctcctacaattttcttaggatattctgggaaagatgagcggagactgcccgccttgtcaaatctagtgtctttttttcagtcctcacactgcttgacctatgtataacctcctatacttccctctttgcatactcctctgggtt

SEQ ID NO: 37221 - DNA, 3160 bp, Homo sapiens
actatttactagtgatctggatcccttttcccagcccatttaatctactttgatgcagagaagagatcggatgctgtgaggggcgaatataagcatttacagtgcatctctgactacatacacagagaaactgtttctgtttcacctgttactctaagttattttttctccattagttaaggtcaagaattttacttaattcagaagtaacatttaactcaaaaagagacagaagaaatacaccctcttccaataaatcaataagcactttaaaaggacacttaatgaagatttccctcgatacttaaatagctatattaaaatttattttattttccatggctagaagacaatgtttatttttccagtaagttcacaagaacaaaggtatcatgcaaagtaaataaatgacacattacaatctcctggctctgagaagttcccaaacctgattgatgagaattacaaaacttccagtcctgagtaatttgaagaggtctaaaaatagaccccaaaaaagacctcttttgaatgtgtgttaataaacgagctatgaatttacaaacctctcaacatcattttcacctaccaacaatttatcaacttctcaagaatgttaacattaaaaggagaaaatacgttacgtcttaaatttggttttttcatcgtgagataattaaatgccaggatttcataagatattagaaatcggttgtccatattagatttattatgtttgaaagcaagccctgagaaaggcattccacaatgtaagttttccagtgttggttaccctcaagatgtttgcttttcgtttatgtgtttgttttatagaaataactctgtaacaagttgctacaaagccgcctttcatgtgtcaggctccctaggaggactgaatccctcctccccaaatcaaggataactagcccagtctctggcttactggaggagaggaaggactttattttcacctcttggacgattacaaaaaccagtcatcgaaaacgagaaaaggggcagggtataagaaaaactagcgaaatgaccagactgagtctcatatcctaagatcttttaaaactcatttccctaccgaagggtgtcattcgtaacgcggcgtggggctgggggtgtggatttacggagaaagaggtgatcacacttcactgggcttctgaaacattcagctctggaatctactgtggactcttgaaaagttcatcccgagatctaacctcaagcctcagttttcgccaagcaagcccttcccccttcggtcaggtgcaacaaacttcccactcacccctcctttgctaacaaagccgctccagcaggagagaaacgaactctctcccgccacacctcttttgcacccagtctgcactccttcacctcttacctacccgcctcaccttctccccagacgccggagcctgagatttaaccccttccggccctcgaagggaagagggaagactaaagacaacgcacctattgcgtctagcaattctgttccccgaggaaacgtgcgttttagaacaaaagtaccagcccgctctcgctaggactaagtgagcttctcccttcttgtttgtagaggaaatccgaaaaactgcctggtttgccacctcaccctacctcccccacgagcgaaggagtgcgtgcggctttactcccagcccgactggtccactcccagaaaagcctcggtgggactccgacgtctagggagttgtagccgctaccagaaatatcgatgagcctttaccctgaggtttagaaaggcagctctttctggggcaaatacaaagagcgtgtttcttcctacaaattagtggcatcctcccgctgtatggattcagctggcaaagtaactcaagccttgtcctgactgcaagggtgggcggggtggacggctcggtgttctgcccgttgtgtcttacgctccaggtgctggtctacgcgggcctggacagtcaggggtaggagcgggagccgagaggaggcggaggagatggcgtcccagccgccacctccccccaaaccctgggagacccgccgaattccgggagccggaccgggaccaggaccgggccccactttccagtgagtgtgggattcttcaggctgtgagtttagtgggcccgagcggggacttggcaggaggcggttgtagcggttgttagtggaggtattcccttcccccctttaaccaatacccaaccttggggataggggccgaggtggagctggggcgcttaccagtggggactttagtgtctcacagctgtttctgacccggcagctctaatcagcaacgtttttttcgggagctcctgggcgtctctctgggtctctgtgcttgaaagaaaggggggcggcttcctacctaccgcttctgttttcactttgacagaatggcttctctatctttaaagcgtagactttggtctgtagcagttgagagcggcatttgtccagccacggcatcgacagggagcaaagtctctccttaaaggtgttaacctctcgagaagttgctgaaagccggaaaggttttacgcaacaggaactcaagccccgtacactttgcattcttttccagcataactcagccagtgtttcggatcgagattggagaagcaactttaaagcaggagttctagatctgaggcctatggatggactttgtgtgcaaaatagtgtatttttctgaggcctgtattttttttttgtttggtttttaatcagtatcagttggtttctaggactttaaaaaggctaaaacatgcagagttgggagtgtttcgtggcctcgtgtggcttttgtttggtagtgctggacatcttaattcagataggtgtgattcaaatgtcaaatcacctactattgtaggttttcctaagcgtaaaaaccccaacatattggaatgtatttctgctgtattctgaaatcttttatttaaacactaaaatgctttaacacagtaacgacttagtttaataaggatatatacataacaagtaataagtttgattaggctggtaagccacggtgacattatctgctaccttttttttgagtgggttcttttttccccatttaggctgcttgtcgaatgagagaggttttattttttgcatctgttaaagttct

SEQ ID NO: 37222 - DNA, 1239 bp, Homo sapiens
caagacgctgggagggtggggacgctgcactgcgacaagcctgggagtgtatgccagaggaggaaggagaagcagcaggcaaggcaaggcgacagtcagccgccgccgcccctccggtgccctcccgcccggcaggggctcggcgctcattggctccgccgctgcggcgctggcccgcgattggccgggcggcgtcggctcggcggctcccccacccctcggcgctagtctccgcagccgcctgcaagcgggcgggggcggggtgtgaggcgctgcggacggggttgcgggctcggtagcggcagcttcagggcgcgagcgcgggcggtgccgaccactgcaggtaacagaggcgctgcgagggcagccgcggccctgtggaggtgagcgagacgccgagggggctcgggtgcccaccgcggggcgggaagtgcggcatggggcggtaccgctcacagccagccggctcccgccgcggcttcccaccccgggcggggtcccacttgcccaaacgcccccgaacgcccccgtgcacagcctcagccggccgcgcctcgagcagccagctggcccgcgtcccgtcacccgcccggtccatgtccctgcagaccgtcccgcccgcgcacagcggcgggaaccccagcttctgcgcgcccggccgcgccccgggcctctgccccgcctcgctcccgctgcccggcgcctttgtccgctctgcgcccctggagtttctgtgcctccacgggcgggagcggggcgcgaaggtctgggggtgccccgaggacgcgccgcgtagtgagcctccgggcccaaggtttgactggctttgacctcatgccggttctgggatgtgattttactttctcctccagctgactccgatctcctgtgtgtgcagaagtcaggaagcctgggtacaaggcttcttcccggtccgggatgactcggtgttaccgccgccctctgttaggccagaggcctttgacctgcctgcctgcctgccccacggggccccctctcttcccatctttccactggctaagggaaaacgtctctgtctccaagagcttttttttctatttgaaataagaaaaaaatatatcagattcctgttgtagacctctatctggtgtggaagtgacttagactagtcttcttaattaatacatgtatattaaatacataaaccaagagaagggggtcggggaggggaggggaagtatgttcttaaaaaatgaa

SEQ ID NO: 37223 - DNA, 911 bp, Homo sapiens
aatttttaaaactcgctttagacaccgtttggagggggccaggtgctgaatacctgctgatgtaatgcagtgattttttgtttgagggccacaggaagaccccttgtggctgttgtactggcattccctcttcatagcagggatggtgcctctggacattttccgacagcagggatcgttgggtgaggttagcagcgccagcccgggttagcggaagcagccttcaggtctcctaggagagcaggtttatgagcatgcgcagcggattttccgttagggaagccgatggggcgcggctccttggagcatgcgcacacaaactttccgctaggaatcaagcgagcatgcgcacacagatgttagggttcgggcgagctatttggagcctgcgcagtcagatccgaggacatgttgacgtcgtccgagagtcttaaaatcctgctctggccggattccagactcgtgggggaaaggctggtatgttcgttttataacaggagttttagcgtcatcttttgtccttggataagtttttccaaatataaatatattaaatattcatttaaaatatctaagaattaacaggcagcagtgcattagacaaatgggcgaagtactggggtaccaagttcacagaaaaatagtagttaaaaatagactttaaatatatgaaaagatgcttagctgcatgtttttgtgttttttatttatttatttatttttttgagatggagtcctgtgttgcccaagctggagtgcagtaatgcaatctcggctcactgcaccctccgctgcccgggttcaagtgattctcccacctcagcctcccgagtagctggaattacaggcaggtgccaccacgccaggctaatttttatatttttagtagagatggggttcaccatgttggc

SEQ ID NO: 37224 - DNA, 1926 bp, Homo sapiens
aggggaagagaacagtcagatgcttccaccttttcactgttctacccatttctgtgctaactacccatgtagttagcagagaacaccccagtaacattgtccaaatagttcgtgcaaagttttagctagaagccgaaaattcgtgaaaggaatcattaatactccatgataaagtgcatcagtttgcagtaacatgcgtttgcaatcacattctttcgttctctctaaaggattattacgtgaataaaatggaaatactcccgcagtaacatgggactagttggaaaggtgccgggaaggggggagggcgagagactgcgtcgcggaaaaaaccgcagcgcggcaactgggcgcggactcgctcttaggcgaaatccgcaaacggtgtgacgtgtgcgcgctgtggccccaaaggccggtcttacagcgacctgggcgttcgaggtcgtgtcctcgagagctatagggagcctgccgaggccacctgacggcggtgtcgcgtctacactgccggttggactctcaggcacccgctactcagcgccctgcttcccggcgccgggaatcacgagcccgccagcaccgcgggacttgcagcgccctccgcccttcgcaggcggcccagacagccccgtcccgccctagcgttaggagacgcgcagcggaaccccggcggccccagcccctccccgcccgcgcgtccccgcgtccccgcgtccccgcgcgacccgcctcccagatcccggctggggctcccgggcgcgccgcggcagggcggggcggggccgggggcggggccttctggcagtttctgggagctgcgaacgcgccgccccggggctcggcggccggaaacgctggcttcggagccttaggcgccgcggcctttccttgttttccgcccagtccacgccgccatggccaagtggggccaggggaacccccactggatcgtggaggagcgggaggacgggaccaacgtgaacaactggcgctggcgcggctggcggcggcctccttccgggatctggggagggccgggccgcgggagccggggctgccctggggtctgtgcggggccgcggggccagggggtcagggggccgccccccctcagctgctggacgcagggctcggccttcgcctctcggctcgggagagtccttgagtacggagaccggctaggagggttgcagctgcctctttttgaaagttgggttgggccccaagagtgacttccgacagacctttccactcccaccgtctgtggcctgagggccttcccttctcctcccgcccacccctctggatgtttcggggagttagaagggagctggattgagagactgtgttaggggcgggggtatggaacgtagtggaaagggcagaaatttggatctcagttcgcgcccaccccgcaggcgcctcccgcgagccgggccctctgtgagtgagacaagctccccttcctttacgcgcctcacctggcgcgtggggagaggtcggcagccctccgccgcagaacctccggaagggatgtcctctgccctgcgcctctggccggggctgtggtccctccaggccgtcgaggggatgctgaggccggtccccagaggagcatgacttggctggtccggaggagctctgagggcatgggcaatcttggctcgctgcaacctcagcttccagagttcaagcgagtctcctgcttcagcctcatgagtagctgggactacagatgcgtgccactacgtccgtctgatgtttgtatttttagtagagacagggtttcaccatgttggtcaggctgctctcgaactccagatctcgtgatccgcccgcctgggcctactaaagtgctgggattacaggcgtgagctagatctgactttctagtgtcctagccttggcccgatggacatgtca

SEQ ID NO: 37225 - DNA, 1112 bp, Homo sapiens
actcattcactggcttacctagggcaatttccagtcttgcaagcaccattcatggtaagtgccctacacaagtgtaccattttctgtcttttattccatatttttactgtaccttttctatgtttaaatacgtttagatacacaaatacttacctttctgttataattgcctacagtattcagtgtagtaacatgctatacagatttagagcctaggaacagttggctataccatatatcctaggggtgtagcaggcgctactatctagttgtgtgtgagtagtcactctgatgtttgcacaatgatgaaataggctaaaaatttatttctcagaatgtaaccctgttgttatgcaacacatgactataattactcacacagctatattactgttaacaggtcttctttcattagataccagaaaaatgttgttatagactacaactggaaatccttctactttattcctttcctttttcaagaagagttaagaaagctccaaatcttttttttctttttttgagactcgctctgtcacccaggctggagtacaatggcacaatcatggctcactgcagcttccaccttttgggctcaaggatcttcccacctcagccccccgaggagctgggactacaggtgcatgccgtcacaccctaatttatttgctaacttatttatttatatagagatggggttttactatgttgcccaggctgctctaaatcttttttgaaataaagctttaagtagtaaactttgggaaaacaattgtattcaaaattaatccaaaatttaaaaacaatccctttaagaaatccggcaaaggcgtagttaatttccctgtttactaatgaagactcacatttgaaagctttccaaagaagacaatctgaaataacctcatcttagattgagtagcttaagatattacagtgaagtcttcagtaaagtaccattaaaaaaaatgtgcctaataaaaaacaacacttccaagtcttagatgtaatacatagaagaatttaagaaattagcctgaactttatttctctaggttaaggggaattaagggtaatttgtagtagttcctgtaaccattcaataacttctg

SEQ ID NO: 37226 - DNA, 564 bp, Homo sapiens
gaaatgaaacgaaatgaaatgaaacgaaaactaaagaaatttacacaactagacactggaaaggttagagaagaggaatgtagggagagattggttaatgaacagagaattatacctagccaggaggaatacattctagtgttttatagtactgcaggatgactatttttttgtttttgttgttctttggagctttatcaggtttttgtttgtttagagaagagatttagctctgtcactcaggctggaatgcagtggcacaatcacagcttactgcagcctggacctcctgggctcaaacaatccacttgcctcagcctcccaagtagctgagactacaggtgcatttcaccacactcaactaattattaattaaactttttgtagagatggagtcttgctgtgttgcccacactggtcactaactcctggcctcaagtgatccttctgcctcagccacccaaagcactgggattacagacatgagtcactgatcctggctttaggattactatagttaataatctgacattttagctagcagaggctggccgggcgtggtgg

SEQ ID NO: 37227 - DNA, 483 bp, Homo sapiens
tgggaggctgagttgggacgattacttgagctcagcagttcgaaaccagcctgggtaacagggcaaaaccgtgtctctacaaaaaattagccaggttatgtgccccctcctcctgctgtgcctcagctgtgtagagccacttgaccctcatgccctgtgctggcaagaacactcaggtatgtgcacagctctgatgtcacccctccagcctggccctggctccctccacgaggatctgcttgcagcactcacacttggcaccattctgtccggccatcctgtctcccctgctgtatgtgagcactgggagggaaggggccgtttccatttcttggaaggcccagtgcccagcaccatccagctgtgtgctgagcaggcagtcagtgagcacccacagtcagccctcaccacaagcagctgtgggtactcaggttaggatatctgacggggactcctgtgtgctccaagaaggcagcatggcag

SEQ ID NO: 37228 - DNA, 1451 bp, Homo sapiens
aggataaaaattacagctagataggaggaataagttccagtgttctacataactgtgaaatgactacagttaacaataatacattatatagattcaaatagctacaaagaggccacagaaggttcccaatgcaaaaaagggataaatgtttgagatgaatacactaattaccctgatctgatcactatatatgtatcaacacatcactatatgatgaaattttgcataaaaaaatcactacatatcccataaacacgtacaattattacgtcaattaaaataaattttttaaaaagctatcttcctgccagcagatgtgttaaaaaaaaaaaaactatcaagacatgaaaatacataaagaacatttaaattcctattactaaatgaaagaaaccaatcttaactggcaacatactgtatgatttcaactatgtgatgtagtaggaaaggcagaactatggagacagtaaaaagatcagcagttgccagtgattagtggggaggaaggaatgaatgggtagggcacacaggattttagggtagtgaaactactttgtacgacactgtactggtggatatgttattacacatttgtcaaaccccaacagtgaaccctaatgtggactatggactttgagtcataatgatatgttaacgtagattcaccaagtgtaacaaatgtaccactcactctggtgtcagatgttgataatggaggaggcttcgtgtgtggggagtcaggtggcataccggaaatatctgcaccttatgctcaattttggtgtgaactaaaaactgctgtaaaaaaataatgctgaccaggcaaggtggctcatgcctgtaaccctagcactctgggaggcgaaagcaggactgcttcagcatgggcaacatacggagacttcattgctaaaaatataaataaataaaattgtaggtatggtggggcatgcatgcctgtagtcccagctactcaggaggctgaggtgggaggatcacttgggcccagaaggtcaaggtgacaagattctgccactgcactccagcctgggtgacagagcaaaaccctgtcccaaaaataaaatctattaaaaagaaaaaactcaaaagcctaagaattaaaatatacaataacagaaattaaaattgatagatggctttaatacagattaaacaagactgagaaatcgaaaaaggaagatgggtcaaagaaaatatccagactgcagtatgaagacacaaaagccaaaaggataaaaatatagaagaaagcaaaagagagaaggaagatcaaaaggtgatgaaagacagactgaggcagtgactacatttgaaaaaataatggctaagtacttctaaaataaatttttaaaaaactcacattcaagaagcactatgaatcccaataaatacaaaatcagatgcggacttgtcatagttaactactgaag

SEQ ID NO: 37229 - DNA, 2470 bp, Homo sapiens
gatttgcaatatatcttctataagctgaaataccatcttgcaagggtcgagaataaaataaaaaggccagaaaagatcaacgtaccctttttaataataaaaagtaaagtaccaggtaaaaggcctttccttccaagagagataggccataactatcccgggatggtatgtgtagtacagtgctctgcttaacagaatgtaccattaaagcggtgaatgctacactaagaaacatcattaacaaatttattttaaaaataggtatgaaggttccaatcatcactatcacagttcgttttcagctatttaaggtctggctgaagtgtttaagacacccacaaacccgcaagggagggaaaaaccaccaccctgctcccgggagtttaatgaaaattagcaggtaagagaggcctcggcagcacgctggaaatcaaagagggcggccggaggatttggactgcggaggaaagcctcgtcctccgaccccacctccccgcaccttcccggcagggcgaaggaggcgaaggcggcgaggggttcattactgccttcattaattgacacctgtaatgaggaaactttccgagagcccagagcgcccgggccaggccgagccggagctccgcggcggccgcctctcgggcgcccaggtaacccggccgggctgggcccgaggcgccgcggcggccgcgccaccgcgcaccttcccggggcgctaggcccgcacgccgcccggcccggccgtcgcctcccgcaggccgcggcagcccggggaggccagagagctgcgcgaggaccccaaaccgtgcaccccgacaggccgctaccgcggctacttactttcatttaacacctccaccaggtctgcgcagttctcgcacatcgttcggccgccgccccccccctcccccgcttcggatcacactgactgatcccgaccggcgggggggaggggagagaggcggaggagggggccggccggccggcggggcggggaggcgactagggcgggcggcggcggggacggggcggggagcaagagaatgggggagggggccggcggtccccgcagcgggagggggagaggaggggagcgaggggaggtgcgcaggccggaggggcgccgaggcgccggcggcggggaagggggggaaggacggggggaggggagagggggggagggggcgggtggggagagaagcagcagagtcacttcaccgaccagacgccgcggccaccgccgacgccgccgccattttaacagagcgctcgggctgcgctcggctctttccgcccgggcttaggagcggacgagaggcgcctcgcgctctcattcctccgcctccctccctttctcgcctctcctccgccccccacctctccctccgcacacacgccgcacgctccacaccccgccgtggccggctcgccgccctccctttcctcttccgtccggcctccccgccctcggtccaccccctccgcgcgctcgcccaccccgcccagcccggatctctgtcagcggccggaagggaaacgcgaagccagcgcggccgcggggggagtccgggtgagtaggagaagatggcggaggcaacggacgggtcgcggttgcgtggcgtcgcccaccacgacccactccacgggctctgaggcccggggagcgccaggtcactcgctccgtcctgtcccccgcccctgggcttcgccatttttccccagggcctgggtcggggagttggtgcgggtttctttggtgtccccggcctcttccgcgcttaggcttttggggtacgggaagcaaggagtcaacttgggtgccgggccgggtctacgccgtagccctctttcgggcgcaagggccactccccccggggtctgagagtgaatcagcccagggcccggcttaactgcatcggtgattatcgctaccctgcagttccttgaaggtcctccgtcctggagcagtaagatccttgacgtaactagaaatggcagggtaaggagtgtttgcctgacatcgtctcgtttttacggaagagggcccctcacgatgtgcccatcagccccacctgaaatagcaagaaatcttcttcagcagagagcgaataacaaggatattaagataaagaacaggtgaagggggcagtcagctgaagcttgtaagggaattttcctcacgccggcacttaccccttgcttgctaatttttgtgttcaacgtgtttacatagacatgtgactgcaaagtccgaaagatcgtgtacagaatctctgaacggtaaccagagtgtctgtcaaggctctgtagtcattctctcgatagcttttgtggaggttatggcacgcccatctctccatgccagaaccacctggttccaaatgctttgcctttctgctgcttgaagttgatactataaacagtctgcccaacccgttttgtttcccactagcaggtgatccttaggatt

SEQ ID NO: 37230 - DNA, 625 bp, Homo sapiens
agaattccttcagacacaatgttaggaacaagtcccaggtttcccactgtctggtcaggtatctcccaaaagaccaagctcctaaagtgtgcagaaataaattaccacaacacaccccaaacctgaattttaagaaatttttggaaacatcataaaaatttgtagcttactacaaattttatgtaataaacaaaagattatggcttatctttgatacgtcgttctaaaataactcatttggaatttggtattttctaaggcactaaaattattcagccaattttcaagatagtattatattacctgctttagttgcatcattgtcagagtaaatagtgttacaaattgttcttcatattggcttacactcacaccagcaatctcagtgaggcacttcagagagacatttcgaaacattggaacattcaggaactatttaaaaggggggagggaaccataaaattaattggcctgatacacactttacttaaaattcacaattaaaaggaaaaaggctttaacaattaaatataggggtagatgtcaaaaacaggccaagtgaatgaacatattttatcatgcagatatactgagagggaattttattgcctacctagtatacagt

SEQ ID NO: 37231 - DNA, 3850 bp, Homo sapiens
caaaagatgagtcacctatgattgatatgatgtaaaaataatgtaaaactcaagaaattaggagttcaagaattggtccattattgacaaaactgatgagacttcaaaacgtttcgtagtaggcattaaacaaacgtttttaaacagcagaatacttgttacacaccacaaaaaaaccttaagatctaaatactgagaggaaatatatattccacaaatgaatgtgtaaactctcctccaccttcaagtaccataaaatttaaaagatcagaacaatcttaattatttgaggcttaaaagcaatgtccacaaagcaccaagatccatgtatcaaaagttttcaaatatttcggttaaatattgaacaaacttttcacctatttactaccatagttgaatgctaaaacaaaaaaggattaagaaaatgactcttacaagtttcattttcaaatacactgttcttataaaattctccgaactagactgatgtgaaaaacgagatttagaatagaaggatttaaatacagtagtttgccatccttagaactagcggctatcttcgaaatcacctacctattcctgaactgtacatagtacagaaatggcggctttgtggtcaatgccaagcacatttagtcccccaaatcaaaccgcttccaaaacattctttccactaacagcagtgtcccacacttaagatatacaatcagacagcaaacaagccatagtgcgagaggtgtaaccacgaacgctcattcccattgggctcttcaatcctaaaatccactcactggataacatacactagggattatccagcttaatggataatgtgactctacaagtgacacccaatgccaattcctaaacaaaacccagaaaatcataaccgttgcttaataacttcacactaggtgaaaaacaagtcgctacaaggcgaaagactgctccttaggttgtgtgggcaatcgcccgcttcattcaggaaaaacacacctcattagggcccgccctcccctcgcttcccacccgaaccgatttgcagcccttctaactatagcacacaggagcacgcactcaccccgcccttactcggaggaggcatttagaccaggcgccttaagttcaccgcccctttctctatgcagcatggcctcggcgtgatcagaggaggtccgggctgagccagtactgaatgcttcctctactacaccacttcctcccacccaacccaaactcacagacatcggaatgaaggagaatcagggcatcctccactgtacaaggccaacagtaaatggtttaaccaacttatcacattcaaacccctgaaaaggaactacaagacggaatcccatgtgcaggcccctgaaaaactgatctttcctacttcacatgccactctgcaaaaccggagagctttcgagtttccttgctggaggaacagggagtcggcagcccctccctcccccatcccaagctctccaccgagggggccacgtgatgcaggcggacgtttcaatgctgctgcactaaatatttctggaaacttccactcctaataatttacagagatgttcctgaaatcaccccaacttctccccagccccaggggctggggaacccctcccaccccgcgcggggccccgcttcactatcacactcctcgccttcctccaccgccacccgcacacgcgaatgacccagcaagcgctcccctcccgaggccgcctccccgcctccatcccccagcggcaaaagcggctccattcaatcgcaggctccgctgtgggcccgccgcgcccccggcccgcccgccgcctcccgggctcgcttcccgcggccgccgccgccgcgccccacgccggcctcctcccgcccgcccggccgcgccgccgcccgaccctcggccccgaagacacagtcgacttacccagagattgaaccaactgctccttccttcctcgttgggggattagggcgagggaaggtggggaggggggagaggggacgaatcaaggtgggtttcagttttcccacctcaaaaaaggaaattaaaaaaacggacaggaaaagggcaaaaagagctcaataatatttactatttcagggacgcttcccccaacacacacacacacacacacacacacacacacccgcccccccccaaaaggggaattaatctggggaataaatgctcccgcccggctggggagtgagggaagggggagggaacggggtcaagtcccaaagattcagccccagggggaccctccagccacaggcagcagcagaagcggcaggagtagggggtgtagagtccacacggccggggagacgctctgctgccagttgcagtccgactcccccctaccaaaacacggctccctctctcacgcggctccggcgctggcccccccccccccaaggctcgcctaaactttccccccttctcttgttcctcagcgactggtggttcccccctccccctctgggtggttgcacggactgcagcagcaaagactggaacaggcaccgccgccggggctgtagctactgttgctcttgctgatgctgtagctcccgctgctcctgccgcggccgctgcagccgcttctccccctcctcctagtgcctcaaactcggaaccggttgaaaccggttcagactgggagattccatctcggttgagttttcagcccatggcgccgcggagcgtttggaacctgggcctccgcccccagcccgccctcctattggtcagttccagctacagccgcgccatgagcctatctctcattggcccgagcgccagtcaatcccgcctcacggctccacacgagcccgccgcttcggcccctacctcttttcagcagcgatttgcccgcagagtgggggaggggaagtggggagggtcgaaaggcaagaggagaggggtggaggaggaggaggtgggacgaagagcagggatgagtagaaaagagagcgaaggaaagccgcgtggaggattcgttcgaacgagctgtcaatcaagagcagcccgccctcgagctctcgacttcccttccccctgcggccctctccctcccggtgcctagttcgcaggcccggcctttctcgcccgctcattggctgggcctcttcggtgacggagagggtggggcgcagctcgtgagctggtggcggcgcgagtttgatcggggcgcgcggcagcgttctctttgcttcccccggactcggccggcccgcccccaccggctcccgccaacctgcgggggcctgagcccgcgggaatcaggatccgcccttcggatgggggctgcgttcggaaaagggagggcacacccagttttgaactctggaaggggtggagaaaagagggaaaaagaacgcttccgaggccaattttaggccccagacctctctaatccattttagaggcctggttttggggccaggtagctgagagaggggttggggtgaggcgcagggcgtgcattcttggcgcctcgtgatcttctcagggtgtcggaaaagatatcgaaatacttcttgggaaagtctccttaaaatttcaactctgtctctccaggctggaatttggctgcttcaacaagcaacctttcctgaaaaccaaaacattgtaatcccaagtgattggtttgacagcgcatgttttggctggctgagcttgcatgccaactgcgtcccacctggtgcccttgatctgcaacactcagattttccttttaccctagctgcacttcacgtactaaatcatcatcaaatagtattttctgtgaaagtcacatgcacgttgcctttcacgtggttgcctctcgtttgttcc

SEQ ID NO: 37232 - DNA, 790 bp, Homo sapiens
gtagtagcatacttttatctgccatatcacctttttttggttatttcaatgtgtcatgattcctattctggtttctattgctgtatatgaaatgacttcaaatttagtggtgtaaaaaaataactctctttttatactcaaaccatgtgggttaggaatttgcgcagggcacagaggagatatcttgcctccgctccatggtgtcgtgtctggggcctcagctggaaagactcaaacgctggaggtgacttgactggctgggagttgtgatagtctgaaagtttcatgactcatctgcacacaggctgacctcagctggaactgttaccagagcacctacttacagcttctccatgtggcctgagggcttctttacaacatggttcttccagcttccacctgccacctagtcccaaagctaatgccacatgttttaggcttttcttacagcaacgtcccatttccaggtagtaacattatgattggtgcatcacaaaccacctcaaagttagtagtataaagcaatacccattctatttaacttatatgaatagagtgcaacagggagggtttgtcactgctccacagtgtttgagtcctcagaggagaagactcgaacacaaagaatgagtcatttggctgggggatgaagtcatctggaggcttctccattatgtatccagtgcctggaccagaatgtctcagacaataggctcagcttggtctgtaattggagcacccacatgtggtttgggcttctcacagaaaggctgctggtctgagatggagc

SEQ ID NO: 37233 - DNA, 1227 bp, Homo sapiens
ctctctttcccccactttttctttttttttcgacagggtcttgctctgtcacccaggttggagaagagtgacactatcacagttcactacagcctggacgtcctgggctcaagctatcctcccaccccagcttcatgagtatctgggattataggcatgtgccaccacacccagcctgaacccagcttttaaaagagatgtcaaaatatactaaacatatttaatggtctcccacagtacttttttttttttttttgagacggagtcttgctttgttgcccaggctggagtgcagtggctccatcttggctcactgcaacctccgcctcctgggttcaagaaattctagtgcctcagcctcctgagtagctaggattacaagtgcgtgccacctcgatggctaatttttgtatttttagtagagatgggtttcaccatgttggtcaggctggtcttgaactcctgacctcaagtgatccgcccgccttggccgcccaaagttctgggattacaggcgtgagccaccgcgcccagtctctcatggtactttttgctagacagtaatgatctgttcctggtgagctccctgtccttttaagtcacagctgactcaccagggcatgttgtcaatctttaggctaaccaatgacctttgccctgtgcctggtgcaatagcttctgccagtttgaagtggaggcggggtgaggagtaggggagaatgatgcagatgtgtattcatggcatattaatggaagagcatcaggaggaaagcccacagagccctgcagttgaaagcccctcagcagctttgagcccaacaccaccccctactccagccataggaagctcagggacagctcctcttggattaatttgagagcctctttattatgccttacaataaaacttctttatgttagctaactgcagtgaacctcaattccttacaaccaaaagagtctagagtaaaatggtctataagttctaaaacaccaaatataatggacacattttatgtttccagcccgcaacttccttctctgagaactgccccacttgaaggtatgaacaccaccaaaagctacaggcaaacaaaaaaagcactgtcaatatccattcatctaacaaatacctattgaatgcctactatatctatataccaaaattagagtagtttcaactatatgtgtgagtccaaatttgtgggggtggctatagcctccaat

SEQ ID NO: 37234 - DNA, 1451 bp, Homo sapiens
attgttgaagatttcaccttcgtctgatgtcttggtgggtatttatctgatggtgccataaaataagatttcaggtgaagaacgggtatgctttcgtttttgaaaagttggagaagagctattgtgaacatgggtgctttcccaagcaggctgattttaggaaagagaatacattgaagttgaggatcagatttccacaaagctatctataattgagcacctcttggaaagcattttgtactcccaacagcatgggaatccccagtttgaagaccactggggtagactcaaaaatggctaaccatgccttaagaaaatattgccatctagtggcaactactcaagacataggcataaagacctaaatggtcccttgaccctttgaaggacacctctgtgtgattcagccacaaggagcaaaatatctcatatttatattgtacgtttacttaacattactctttctatatatattgtgttatctaatattccaagcaagcccttaagatgcacatgctctttcctgttatagatgaggcatttgaggaacacagagagtaatttatccaagatcatatttccatttatttattccagatccatttatcaggcactattacatgactggcattattctaggcttgaagaaggggcatgggttatgggtgaactgaaagatgactaagacacatgtccttatgtcattcacaatctaatggggacacaaaactatgaatggggcaatcaggacttgtatcttggactgctaatgtgtatcagtgtcctcactgtaccatggtacagtaaacataaatgtcagactggtgctcgagtgatcctgggagtccttgcagtcacatgaagccagtatcagaggagtgtggtgtccaagcaaaatgagtcactgaattaaaatgtcatttgaacagagtgcctgcccttccctccccttctaatctgttgcttgtaatttgctgttggcttggaaacccaataaggaaatttattaaaagagtatttaagatgaaagaaaattatctgaatgaaaatcccagaagctccccgatgagtgttgtatatgagctttggagcataaacttgacttctgctttggccattcttgggactttcttaagatggcctgtctctgagctgaggccaggtagctgagttaggcagtgagctgtgagtgggcagtgttatgttcgaatcgataatcgtgctgtaacgggcacaacatgttaggaaagacccacattctcaagacatgttggcctccccagcctcaccttcaggatctttcccaactctgtgcactgcagaaattgatgttctttctgttttttgaacattccaagttcttgcctaactcaggcctttgtaatatttctccttctcctttactcttcacatgcctggctctttatctttcaggattcagcttaaatgtc

SEQ ID NO: 37235 - DNA, 2493 bp, Homo sapiens
acagagactttttctgactgtgtaagtgagaaattattctggcgtttagtcagccagattagaaagagctctagattaggagtctagattagctgagatacctagttcttattccagcgctgctctcaaacaacctgctagatcgttaggagcctttctgagcctctgggacttcttttttttttttgagatggagttttgcttttgtcgcccaggctggagtgcagtggcgccatcttggctcactgcaacctccaactaccaggttcaagtgattctcctgcctcagcctcctgagtagctgtgattacaggctctcaccaccatgcctggataatttttttgtatttttagtagagacagggtttcaccatgttggccaggcttgtctcgaactcctgacctcaggtgatccacctgcctcggcctctcaaactattgggattacaggtgtgagccaccacgcccagccaacctctgggactccttatattgggcgagaagattgaatttaaaagactactaataattgctactagtgggatagccagtggtgcttttgtgaaagcacatttagtatctaagaatggcataagtagctgtgaacatgaagaactggttaatacattcattgctgtggctagtacagtcttgagatcattacagggaagtggatgctaaaatacaaagttcacatttcatgaacttgaatcatgattgctctttggctgagcaattcaaaaggctctctcagaacaggttcagtaaagcccacttatatttaatgctgctggagaagaaaagtgaaatgtcatgaaagatatactgaaattaacccaaggcagaccctttgctatttgcaggtctatagtaggaccattttacttactagctttgttctgtgaccttataagtgtctcttgagcttccagcactcgatttttccctcagatacatttcccctgtactgcttatcttgtaaaattaactactgtgtaacagatgtatgagccaaagctaattttatgagaaacttgagtgaaaggaaatcaatctttcaaggtccctgaagtcctaagatcataaagaaaaggctaaagaagtagtttctggctttttgcttttgatttccttcttagtttcagttttctttttctgaatctctctccccagatcttccctggcatatatagatgctcataaacaaaacaatgacaaacactgggctgttagaaaggtcacagccctggctgccaaaagacacagtcaggcttgcttgttagtggaaatttacaaatgataatgcgctgccacttttgctttaagagctactcccacttggggacctgaaactgtagtctccaacacagcaaaaattgactaattatttgatttaccgggaggagccctactgatcaagttcatttacagttattagttcattctacacactgtcacagtttacttttggcaaccacagaaacttagtactttcaagtggcaaaaattatattattgttgagttacaaaatcatgggctatccccattaccgtaaacctaatcttaactcatgctgaagtttaaaattctaaattgttttcagttttcctcctggttatgagattttgtgtgtgtatgtgttatgtaaaacacaaatctaatgactgttttgaaaagatctaggcaaagggtcatgacaacaattcagctatttagcacaactctctgtaaacaaatcaccagagaaaggcttaaagtgaagtaataattccggctcattgtcagtgaataaacaccagacagctatagacatgtttaatgcattcctgcactctcttcaaatacaaattaatacaaaatagcattttgtgacttgaagtaattgcccacatggctgagctgtgtatctccaggagctgaataatttaagcgtggatttatgtatggaacatgcaatgctctgaataaatattttgaaatgaacatttatttcacagaagaggcaaggaaagtggagaataaatgctggcaagggagacactagacacaagtgacaatagtgcaagccaaactgtgctctgctagaggtgtaaacaaactaccgcctcagcaccaaggagggacaatttaattcagatgggagcacaagcatcccagagaaagggaagtcatgcctgggcttcccgggaagatgagtattattttgattaatacaggaggagggaagacattccagtgagaggaatggtggagggagtgaaatagaacgaaaagcatcacctaggataattctgggtgagggaagggtggatgggaatggtagaggtgaaattgtggggctaggggctcattttgaagagccttgaatgttgtcctaaaaagcatgaatccattaaagaaaaaaaattttcttgatgacatttttgtatcattttttaaattgaaaaataaataaggctgggtgcagtggctcatgcctgcaatcccagcac

SEQ ID NO: 37236 - DNA, 631 bp, Homo sapiens
caattaatcttcatttgtaaattaaacttaagaatcatttttcaattgcataagtttgaatcaaaaaatttttaaataaaaaggtattgaacatctactttatgtaaaacaaagggccagtatactttgtaaaatggaccatgttaccaacccacaggtaatgttccatcttagaaatctgtgacaggcaaaaatgtcccagttgtttttatttaaagactaattattaacttgatgctgttctattgggaaacttgtctgtttctacatggtgttttgtttcttcaattttctactagagtatttgccttgttttaaatccttcattgatgtatgactccactgatacaactgccaatggaaggtgttcatttaacttatttaaatagttggaacacaactgagttgtctgagaggatttcctaaattgcttcataaacatgttcaaaggacttattttttttcttctcaagtattaggcagataccaaatataaagctatattgcttagtgtgtcaaaactccatgctgtaattactaacttgttttcctacttgcaagttaaaaaggtcttttaaaaggcacaaattctaacagctctaggtagcatttatttttgtcaaaatgacat

SEQ ID NO: 37237 - DNA, 820 bp, Homo sapiens
gacaacgaatcttcctcaaaaattttactgccccctcatgtccttgctccctgatttttcttcagttaggcactccgtaattcagcagcattcttttctttccacaatttatctccctactccccttctcatcacttgggtccggccggtgagcaaggaggaagaaacccaaagggatcttcagggtccgcgccccgcaaaaggtctcacagcagagacgtacaggagaggtgacccaacccccggacctggatggggcccttatgggaaaaaccccgtgtttgcttcaggccattctatgcggcatccacgaggtctgtgggccagcggcacggcgcggccctgtcccccaaaaaggaggagaggcaggaggaagaggaagtggccgtacaggccgaagccttgtggagcctcagtgcggggcttggccaggtcctagggggcgtggcctcggaggcgaaagcgcagggcggggccgaggtgtaggaaccgggaggggcctcgtggggggaggagactcgtgggggcggggcccaagggaggcggggtggggcggggccgcggccagaggaagcccctcccggtttcccttgacagggtcacctgcctgcaagccacctgcgctccccttcctctcccacagcctacatgaccagtgtgggtcgccagcctgagcgagggtgctcaggtggtttctactctcattttcactttccagtgccgctgccgacttggaggggagaaaggggcggggcaaaccctggtttcgcccccccgccctcaggctggctgccacgcgggggcgcagtcagggggtctg

SEQ ID NO: 37238 - DNA, 762 bp, Homo sapiens
acacattacacaagaaaaataacaaacgtaacaacaaaaagaataatacaaaatgaaaggcaagaaattaagtaatacattttacaaatattttcatggggaactattgaaaatttattgaaaacaacatgttttccaagaatttagaatggaaaagttgttccacctgcagctttctgattgagtagctggatgctgtgatctttcactcagttaccccctcttcatcctggttgatttccagctttcaataaagcttttcacctgacgcaggataatagcgagtgcatgtgtgctggtttgtttactgtgagtctctcagaggaaatcatgtgcatctgtctgtttacttttccgtggaacctagaaggtcacctctaaaaataatcttgctcggtgttagagtttctgtgacacagaggtacatacctcacatgctctccacagttagtgcgctaagccaggcatatctagttcccaaatgactcagatcagagaaggaggggaaggcagctgccagctaagatgtctagtgactgatttaagagcagatgcagaggaagccctttacaaaatgggacacactcatggctgcctttctagatcagtgatgttgaacttttaaatatgtttattggctttttgtatttcttctttgtaagtttccaaaggaaatattaggagaatttctgaaccagagcccatgctatggctatttgactttgcagtagacacatttggatgccttttcactacctcctt

SEQ ID NO: 37239 - DNA, 1960 bp, Homo sapiens
atataagaatattcatctaggattgtagacctgaaaagctgtcaatacctgaaaagtccaacaacttagggactggttgaacaaattatgatatccatacagccattaaaaatgattctgtaggctggacccggtggttcatgcccacagtcccagcactttgggagcctgaggtgggagtatcacttgagcccgggaggtcaagaccagcctgggcaacaaccccatctcttagaaaaaatatatatatataaatataaatatatatgtaattattttaatttacctgcaaagacattactgggagataacgcgcttacgtttttctgttttaaaaaaccaaacacctttacgtgtatgtatgaaaattctaaatttatgtagcaatatgttaatagtattatccactgtggcaagaatgagagtttaagtttcttttataaacatgtatgtactctcgaactactgctgctattacagggagcaggcattttttaaaagcactattcttcttacagtcaggaaatacaggacactattacttcgcgggggaagacgggcactgggaagagtccacgccggcgaaggcaggcgaagacagggctcgctgacgcccccggtcgcccgcgcctcttcccacagctctccgaggagcccagctaccggaaacacgccacatcaggcctcggaattctgggcatcggacggacagctcgtgacctcagaaggaggaaaacggtcaccttctgaaagaaacacgaactcctctttcctgtatcagaacatttctcattcacctgagcgcggcgtttctatcctgagatgttgggaggaggttcgaggtgggcggggtgacggttttctcttggaaatgaaaaacagcctttcctgctacccctgcccgctcacacaggcgagacttggagtctgccccgcggaaagccgtttctatgggtgacgacgtatggcaacgcgtctaagggaacgtcggcgagtcgactattgtgttcccaaagtcgccctgaaatgaggacagaagttcgggggagccgggggcgtagagtaaaggcacgatctgattggcccgcggccgcgcaacgatgggcgggacggggcagaagtgtgggcgagctggggcgtcaccgcgcgccgggtagtctctctcacgccctggcgggtgcgcaggtctctaaactgggcggagcaagggaagtgatgtgtggcctccggaaggacgcgcgtaaatcctcacccataagtaacgagtcgccgtggtcaaacaaggccctcctacgataccaatcgcgtggcgggtgtggtactgccgaacccgaggaatgagaaaggaggcccggcagaaagttcggatcagctgccggccgttcccggcgtagcctagggcggggagggattgactccccggaacatcccggggtaaagacctcgcataacagcgaaaccgctgagggactgttgtgtggcgaggccttggagacagacaggcccacacactccctttcctcgtgagggtcaccgacctgcctacttgggaacgacatagacctgacagttgtgtttgggggtggaggttgatgaccagttattgaatgaatcgcagagacatttgcgtaggagtgttgatgcaagattttcttctttttttttttttttttgagatggagtctcgctgtctcccaggctgcagtgtagtggcaggatctcggcttacaacaacctccgcctcccgggttcaagcgattctcctgcctcagcctcccgagtagctgggactacaggcgcacgccaccacgcccggttgatttttgtatttttagcagagacggggtttcaccgtgttggccaggctgttctggaactcctgacctcaggtgatccgcccacctcggcctcccaaagtgctgggattacaggcgtgagccaccgcgcccggcccccctct

SEQ ID NO: 37240 - DNA, 2027 bp, Homo sapiens
cgagatgctggagagtagagagtaaaattctatactttgcacttgccagaagcagagtaacataaatgttgtctaggaagcttttacaacagactggtgaaaattaaaacacttttcaacgcctcgatttagagtaattttcgtgagcgtagagaaggggctgggccaggaccaccaagtagggactatgtgcacagggacccgcgtttaccagcctgccctcagctgggcggggaaccggacagccctcagcctgcacccagcccatgcgaggtcccagcccaagtcccgccccagtattaccgatgccccagcgggctgagccactttctcctcctcttcgtcctccaagatcgcctccgctgccgccagggcctttaaggggtcttcgcgttcgtactgggcgacccgcgctccagtgatgggatttaccggggtctggagactggaggccaccagcttcgccactcggtgggaggtggccatcgccccgcctccgaggcctgagcgcctgcgctggcccgggacgggaaagctggtgcggcccctggcaacccgggggcgcctagctagggagccggttgctatgggcgccgtaactggggacgctacaggagccgccagggaccaaaagtcacgcaaaatccactcaggctgccagagacccgagtcgggtgcttactggatcatggcagtcagtaccgagtctgttggctggttccgaaggttggcaggctgaacagggcacttattccactcctttgcgtctaaccgcctgaacgcagacttctcacattatacaatgaaacaactgcttttgtgaagaaaagaacgcttttttattaactgcaataacatgttagaaggagacagttgatggaggagacggcggcggcggaggaaagcagggcgtgttactgggtggcggtctcagaagagtgacaaggttggcgtcccgctacctaacatgtctcccgcgggggccagagtgggaaggagggcggtacattctactctgattgacttgagggctagcaggaatccaccaatcagaaggaggctcccagttgtccctctcgcttttttcttgacatgaccaataaaagcccagagttgggtggcgcctgaccctcccactaatgagtgatagtgcaggtattgtaaacctggcgtttgctttgggttcttcagcttgagagtgacaggattgaacggcacaagtgcccaagagtcaccacagacacatccatctccctcatccgtatcttctcttcccactcgggatttggacgcatcaaatggcgccttccctctgcaccacgtggcagtaagagaagccaaacctcaaaatagcggacgtggtgcagtctcagacatctgctccctgagcccctgcttactgaggccgaggctgccgccccctatctactccctatctaccccctctctatcctttgccctcctcctgctccccagccctacgaccggccccctccggtcagtattttcctcgttatgcgctgcacatcgtcgagaacccgtctctaaggtctgagcccttaccaaacctttgttctcctgtctgggtgtgagcacctacaaagtctcctacgtccccacttccttcaggctgctcttggttttagctgaacagttgcttcccatgctggaacagatgctgactgggttctaagcagaagccagagccagaaccatgagatatgcaccgccaggtgtggccaagtttccaggggagcaatttccagtcagacacggcagccagttttgtggctacaaaactgcctcagcctccggagtagctgggattacaggcgcactcccgggaggcggaggttgcagtgagccgggatggcgccactgcactccagcctgggcaataaagcaagactccgtctcaccaccaccaccaccaacaaaagtattgataaggaattatagcagatgaattataaataatgaaatatcctattctctttactgtaaattcctcatagacaattgcttct

SEQ ID NO: 37241 - DNA, 2050 bp, Homo sapiens
agcgttacctatcttagcgccatcacattcccagttacttgggctgatgactgcaaacacatgtaaggtgtactttatatacgtgggtctttatatgctttctcactgaatcctcacagcaagcctacacgatggctaaaaagaaatgatcccatagctgggggagattaagccaaatactttccaggacaccaggcctttaacatctgccccaacctagctttctaatctcacctcttctgtaaacatactactattctccaacccaaaagaactactatactcaatatacactcgggcaagatctctaaacctctgtcctgacttttccttccagatttttctatttcaactcgatttctcttaatcttaactctaaaaagcaaacattttcctccaattttataagtgaatctttggcacagaggttacaggtcactaagacatgaagtaacggaagcagagaatgaaactctggtcttcctgatttccaacgtgtgccacacacttccacaaaaaaaacaaataattgtttcttgatttgcctatgtttcactgcacatgcggagacgacatcaacgtaacttttccgcaactatttcaaacacgacacgtaagtcggttcccacatccatcccagtacaatgggccccgccccaatttagactcggagagttcacccaattcgtctcaacagttgtgccaagtgaagtttatttaatagttctttaaataagaataacaaagctgaaagatactgtgcattctaccagttccaataagcaataagcgacagccctcaagcgtcagatccctagtgaagactgcatgcaatcctcggcattttgaactgctttcggctccaatatgaatgatgcacagtgcaggatgaaaaactaagggagattaagatgcaaaatggggcaagtccaaaggcctccatactccgggttggcgatcatcggcagaaaaacagaaataaggatccctccactgggctgcttctatagggaggacaagagaggatcacccgaagaaatgggaaatgagccaaacccgctcaagcccacgatgagagcgcagagcacaaccccgcggcgccgcgggtcaggccatgagagtgatacctttggcggcggaaatgttgctgaagcggatctgggctggcttgtcgcggtcctgataggcgcctttcccgcggccgccggcagccccggcagtcgccccgctccggggtgccacattctcgggcatggcaaactccgctgtgtctgggttggctcgggaaggacggatggacccggattctggccggccgcagtgtaataacggtaagccctcactgccttcacgaaccttccagaaagcggcgccggcgtcgggaggaggcggaggcggagaagggggccttccttgccgcgcggcgctggcgtgacgtaggaggctgtccgctgcgcgccgggcgaggaggatgcgtgcggtgggctccgggctggcgagattgtacgcccggggcgctgtgggtgaagagcgccgggggaacctttacgcgaggcagcaatgacaacgcgcgattttaaaggcgagtggtgaggacatccgcatttcctcactccaccttgcacggctatgaggtcccctcctttttttttttttttttttctttttttggatacagtctcactctgttgcccaggctggagtgcagtggcgcaaaatctcggctcactgcagcctccgcctcccaggttcaagcgatcctcctcagcctcccgagtagctgggattacaggcgtccgccaccatgcccagctaatttttgtatttttagtagagacagggtttcaccatgttggccaggccggtctcgaactcccgacctcaggtgatccacccgcctcgggctcccaaagtgttgggattacaggcgtcagccacgaagcccggccttttttttttttttttttttttttgacagagtctcgctctgtcgtccaggcgggagtgcagtggggcgatcttggctcactgcagcctcgacctccggggc

SEQ ID NO: 37242 - DNA, 1755 bp, Homo sapiens
aggtcattaaattgatttttcaattgagatattcacatactgtgaaactaatcttttaaagtgtacaattcagtgggttttagtatattaacaaggttgtgcttccacttccggaatgttttcatcatgccccaaagaaactctgtacctataaacagtcactacccattcgtccccttctccagattctgccaactattacattactttcagtctccatggatttgtctatcctggacatttcatataaatggatgtccaatatttggccttttatatctggcttcttttactaatcctgtttttaagtctcattcacgttgtagcatgtatcagtactttattccattttatggctgaataatatattgattttaaaaaattatatgggtgggaagttatattagctatgcatttcatttcaggatagtaaataaggtgttaaaatatttgtcatataaaagaacattggatcagagccactgatctagctggaaagacaagtgtatataaaaaggcaattaacaacccaaagaaaaacattatgtaatcaggagatagttaaacttcctgaaaaaaaggatgacaggtaaggattaggcagagattaaatctgagtgatcgatcctattcagttaatgggttggcaagtcctggaatgagatacagccatctaaaaattaaactgccaaacttataggctgctaccccatctccagtaatctctgcgagcaatctttctttccagtaggctctgcagtgatgaaggggatcaggggaagcaaagtgaccctactggaaccaaacggatatttccgtggaggtatcctaaggggatgggtgttgcagagcaaagctgtaagctgccaactctgacccctggggaagccttgcctccaggttccccgaggttccccgtggtggttttgcacaggctatttaggcacatctcggccgccgtggcggggcacggctcagctgttgcggggcggggccttcgcagagcatggcggcgggcgagcttgagggtggcaaacccctgagcgggctgctgaatgcgctggcccaggacactttccacgggtaccccggcatcacagaggagctgctacggagccagctatatccagaggtgccacccgaggagttccgcccctttctggcaaagatgagggggattcttaaggtactgctcttttctgtagtctccggcttggagcagaaccccttggccgctggcttcagactctcccccccttgccttcccctgtcctcacaagccgaaaggcttttccctctcagacctccactccgtgggctccacatcgggctccttcagatttgctcgttctgtcgccccttctctctttcctaagggggactttttctgctgaagttcccagtcccccggtagactgacacccacaggggtttttccttcaagacatttctgtctcttggtaacagtcgcgtttcctcagcagatctgtgggatctggtgtttttaaaattaagagttttaggtcgctagctttccccggttgtggaagttgggagcgttaaaatgagccagtgtctgctggataaggggtggcttagcccgagtgacatctgtcaagcagtccactgcgtggttaaaagagcataattaccagcttgaagtcaaagtatagactagatcgtccaatagaaatatgtgagccaaaaaggtgaaattaatattttagtaatatatcttatttaatccagaatagc

SEQ ID NO: 37243 - DNA, 563 bp, Homo sapiens
atcattgtttcttatgatgtgccctttcttatgtatactatacccaataaaatgatttaaagaggaggagagaaaaagatgagtgtctttgcagattcattgaccctgtgagaatagggctttggcactgctgaagtcctcagcctctgactagtagcttgccagcacgcagcccctggtgttggacttcgttcagctgttcaggctgtctgtttctattcttgcagacagatggggtgcttgagaggaagccaggaagccaagccttaagaggacttggaagcaatttttggatataaatcccttgtcctaaactcagggcaacagtgtatcctgcccagcagtgttgaactgcctgtgtttgtctagtatgtgtgtactggctggttggctctgggcttcattccatgtatgccactgctctattgccaagataaatgtagaaggcctctggcccaagcccttctttagtacttaaaaaaaaaaaattgtggtaaaatacacataacaaaattttaccattttaacctttttttttttttttttttttttttttttttttt

SEQ ID NO: 37244 - DNA, 2864 bp, Homo sapiens
caggcttacctgggggcctcagaattgtgtcagctgcgtctctgagtcaccttggaacccctcgaaggagcgcggggctaggagggcgcatcggtgggcccggggaccccgctgctaggtgtggttggcgccaaggccgcctctggccggcggagccctgcagtgtccggagggtgcggtcagagtccggccctttaggccttgcctcggtatccgccttgccccttgggccgcggcacgggttcgggccgagcgcccggcatcttgcgtttctggcttcctgagacgggcgtgggacctcgaggaaaccactctgcatgaccccacgaagagaactaaggaccaccccccacccttcctgtcctggacggcttcataagccagaggatccagtggcagtaccaagcagggcaccactctgggtcgtgagcacctaagaggtggagcaaaggtcagaccccagggtggcccaggcctccctcccccgcctccccggcggggccattcctcacccgccccagcactggagggggcggccggggtcggtctagttccggttacaaactggacagaaaaggccactggagtctcgctaggcgatgcgcctagtcccctagcctcagacgaaccgcaagaggggccacccacaactggaggggcggaggctggagctgagtttcattagtgtttttggagctgccaggcatttccaggggggtcgccttcctagaggccccctttccccagcttaaccctcggctttgcaggagggtgcgtgggggctggagggtccctggaagccgcagggagcgcgggcccgggtgggtcctggtaccgggtggggagagcggaaccctcccaaaacttggggcgcggggcggggccgtcgggcggtgacgtgaggggcggggccgggccccattggcgggcgggcaggggaggggcggggccgggcgcccgcggcggctgctgcgcctggaaccggagcctggagtgaggcgcagcggcagcggcagcagcggcaacaagtgccggaggctagcagagccaagccggagcagtccctgccgccgacaccgccgggccgcccgtccggggcgccgcgcatggagcgtgagctgcggcggtcgccgggctgagccgcgcggagcggccgggacgtggatgtggccgcgatctcccgcccttgcccccgccccgccgagctggagctgctcccggacaaggtagggcccgggcgccgagcacccccgccggctccctccccgctgccctctcaccgccaggcccctctaccagtccccttccgcctccctgcttcccggccccaccttccggacaccctgctacccccgcccggttcctcgccggttccggcttcgtacccgcgccccggtggaggaagccgtccctaggtggctcctgccgcatttaagcctcccttaccttcccgccgtcccagccacccaacctcagcccagagggagaggagagggacaccgcccgctgcggggctttggaacctcccaacccattccgtgcccacctcgccctggagcccggggaccttccccctcctcgctgcaccccaacttccgggggatccggcgccggggcgatgcgggctttggcaaggggcatctggggccgggcctcctcatccggggcgcgcgggcatttcggggaggggggcgcgcgtgattcctcgctcgcacccccgcaccccaccctcgcactgcgccggcctcccgtgccgcatggggagatcaggtgttttgtgagccaaagagccgccggcagccgctccccaccccccacccccaacctctgccacttctgtctccggctcccccaaaactggtttctgccaaacttagggaaaacctttcgctttgaccttttaaaaaaaatattccacactgtttgcgttgaatgattaaccaggctgctagcccgagtcgtgggggtggggtggggcggggtggggtgggtgctgccaggccagggagcgcctgaagccggactctacgagacacccctcgtgggaaggtgggcgtggggggccctgccggggctgcgggcgcgggactggcggctactccagcacggcaggcggacccttctggaggcaataaaccgagtcacccggttaatttccaggccacggtatttgaaactcggggctggggagccgcagaactccctgtacccccatcaagtagaggagccgtcgggagactccccacaagtgtcacagcgtcaaagctcatctttaaaaatatgtacatttataacctgggttggcgaggcggcgctcttctgcccaaaacgtaggggtggttagtttgtagagtgggcttagctcacaggtgcctgagctgtatccccgtggccgcctcagccaccccaacttctcagaaagattgtttagaacaattaaactatattcttttgcccttctcttgttggaaccctaccgtaatatccgatagcgaagccagttggtgaatatagaattctacttgttaaaacaaattcttccggtataattatttgtgcctctggaggtggtaaacgaggtggccgacagggccgggactgggagtgaaaaggcggggaccctggccgagccagtcccggggctccggtgccggcttatagtcgcacccatgcggatctgacagctgacccggagggaggaccggcagggcagggcagggcggtcacttcccattgtcctaactcctgctcctggttcttttgagtagagggtggttaagcctggaggaatttgggagagttttactcggagcccatgcgctcttaaaccagattagattttaagaacacagaagtgaaggagc

SEQ ID NO: 37245 - DNA, 488 bp, Homo sapiens
gcaatcctctcaccctggcttcctaaagtgttggggttacaggcgtgagccatggcacccagcccatagcttccgattaatagaacggtgggacagtaggaaaatgggcgcccttgaaaaccatggttttgcatgggagaaaaaaaaattaaaaacagcctcttagctaagaaactaaggtcttgagaaattggcttccccggggtcataaagtccacgtgagtcactgtctgttttcacagcttggtaatctttcccatgttccagtacaatgtgtagaagaaactagaactagaaggcctgggcgcaagccctgactccatcacttgctggctgggaacctgggactctcaaagcctcattttttctcattttcttttaggggagagatgagtgggggctgcattttgcccagagcctagcctgtagagtcactaatgttacttaagatagtacactgcctcccatatctgatggttgactcgtag

SEQ ID NO: 37246 - DNA, 599 bp, Homo sapiens
atctccaggtaaatcgtgattgaacagctggcatctgctgtggaattgcttgcttgcctgcttattggtagagagaaatccccacacatctgatcacccaggttttctgggctgatggttgtggtgtgagagcagaggaaaaacagtgtgtttttcattcatccctagtgaaaagaagactagctctggagcactctcagatcaaagcgatctcgttatgtatcagtggcatgccctggctttcgaaaagttgaggttatgtaagaggtattttccctgcctcttatccaggaggttctgtctgagtgccaaagtcagcaaagcagtcctctaggctcttcccactgaagaggtagagaaactttctgtcactttgaaactgaaagttgcctaatctggggtcctttaaggactgctgtctcctctatattcccagatttctcctggctgttgtccagggctctcctcatttctctgaaggccctgagctgcctgccacctgccagagtccctgctacctggcgattacatttgtcaaggcagaaggcttcttgcctcctccgtgtgagccccaccacagcagcagccccgtaagaagc

SEQ ID NO: 37247 - DNA, 834 bp, Homo sapiens
ccgggtctgggagtagaggcacctggggcacaggattgggagtgaagcatgagaagggcatggaggagggagggcaatgagagcttcccttccttgaagtgtgcccggtgaggtgtgaatccagcaacccagggcagggattggacggctgccagagaacagtaaccagaggagctgcacgatacctgccctccctgtgggcgtgggaagcaggctggggcaggctgaaggtcaggcaggatgcccccactggtgggtggctgaggagggtcttctggttggcagcactgtcggcctagcactgtggggaggcagccagggaaacagaaaccacagttcacagccctgacgcaggccctgggcccactggctggagaggcctgaattattaacctcgggagaggccagctggcacgaaggccaaggggactgaattgactcctcccagctccgttcagtcacctaggaggtgaagaattcagcaagccctggttctggttgccccagtgtgaccagcactgtaaacagggcgcctggctggtctggcacaggctgcagccagggccgttcgcgccccgcctcctaccagctcctcctggatttctcagggctgtggccttttgtttacaggctcccgcctcaccttcctctcccagcccggagcctctctgctgagcacatgtttagcattccctcagggcggctttgcttttccccttcccacaaaagaagaccctgcagctgcagacatgctgtggtttccggagccttggctgtcatggggccagtcaccagggtccacctgcactcagatgctgtcctgggggaactggc

SEQ ID NO: 37248 - DNA, 1244 bp, Homo sapiens
cctaaaaggcaaatcccttccctcgtgtacttcacagtctaatcaggagatagactggataaactacagagtatctgagttgatatgctctacgaataacaatcagataaaggggataaatagggctttgtgtatgcacatgtatgtgataaggcttcaaaaggtggtgaaggaaggcctccttgagaagatgatgagggacagccatgtagccctcgagggaacaggcttctggatggtgctgaggccctgcagcagggttgtgtgtggtgtgttcaaggaacaggtggaggtcagcaacagaggggaagagccgcagaggagcctttgggacaccctgggagactgtccagaacagcctatttcttctgtctttagatgtgaatgagtgtgagacaggcctaaagctctgtggtgatcctcgctgccaagaggactgaagtccatgcccccacgcagcctggcatgctgtatgtgcatgctccctgcccaggtatcggttgcccaggcaccctgccactggctgtgtttatcaactgctgggatctcctggaaaccctgtaccctgagcaggtcagggtggagctcttattctgatgcctttggccacaaataccagagaaaacattttccgaaggatacggacaaagtccaggaactgttctagaacttggaacatgttataaggtcgtttactatgaggatgttcattgtactgatttttctttcgcaactttgcctttggaatacttccataggatgctattcctgactctgatcaaagtagacgtgagtaggaattaacctgaacatccagttgtttccccaaggctccttcgtgacccttgcttttgtcttgctttttttcttcttatcaaagattatattgggcagggacttgcaccggaaaatcgatgtgagctccttgtgagcgggtccagcatagagcagttggtaatgaattaacagatgcccttagcctttttaaggacttactgctggtgatggtaattcatttggtacagttacctctgaaataatgtaacctgcctgtgctgccacaggcagatcaatagacatgatttttatttcccatcttgctaacttgctgtgtgaccttggtgctcaggtcttgcatatccctgtgaaacaaaggattagactagatgtcgaaggctttgtttagatctttgaatgttagatgctgaaatcccagcaaagatgccatttagcacaatcttttt

SEQ ID NO: 37249 - DNA, 2800 bp, Homo sapiens
caagtgctgagtacaagagtcagagagtaaagggtcatgtattagcgtcctgtggctgctgtaacaaattgccacaaacttggtggctgaaagcaacacacatttattctctttcagttctgcagatcagaaatctgaaatcagtttcactgggccaaaattaaggggtaagcagagcctgcaggggctctacatttccttgccctttctagcatccagagctgcagtgtttgcattctttggctcttggcctcttacccatcttcaaagccagcagcatagcatttccaaatctctctctctgtctgcttcctttgtcatatggctttgtttgtcttctgtagtaaaatcttcctctgcctctcttttagaaggacccttgtgattacatttaagatccatctgaataatccgggataatctccccactcaagggctttcagtcacaccagcaaagtccgttttgccatgtagggtaatattcacaggttccaggggttaggacctggctgtctttgggggccatcattcagcccacccagtcagtaacctgtgaaatgcacgtggccccatcagctcatggttcggggttggctggtcttgaggaagacatcaggctgaaggaagtcttctggaggtaggccctggagggagaccagagccagtcatgctagagacctctcacctctttcttctgactcatctcctttctagaaactatgatatgaggcgtttgatagcacgtgtgagcctggaggtgctgaggcagctagcactgttaccagggtggcggcggggacaggaccagaacttggggcctcgcgcccaggtcctcccgtccttgccttctcccagctcccctccaggctaaccacctccacgcgggggccgggtgctgctgctgccctgagagctcagcccctttcccggggcgggcaccgcttcccggtcccgggcctctctgctctcccgaggcgatagccaccctgcgatctctcgcgcggccagcaggggccagcatcccccgcggaaagggtcgctgggctgggctggccgagagccggggatcggcgaccccgggcgccgctgccaagccccctgccgtgcgggctgctgcttcgccgtcccagccccgcagccttttgtgtctttccacttctcccctggcccgctgcgctctcgctctagagaaggcagagactgccttgggtgtggcagccaggagtggacggttgcgggctgggaggctggccgggtttcctccccgtcgcggacctggaggaagggctgggtgcggcgggaaggccccggagggagagctgagcctgggttggtagcatggtgaggaatagcggcctcaggggcagagatgtccgtttctttgtgcaccgaaagctctgagaaggacatcccgataccagtgaacttctagatttggaatgagcttcttaccgagcatctcacattccaaagtgcatctgattcggaagtcctcgtggttctaccttcggaaggtgggggtggggtgggctgcctgggtgcagagggctgagccaggctggtgggaactcctcagcgtccagcacctgtggggctgcagcaagcttttgctgctaggctctaaacgaagcctgtaattaaggccttagtttaactgggtgcgctctcacttttatctgtggcctggcctgagcggttgcctccagcagcctcagctaccctcactgctttgccgctgaacccaggaacggctattccactgcaagggagctaagaccttcatttgttgcaccaacgttttcctcatggcttatgtctctagcctcagagaaatcagagattagagcccagatctggggtcagaaaaagacccgggtgttagatctgactttgctactagctgggtggcagaagatgggggaacacttcgctcctttctacctgtttcctccccttgttaaatgcggaggctaatgacacttactgcagatggggaagctaacagcacttactgcagagggtgttgtgaggaatcactcagcaaattcttgtaaagggccaaggttagaactcaagccttttaaaatcccatctcttagtctgggcggatcccaggaaggtgtcaagtccagctgatgggcataggtgtgtccgtgaggcaagcctgctcttgatggagcacgacaggaaatgcagcctggcccagctgacagacctatctacagcgcatgtcctcacaggaccagacccttctgctccccttggctccagctcctagatcattctcagcagttcattccacgtgtaagtgcacgccctcagttactgtaggagccagaccacgtgggttcaatgtcagcccaagatccaccagccatgaggctttgggaaagtcacttcacctctgtagggactgatttccccatctgcaaaatgggcagagcgtgacccatctcgaagcattgtggtaacgcatggggtgctgctgaatgggactcattgcactctgcaacctggctctggcgattcagaccgtgaatgcttggattttgatggtaaggccagaaaatgtttaaaggagagaacccaggataagttgggccttctggtgaggttcttgctactcctggacagcgtgcccgtgtctgtagcaactcagggcgaggcaatgctctggggttcccagacatctgtgagcgtgacagctggtccaaagctgtcttggatgtgtttgtcctctctaatcaaaagagtccctcgtgatgccaagatggaactctgcagacagtttgaggagaaa

SEQ ID NO: 37250 - DNA, 2940 bp, Homo sapiens
atttttatccactgtatgtataaaaggttgctcagaggctatcagataaacttaagaacaggcattttagtcctgaaggtcgcattttttcccagtcattatttttataaatagtgaaataaactctgagataaagtccttttaatatgggctgcacatgtcccctccttagcacttttgtctccagacaaaaccttttgaactggaacccttgcctcattcaatgctattttcgatttgatgaacacctgctgtgtgccaggcactccggagaacaaaggtggaacagcccctacttctgtctagtgcaggagatggacattcaaatggctggctaacaaggttgtagaggaaaaagcaggtgattgtggctggggagatgaggacagattttggaggaaggaacccttgaaagatggggatttggaaggcccatacccagtgagacagactgggacccagagctataacttacagagtgtgtgtgccttcccacagaggaactgagtcctgggctctctggccagcctcttgggctcctgtgacgtttcttcaacttgtccatcttctggaatttgagaaaacacaaagtgcttttagggttcaggtcctgaactctgctccctgattaccaatatgttcaaatgagctttggcttggttgggatttaacgtaaacaggccaggccaaggaacgggggttggagatgagtgggacctcaaagacctaaacagatagtgcagcttgccctcagccgcaggctctgcacctccagttcagtccccccagtcttgactgccagggctggttttctggttccctgctagtgtcctgcttggccattcctgcctggtcagtggaggatgcccagtctcttctcccactggcccatcccacactgactggcagggggtaccaggaaaatagctgtcttcctctccttggcccaaggtacctggttttttgcagggaaacttaagagaccccggagatggccaagttcctgttggttaaaatgtggcccaggactaaggatggcccagaaccctctgggggcgtctattaacaaggcatgtccctgagcctcattccagaccccctgaacctgatctcaggtgggcctggaatttaccatctcattagctgtcccggtgattcagactgaaaacctcggaagcagccccacaccttcattttgcatccagtgagtaaaccagagcctgacaggtgaagatactgcctgtaatggccgagctgggctgagagcccaggatcactgctaatccagagttagtcactccactcaacactgctgccctgctctctttcctctgactgtgcagaccaaagtctaggtcctgggcattcggccctggcagtcaggccagtgggctggcattactgtagaagaggtgaattcaggaattggaaactgaagtctgcagctggcccctggaggctgtttctcagtgttttcagcctgtggcttccttgtgaacaattctctcctccatccagtacccctccggtaggcctagctgtcacccttagccctggtcccagcccgtgccccagtcctgcactcaagtgcatctccataaacacccacatcacactctctgacctccctttgccgccataggggtctcaggccaccccaccctccactccctgcatcaaaaagtaagtaaagatgaatgaggaacatgtttgagcacaggaagagccctgaaaccagcactgcaggacccaagttccagccttgtgtgactttgaacaagtcactgaccctctctggactgtgcacttgtccctttggcttcccattctggcttggtctaccccacccataggccgcagggaagacagatgagaagaaaaatccacccctccccactgggctaaggtgacctctgcttttgcttacaatttcattcccagtacagtgctaccccatggaaggtactcagtatttgaattatagataaatgtgaatttagagacacagaaacactggtaatcaggggaagcacttgagctgaaaaggcccctcgaggctacatttcctaccaatgagttgcagtgaactccttccctgaatactttcaataaaccctactttgcacttgagggtctgattataatcaataaagccctagaacgtggtcttggcctcctcacctgtaaaatgataaactagataagatggtccctcctcctttctctaccttttctctgaaactttctcccacccattcccactcgttatccagctggtatctgccctcctgagccctctgcccctctgcagaggccctgcccacatttttcctctgtccggacttgggtatgtccccacctctttccttgtgaccttgtgggctgggaaaaaggaaagaagctggatattctttagtttctacctcctcctctcaacacaggtggccttttcaatccttccagctaccagtcagtccacaagcacttatgggacaccagaccttgcctggagcagccttggggaatcaaataggagccagtccctgccctccagaaactgtgtgtctgggggagaagatcacacacaggaaaatcaagtggtgacaagaggtgccatgagacagtatatagttcatttccccaccgcaagagtaaagggcttagggtcagaggctttggtgcctgagttctgactctgccaattattagcattgggacctcaggtaagttacagatctgagctgtagtatcttgtctataaagtggggaaaacagggaccctcgtaaaatacaaaatcaccattagaccaacattatagtaataactactgcaggcaagatctgctggtggatctaaattcagtggacaggagttagagaagaaataggctattcatagtctcaaagtatctccctcagggtgcttaccagttatgaaaa

SEQ ID NO: 37251 - DNA, 1517 bp, Homo sapiens
agcccttagacattccattttatttaatttatttatttatttgagatggagtctcgctctgttgcccaggttaataggttccaggtgagacccaggaatcagtggtttggtttttcttttttttaagctttttattctgaaaaacagggaatggaatgaccccaccctcttacccccaatttacgtattatcccatttaaacaatttcaacacttagccagtcctgttgcagcatttccccccgcccacgcctccccacccctgcacctgccccttgtttactttgaagctatcacagacattccctgcccatgattgcaggatccccaggtggttctcttgtgcagacaggattgagacccacggatctagtccaatcccttcattgtgtagataagcaaactgcagcccagaaaggagaaaggacttgcgaaagtcccacaaaaagtcccttcctactttaacattcgatgaacatgtgaacttggaagcactatagagacttctgaagtgtctttgtcaaaacacttctgggaaagttcacccaggagccaaggcctcatagagatagagtgggctctgcctcaggtgccaactgagcacttgtctcttctggttcagtcctgctttgttctgcttagtctcattgaaagactgagcagtaatgaccctgtttgaatcctcccaaactgcgtgtccctttggttgaaagtcagcggctctgttttctggctgcagggccaggtggagctgtgatgattcagggctgggaaagtcagggtttctggcctaaggagctcctctaagctccagagacatggaggccaagtagtctcagaggttcacacagtctgcaaaggccaggtggcagggcctggggtggtgggtgagcttccctgcaggagcatgtgggcatgccatctctccttttttttttttttttttctaatcagaaaacagatgcgaattgtgaaaccaagtgtttgttgactcaggactcaggacgtctttcagaggaagcaaatcctcggggtactcagcatgccctctgctgggtctggttaggaaggcttggggttgaggagttgttagtggtataacagtagccccagagtttgatgtggctttggcaaatgtgcagggggctggagtgattccctttccctcctctaggaaagcccctttccacttcacccctgctgggtgagccctgtcctggtgctcttccacgtgactctacagaggcagccagcagccttactggctggctcttaaagaggctgcggtttggcccagggctgagcaaagagagaaggccgtgtgttctctagcctcaggagagctgggggcagggtatgccagcacatccctggactagcctacaccctgtcaggttttcaaagcatggaaaagaccctaaaaattagaagattgggaccccacatcttcgtttgacatttagcctgaagtccaagggacagtcatctttggccccttaaaatatcagtgacttccag

SEQ ID NO: 37252 - DNA, 1548 bp, Homo sapiens
ctaccacgcccagcttgattcataatgtctattgcatcagaggatgccattgctgtaaaagtggggaaatgataacattgattagacttctacattcccttatttcttcccccacttctttctcccgaaaacctacttccctgattgtcctgcttgtatatgtattatcttactctagtctttggaaatattatctcaaactggcctttctaattctcagaggagatgataaaacttcaacaaaaatattcatgcaatggaagtagctcaaaaggtctaataatgagtatattttccaccacgactttgcccttttatagtcttattggcctgtgcttttgaccttgctttatacaacagaagagtgggacgcagcttttaatataagatacaggttctaagacccaagagatcaggaagtatacctttaatttgattaacacaatgtatccttttagcagttttactgctcaaacttagtaaaatgtgaaaacctactgaaagttgattttggagacaccaacagaagacaactggttatttgctgtcattctttggcaccgctgaattatgcttgtctcatgttcagtgtctgccccaatcagtgaacggtgctcctgaacagccccaagaatcctagtccctccaccctcttgtacagagccagtgcctgtgtcatttcaagaagatttgcacggaattgaccttacaaagtgaatgtttaattttaaaaactgtgcttttttttcccccatttccattttagtaagcagaccagatgctttgccaaatttaccctcagctaattgcatagttcaatgtcctgaaatgtgcccttgtttgcttaaaacctgctgatttgcaaaagaaatcgttccaggaatgtgggtcagagtggacgctcctgtggaagctgaattgaccaggaaagaatggttcaggcctggctggggtgctgggtgcctgtaaatctgcaggaataggggaccctccagggcaggattttcattctaatgataaggctgctggaggtgagggagaactggggcctgaagatgtggacaaaaatcagtttggctctgatccacctttggaattcccctcaagctttatatcttgagcaggctttgggtcaagactgaaatagaatgttaatgcacagccagaggaaaacaattttaaaatctggcatttgctctgcctctgtccctggaggccctctgatgagatgtatgtgaagtaggaatgatcttccagcaagaatagaataagaatgaagttgctcagttacttttccctgtttgtgaatctggaacctgactcacagaggtgttcctgggcatttggccctaggggatttggtagactcttggctagctccaactcctgctaacagggaaattagtttggagaagcctggaggagactgaaaatagagggaatgaaaagagacaaagtggatgctgttctagtggaagggacaggatgcaaggatcatctgcctactttggtaacagtggtggtgttcccatcgaatatatgggacag

SEQ ID NO: 37253 - DNA, 761 bp, Homo sapiens
tctgtttgccgctttgttttctgcctccatgcctactttgctatgcaaaagctttatgtcaatttactttttgagccgtttaagaccaaaccaaattattccttcagcacattttaaacaatcccttaaagacctctttttcttggctatgtttccaatcttggcttatcactataatatttcatgctccatgcttctgaaaaaattcaatattcaagaacaaagtaatccagagctttacttcatttcagtctttttatgtcctagggctgtcccaactcaatgacccagtttttattgtgtcacatctcactgtctgttgctgactgcgaccagcttgcctaatccttttcccgtcccttatcagttttcccttaattcaaaaatcttttttttattctttccagttctcctttcacagcttttagattttttttttctcttgagactcagtattcctgtggtaactactcagaaatacaaagacaaatgggtaactaaagtccacaaatctgtccttgtcaaaatattcattgtactatttttagaattgtgcgtggtgaatagtagaaagtggatgttttaatttggcaatatgcccttaaaaatgtccatactctaggacccagcaatttcacttccaggaatctggcttattaattaaaaggaatcatctgagatatggaaaaagctatatgcatgagatgttcgttacaatgttatgtataaaagaaaaaggaaataacacaaatatctaatga

SEQ ID NO: 37254 - DNA, 543 bp, Homo sapiens
gttaatatactgtttcatatactgtacaaagtttcatcattgcccccaaccttggaatttcagagtgagagcatatacaattcaaaacacttgctttgtcccttttctcagagctctgatattttcctaactcttacagtctctagaatgatctgtcagattttcactcaacaacactggatcagatctcttctatacatgacctcatccttctcatgtctcctctgtttgcagagagccggtcaaagtcttggaggtggaaacgaactgccaactgattaaccattttccttaaggtaagaaatgctgcaacaacttggaaagcaaggaagagagtgaagatgatatgtatcgctttttccaagggcagatttgttaggccttcattaaagagcaagaaaagaattaaaggtaactgcaatagaaggctcaaaagccaaaagccagccaactcaggaacctgcaatgacacatatcaagagtaataaaaatcagtaaaatacagtttctgtttatacagataaacaagtacttatcactacc

SEQ ID NO: 37255 - DNA, 2393 bp, Homo sapiens
attatcagacgttagtgctcattaagcctcatccttggaaccagaaacgtgaaaacctatttttttcacatttttctctgtacatcctaaatcataaaggcctacatttgggaaataggcaagtgatcaaggtgacaaaatgcagctttgggaactgcctttacttttctctgtcccttttaaaaattctctaaaaccaagcagaggaaaagattgatatttcccagcagagttgaatgatgaaaaccacatgggtttggttgacagtgtgttgtctaccatcatgatgtaggaggaggaaactgttctggaggaaactgtgttatcacttgacatcaagttaaaggacgcagaagcatcatggtattttgttaccttatgataagagttacatataggggaggaggagaaggcagggaaggggtgagttttgttgaacgcccggctagtatggcacatgccagtgggagtggatggtggtttgaaaggactcattaacttttttttttaatgtcttctacgagaaaatggccttgcttaggaacatacttgttctgctaggaaaagggaaaaggcaaatttgttccctggggtgggggtggggacgggggaggtgggattgcttgggctattcctcgtcatcctggacagaaaagccggggcgggcgccgcagaggcaaaacaacttgggccttcgctctcgcggcgcgcgggggaccagcctgtgcagcaagggcggcttttatctttttatttttggggtttctccgggacaatgatgggccttgcgcggcacagagatcggccccacgtcagctgccgcgcttgcaacaagctggccagggagcaccacgcggagaccaggcccggccgggggcgggaggccgccagcgcctcagctccctgtccggcccggcccctcctccaaggcgctctcccgcactgcggagaactggctgaaggcgacatcgccattttaggtacgggcaaattctggacgctccaaaatccacgccaagccctcggcaggccacaccccctgcaccgggcctcggtcactcacccggaccctcattggactctggaccggtccgattggaatcactgaacacggcccggctgaagtttcccagccgctggcgcaccggatccggcagctccatgcctgggcctcagtatccctcaccccctcagacacgggctagtctgcgggcgctccgaggctccgtggttcccacggcaaccgggcggcgcgaggccggcgggacccgggagcgcgcggggctgcccggctgggctgggtctcgtccggagcccgcgcaacctggaagggaccggcgcgctcagagcgcgttccaggcccagggagccgcgcgcctcggccgtgtacaaaacggcagatcccttagttctgctttgagctcgaccatcctaaaaacaaacctatactaagaaatgagctggggttggactgcgatacaaggagccctcacatttgccagtggaactgtaaatcggtacaacctttctggagagaaatagagaacgaatgcagagcttaaagaatgtctagaggtgtaggggtgtgtgtgagagagagagacatcatgtgactgattattttttaataagaaaacagcaatgggcaactgattaaatgtactggagcacatacattcaatggagtatgtttcagctgcttataaaatgcttgcaaaggatattgaatggtatagtttaactttatgtaaaaatacagcagaaataaaactaaatgagaatgaacctaatttagcaaaatttatgtgtatgagtggaggggaggagagagcgtgtgcacactggcttgaaaaaaagaactggaaaaaagtccaaaatgttaacagtcgttttcactggatagtgggattgtaggtgattcaaaaatttttaaacgtcttattttctagctttctctcaagatatattacttaaaaaaaactaagtgtaatacacatacagaaaaattgtacaccttttgtaagtaatatatattacttaagaaataagtgtaatatatatacatagactgaaatctgtatgtgtaatcagcaccctgttcaagaaactttacaatattcccagaaactcccccttcctatttcctttcagtcactaaacccactcctcactcataactgacctttcctgaattctaacagcaaaggagagttttgcctttttttttttaaatcagaacatttattgtgtgactaatctaaaatttttttttttttttttttttttagacagaatcttgctctgtcacccaggctggagtgcaatggcacaatctcggctcactgcaacctccgcctcctgggttcaagtgattctcctgcctcagcctaccg

SEQ ID NO: 37256 - DNA, 3842 bp, Homo sapiens
gttcaataagaaataaggcccgagatctgtgatattcaaacttgtttttaagcaacagaatcttatcttcaaacaaaatcttattccaaactgcaacatgtaaaacagatcaactcagctgccctggttaagaggtgaaggtcttgtccttttgtactccctcacacccaaccctcagcattcctggggctctatggagcacagccccaacaccaccaccctagaaccagaaaaataagactgtctcattggtctcctttcttgattaaaatatgttgatcttgccaggagaaattccatccagaagtttgtgccagaaaatgaaaaatgtccatgatatctagtgctggcaagggaatgggaaaatgggcacactcagacactcttggtgagagtataaattcatgcagtcgttttgaagacaatacatcaaaattttaaatatatgagtgatatgatcttgtagttccacttctagggactgatggcatagacatacttctacaaaaaagtatatgtacaagcatattcattgtatatgactgtaaaatcagaaacaaaaagaagaatggttaaatagattatgctacctccttataatggaatactgtagtcattaaaatggaagagattcatatagggagatagagaaggatgtctttgatacaccataaagtgaaaatgcaagttacaaagaatatagttaatatgatcctttttttaaagcaagcaaataaaacccaaattctatggaaactgtgtaagtacttttaatttcacagaaaaaaacccctctagaaataaatggtcagtctccgggggtaggctttacttctggaaaaggggaatagaggtatataggtaaaggggacatacactttttactctatagatatttgtattatttggattttttacaaaggacatacaataactttataatttaaaaagcagtgatgagaaagattaaaaatagcatcataaaataatttacttgttttcaaaaatggataggtttcttcttttctgtcagcaaagtgcaaataatgtaccccgtttcccttattgccttggctgccaggaaatccagagtcaactttgaaacctgaaccttgcagtggcattgacctttagatctacaatattcacattccttttttttttttttttggtcctacttttctattcccagttaaccaactttttttccaaagctttccaggctctttttccagaagagataggttatagagaaagaaatgaactctgaacactttactctcagcagcctacatttctctgtgagtaccaaactctccagggtcaagtgtgagctaagtagtcaaggatttactatttatacttcatactgtggttattctcacataggatttgaggtgcctgagggcaagaatctgtgctcttgtagcgatagcaaacacttggctctacttttgggtttcactttgcctatactccaaatttaagagctacaaagacaggcaggagcctcatgtgacaagtcttatcttcactctgtagatggtaggaaaccactgagggtttttaattaaaggagtaactggatctgaatcatgtttgaaaaaacaaaaactggcagaggagaaagtagactggcgcatggaaaggcagagatgctcattaaatacctgtaaagtggttggataattgatggttaaatgaccaaggtaatttaaaagtctgcatttattggaagggcgtgtgcagcatttgtcagtactacccgggtggatcacttggtctgaatataggctagtaaggcccatatcataaggccggtaagattcaaaaaaggtaaaaaaaaaaacatctagtttcgcagactgcaatcttaaatacagcaagccatttcataaaggagagtgtaaacggctcagagcagaagacatattgtggtttgaaaagaagtgaaggcagcagcttcctaggtaacttggcaggtcgcatctttatttatatagacaggggccagttctctttgctaaaagtgatgaagacacatctgcctcacctctgacggaaatgtggcaccaacaaaggacaccagcttggggtcagcctgcttcaggccctgattctgtcacttattaactacatgaccttgaacaacccctcagagccagtttcttcatttgtaaatggagaggcaaagacacccacttccgcgggtgggagggtaaaacaaagagagcatgttaatcctcagggacaagcgtgacttattttttatcttatttaaaaaaaaaatagactttgtaacctcccttcccctccccaccctccatttaagaatgcggtttttgttatttattaactcaaatagcctgtggggggtgttttgggtcttccgcacactgaacagcttgcagaattaatagctggtctggttctccctttagatctgggggtgggggtcaggcacagagacgataatcacctgtcctggaactcatacctcgcagggagtggggacatcccctttattgtcactgcccagcccagcccctgactcttgccgcggtccacagctctgaacctacccccaaagcatttgaggttgcaggcctggtacccctccccgctccgccctgctcactcctggccagccttcctgggctgttgttgagggtaattcttgtgcgctccgcgggggcgggtccccatccgccgcttcaggcctgcgggctctgagggtcctgcccactgcggagcaggtgttgcaggaatcagtgactcaaaaaatgtcgccaagttaatattgatattacgtatggattatattttaaatgcatatgaatcagggacttcatggttaaaacaaagtccatgttaaacctccctccacaatgcctaacaaatatgagggttctcagctccttgctgtccctgagcagccctagaagccccttggctgggcgtggcaagatggagaagggagaaataatccaggttctagtgaaaaatcttgtccttgcgactggtaggtacagtcgctgtcaacccacagttctcccaaaaggcgaggtccttccttcggctcagcctgctccctctctcctcgcctccccatctctaggacgcgggaggtgggagccactgcgctcccggagacgccgcccgtgccgtgtcaggttgtccccgagtgcgcttgccgtgagtttctgccgcgtgactcacccgtgtccctcgctctcagccatcggaacagcagaagcgggtcggggagagcgcgctgccctgacacctgcaccccatccccacctccaactccatctccagaatttagccttcgcggagcccagcggctctagccagtctctttacttggcggcaggtggtgtgggggtgcgaaggaaggggagatgcggcgaaatcaaagtactttttgtaaagtgtggttgtgtaagtacatatacacacacgcatttttctggggcgagtgtcaaaaggaccagtgactcaaaaatgttaataaattaatatgaatattatgtgtgagttctatttcaaatgcattgagatcagggacttgatagttaaaataaacatgcccatccccccaccaaaaaaaaaagttcatttaaacctctttctggtggggtgtggtgggtcatgcttgtaatcctagcactttgggaggctaaggcgggcagatcacctgaggtcagtagttggagaccagcctggccaatatggtgaaaccccgtctctactaaaaatacaaaaaattagctgggcatgatggtgggcgcctgtaatcccaactactcaggaggctgaggcaggagaatcgcttgaac

SEQ ID NO: 37257 - DNA, 4445 bp, Homo sapiens
tttttaacaagggaccccaggttttcattttgcactgggccccacaaattgtgtggtctgatcttggatacaataagtacatgatccatcccaggtgaaaggcaaaaggaatcctcataaggacagtgaagagagattccaggacagctatcaacagacagagggcaactgtttcagagaggagcatgagactcaagagacagacacgttggtgaccttcatagccaagttttcactgctattttactctctttttcaaccccaggatagaatgcttgagtgagcttgtccagattcttactgtgtcatgaccttttgctgaaaaagctccagctctctattccataccctgctgcttgcatcagttgaggacattcattgcatctcaccaaagattgtgcttaaacctacatctgagagctggaggtgagttagaaaatagcatcccctaccctctgactttatttctgcctgacttcaataccaggctcacctgagaacattgccaggtgctcagactgcatggagccctgtgtttcctaggactggtgtatgaccttggccactaacttccccagaaagggctcctgtaaatgcttaaagaagctgatgccgagaaattctgttgcattcatgcctgaggtttcaactaatagaactttgatatttttttacacagctactaaattttcaaaactaaagaatatattgtttaggtatgtaaacataggtggtgaaaccataaagcagggaatgattaacgtgaaagtgccaatttttaaaaagtgccaattaatattagcctctggataaccatgggtgggaagtgaacagaggagaggttttgggggcaggtgcatgggactcgttaatgttttattcttaaactaggttaggtagtgagtacgtgggtatggggttttacagttttttgttttttgggttctttgtttgtttgtttttgttttttttttgttgttgtttttttgatgaggtctcactctgtcacccagcttggagtgcagtggtgtgatctcagctcacttcagcctccaccttctgggcttaagtgatcctccctcctcagccttccaagtagctgggatcacaggcatgcaccaccatgcttggctaactttttgtgtgtgtttttggtagagacagggttttgccatgttgtccaggctgatctcaaactcctgagctcaagcagtccacccgcctcggcctcccaaagtgctgggattgcagccgtgagccaccatgcctggccagttttgggcttttaattcttctttaaattgtacctatattttaataaactcttctaagggcagtgaaaagtaaaataatgaatttcaatgccattatcataggaaaaatttcatcaacagccaatttggcccttgagccacatcagtctatatagtccttttatcatggaattttgaataaaagaccttagaccagccagtccaaactcctttttatttgtaaccattattattttaactggcttttggtatatgctcttactgtataagttgcaatataaatttataagttcatgttgttttagatgtgtggtgagttattagactctccttgtttcctggtggtgtttctgtatttttccttcatctgagtcctttaacttttctaaaggtatgctcaagactttcttcattggccttgataatttcattccacttaaatatgggggtgggactgtggaggtggagactgaaggagccaactctgtcttttaccaccacagttctccttcctttacttctcccccagaatgtattcatttgggtttactcagttcaatgcaaagagtttgggagcccaggatctttttgccaaattggatgtgagctgactcactgacatatttctcaagtgacccattggttcaatgagtaacatcctggaagaaacatgagttattgttaatcataattattccttcacctttcctggaatgcctttgaaggcaccaggcatcagcaatatctgtcatcaaaagctcttttgtctgcagtttctgtgattgcattcagcttgttcacagcagagagaggtttttttcctaagatgatggcttcccttctctcaaaggtatccaatatttagcccgcctgcagaaaggaagttggcacaagttctgaagagccaatcaattccttagcttgttcttcttgaacaagtgaccctttcttggtagctctagaatttcaccacaattgcagaagctgagtaacttgtcagctggtcatttgtaaccaataaactgaaaagattatccaccttacattttgggtaaatagacaaaatttgtaattctggaattgtgtcttcagggctgactgtactgtggaatcacatctggacaagattttgctgtagttcttggcattcctgaacagaataaaagcatgaaggaattagaaatctaagccagaacccatgcctattaatgtagttgtcttcgtgttaaaatgagtaaaacataaactgaagcactgaggtaagaggaatattagttgtaacttcttttggctgcaaaggacagaaactctgtgtacaggcttaataggaaagggacttatagggatgcaagagagtcatagaagccaaggagagaaatgtggtttgccctcaagatgaggttggaaccaggaatgagaaggacccagggactctttcttaactctgctcccctttgtgcatgtacatcatctttattcctctttgtaaatcaacttttctttgcttctcagtgcaacacagccactcctgtgtttgttttgttagtcatgatagtctaggttatgttgaaataagaaataaatcctggctgggtgtgatggctcacacctgtaatcccagcgctttgggaggccgaagctggcggatcaattgagatcaagagtttgagaccagcctggccaacatggtgacaccccatctaaaaattagccaggcatggtggagcatacctgtaatttcagctacttgggaggctgagtcatgagaattgcatgaacccaggaagaagaggttgcagctagctgagatcatgccactgcactcaagcttgggtaagacggagtaagactctgtctcaaaggaaaaaaagaaatcctaaaccatgaagatgttcttcctaactcgtgtcacaattttccatgggctgagcagcacttctccatcctatcactataccatttggaacacgtggcctccgaggtcactgtggcagggaaacagaaagtgaaaagagatgagaaatattttcaacagttaggcctaaaatgatctcataatcacttctgtctatttcccattggccagaacttagtcacatggcctcaacctaactgcaaggaaaactgggaaatgagatgagcattgggaagttagtgagcactaacaatctcagtcacatctccaatcagcagaaaacccagaccaattagtccaaactacttgtttcctgaggttgtttctatgggttcaaactctgaattcctagggaagagactcttgcccagccttgctcagactcctgcccagctctgatccaatctgctctgtcttagaggcaggatcatgttgaacagaatatctgccaggatcccatcacttttaacatatggttcaaatgtggaagagaaggacagtactcagaaagggtaggcttctcagacaatcgttagtgtccactacatagaagcatgttttatttctggagcctctgagaatcaatcttacactatttatgctgtttctcaataatggtttctgggttttagggaaaaccttattttaaacatgcaaaaattatagtgaacctatttagaagagttaggacttactgcttttccctctagaaaacgattgacaagacctacctttggaaataaggtacctgacttgtgaggatggttaccagacacacaaatgtggaagccgtttttcctgatctcagttgagagctgctactagaacacaaagatggcactggagtcctcccaaatggacacccccctactgtggtagtcattagggtttttccaaagagtctcattcttttctccttctggatataagattgcacacctctgtctcctttgtaattagatgtggggatatgacttactttggccaatgaaatggaaacagaagggacatgtgtcactggtaggcagaggcttgaagagccccttcatgattcatcatactttcttctccctgcttaggtgattgtagaggcgtatattgatatggaatagctcggcctggatctccctgcctactcatgctggacatctagcttgagcaaacagtgaacttttcgttgtgttgaaccactgagactggggctgtttgttactgtagataacctgatccattccaaccactatatcatcatatgc

SEQ ID NO: 37258 - DNA, 1207 bp, Homo sapiens
gctatgattttatctactaccagtcacaaagatgtaaatgcctcctttccctactcgtctgtaagcagataattcctctgtcttgctcattaaaatacattgagtcccccttggaatttttctttgcgtagcttttagtttattgtctgtcctttcatcactagaatttaagtttcatgagagcaaagatattgtctgttttgttcaactgttgtgtcctgaaagcctacaacagtgcctggtgctcaataaatactgtatgttgaataaatgaatgaataagtaagcatagttctggttgtggatttagaagtcttttgtattaccctgaatatcttacatgcacacacacaaatatgactctgctgtgaccctccctccccttctgcccttccccaccagctcatcacatgcactaagtaattgttggctatgcataaggatccatctggctttcactggagaaaaactgaaaatagtttgcttttacgaaaactcatgtggggaacttacatctcaaaaaagatgtttgtaataccaaaatgtattttgttttattaaatccagattgttgggtggagtgccttagctaaaagtcactctcaagcaaaatgaattgcttgttattctcacaaagaatttacaggaagcaatttgtaaaggttgccatcaggctgaagtcattgttggcacttggaatcactgtgtcatcaacctcagagcaatcatttaacctgggtctgctcagagaaatcaacataatgcaaggaaaattgaattctactgcctcagattacaatcacttttacattattccaatttgatcctggagtttaaaatatttggcctatcagtttctcttatcttgccaccatgtagaaatgtctttttacatgtgcttaacactggtcccgtcattaccagctagttcacaaatagctttaaaaaacctacactttcctctttgtgctctggaagttgctgtaggaatagctaggaaactaatggtttgccatctattcaggcccatttcatccagtagcctgcctgctggttaaatagcaaaaataattctactcctcttgagtgaactatcctccaatctgacagatgggagaattattgtaggtaggcctatgagggcatcattatatcagggaaacactgaatcccggcatgaaatgaagatggacaggcctgtgctccc

SEQ ID NO: 37259 - DNA, 2235 bp, Homo sapiens
ggtaattgaacaatgagaacacatggacacaggaaggggaacattacacactggggactgttgtggggtggggggagcggggagggatagcattaggaggtttacctaatgctaaatgatgagttaatgggtgcagcacaccaacatggcacatgtatacatatgtaacaaacctgcacattgtgcacatgcatcctaaaacttaaagtataatgataataatttaaaaattataagtcaagtactaaataagtccccaggtggcctaagtaaggcattccctggcatccatagtattcaacctgcagccagggatggagttctgtggagttgaggaatctaaatcaataatcttagaatgaaaagggcatcactgtcaattgacttgggctttctccagtcttttagtattcagcaaaacattgtttatttaacttgattagaaaggtcagcccaaatctacgaggagggaccaagacaaatgaacaagttcttgataatggaagtgatttattggtttccagtatggactccaattcaagttctcagtaatagcagattgggtttctgttcctcctactgaaactgacaagaaagagtgaaattggtaggttaattccacaaacaccagaaaattcttataaacaacttaggtaataattagctcaaacattcttccttcaatatttacatctgcaggtctcaacaggacacaccgatatgttgcaagcaacttcataccaatcatagtagaagtatcaaagttcgcaagtgattcacttttaacaataaatccgagaacatttaaggttatcacaataatatcacagtcacacgtttgcatttccatgtgcttcttaagagaaaaggcaggggtgggttacagagatggagtcaggaaatgcacatgggtctgtgttgctcatgccaacactgttcttgtattgtcacagaaaaaaaaaaaacagagaaggagagaactgccttacatcatcaattttcttaaaaccttttatcatatgaaggtaaaactaaaccttgctcgctcaacttcctaattttaggcaatgattggaattcagtttaacttactgtctaaccctcatatagcaaggaatgtggaccttgaagacttattcaccgctaaggttttatgagtattgtggtgaaatgaggcatggcatggaagaatagtataatctggacaaactgtggcattcctggtaaaccccaaagggtggcaccaccttggtgaggtcacctcaggccagtcttgcagactgagaaactcaccattgctagggctctgactcttttcagactgagacaactgacttgagctgctgtcgaaactttcaagaagttgctgtataatgttattcacttacagatgttattcacttaaaatggaggatacttctttccaattactaaagctgcttctttcctgatctcataatacccggagaattgaatttatgattgtaagtttgggtgggaaacacggagtcagagaaaaaagtggagaatgatcttaagaatatcgtccaggccatgatgaggtatgtagaattatccttgacccacaagagacttcttcagttaccagactgagtgagttcccagaagctgagcacactctcctctgaaaagtgctggacaaactttgccaatttcttactcttagggtctcctttttttgtgctctgagcttcctgagtcccttccattcaaacaattggttcagtttcaggaaattactgtaacagttagggttctgtggttatgtataatagaaagtgacttcagctaacttgagcacaaaagtggaatttattggaagaagctgagaactattacaaaattgaatgaaaagctgaagtcccagatctttaaaagaatccatggagctgctctgaggatgcttgctacttggtagggggaagcagacacttaaataaaaagaagtgccaggtaggtgagtgcagtggctcacgcctataatcccaacactcccggaggctgctgtgggagagtcagttgagaccaggagtttgagacaagcgtgggcaacgtattgaaacctcatctctagaaaatttttaaaaattagctaggtgtggtggtggagctatgattgtaccactggactccagcactctagcctgggtgacagaacaagatctcatctcttaaaaaaaaaaaaaaagcaattaaatgtggcagtatcactat

SEQ ID NO: 37260 - DNA, 1265 bp, Homo sapiens
tgaagtatgctggttagcaggtgctcacacatttttgaaatgagaaatgggacactgataatgcaagacagttgtttcaaggggctctctcaatataggtaactcagtactatgttcaatatctaaaacagactcaacttatttcagggataaaatattgtgatttttaaaattttaaagatagcaggatttcttcggaagattgaactatggcacaaaaacctgacttgctcaacacttgaatttcttttcttggagaaagagatcaatgatgcattattgggaatattttaaaatagcatccaaaagttgtgacagaatatgaagaaatatccagcggctctcacaaagtcatctttgcttcccaggctacgttctgatcactgtaagcccagtcactaattgggtgacttgctgtgaaaagagaggcctggaacaatattgcagctctctctggctctcatgttattgcccttgccctggaatttttctctatcttgccctgcccagaagattgcccaaactgtgcatgagttaatcctgccctttgaaagctgggtttattttccagctctactcatctgggacaagcttcagcaacagggctactttcccttggctcatgcccagtgccctggtaagtggagttttgcctgctttcagcttgctttgaaattttgctttttgtgtgtgtgttctttgtactgtatgggatggaagtgctttggttttacaccacaagggttgtagtcaatgccctccaagattatgaatttctaccagcttttctttgcctttcctgtctagccttattatttcagaatgatattaattatattatcttgctcatacaaatataatcatctatgaattattcagaggaaaacactggctggatgctgtatctggttacctggattttttttccagtttttgaaaacacagaagaagtgaagcaaaggtcagtctaccccttataatttgccaaaggctcttaacatttcatgggaaatgaccagtaagtcttggtcaagaatccctgctgattttataggagatgaatttattgaatttagcaatgactttctcagctgaggtcttaattccaactcaaatctttgctgctataatcccagtaatggcccacttatttgcaatatgtaaattatctcagctagctgcttttaccttgacatacacatttgtggactgggacttcaccattatgaaagtatcttaagtagttagaaggcttagattgagag

SEQ ID NO: 37261 - DNA, 2772 bp, Homo sapiens
tgttttctgtaaaatgcacactgtgctcttgtattattagatcattttctttattgaaagtggaaattgaattagatactggattcaagccttatatctgtctccccatctctcttgattcttcaacatgtctctccactttgtcttggcccccaatgtctacagatggactcaattctcacccatcactgctctctcttcctgtccctgaaagaatcctccctagaccctaacacctttcaagctactttgtccatgcaccctgctttccaaccttcgtaagattgaatgatccttgtttccagaacccatcccgcttgctttctttttatgttagcttgcctctcttttttttccaaactgtctgcccatagcttgctgatgcgcctacttctctgattattccttctcggtctctttcccattttactctgtttattccttagatgctaggattcccctgaagtttcattctttgtcctctttctccacaccaggggtctgtgaaccacctaaaactgaaaacaattttttgtgttttgagacagaacactttttcccccttgagaaagtatctgtagctttcatattctcaaaagggcccttggctcttttaacaagattgagtgtccctgccctcactctgcctcctcctttttgcctttgaccaccctttttatatgctagctgttcccaaatccatctacagttctcactaggggcaaaagagtccgacagcgaagaggaaaccaagattcaaagaaatgttgaagactccgaacaataagaaattgtactgtacacattttgtgtctagctcagctgattcaatcccactgaagaccagttgactctatgttgggcggggagcggccggggtgtcggggggtgcctgacagggtcattacttcaggttgtcaggtaagatcccaggaggaactggtgaaataaaggctatgcgcaaaaaccctagttgccagtggcggaggagagggcgcgcccaggtcctggcggagatgagaacaggagagaaacccacaggcagctgcactgcccacagctgcagcgaagccaatctctaggtctgcaatcacccttaggggccagaaacccagccccgcaccagcggcgcctttgacggacagccaccttctgcaatcaccttgcagttcactataaacactccctattcctcccgcctatcgcttccctctccaagccaatcagaagaacgggcgggatcgtccttagtcggttccttctttttttttttaaaaaaaaggtagcctgtgcgtcgcattccggcttcggggaaaaaccacctcccgagcaagggcaaggcggagcccctgtgatgggcaggcagttctaccaatgaggtgccccagccgctgtaagacccggccgccgaggtgggcggggcacgcgcggggcctggccaatggcggcggggcggtggaggttgagctgccgtgggtagggttagtgtgagaggtgcggcgggggaggtaatgatgatggtggcggaggagaaaggcgggggagggggtgctgggcgctgagcggtggctctggcagggcttggtagggtgggggacggtcgcggggcgatctgtcagggagggggtgggcgtgaggggcgccgtccgcctgaggggctgcagatcccggctaccgcgagcgccgtggctggcttggctgttccatgtggctccggcggggatggaggactcggtggcggcggcggctgctgctgcggcggcgacggaggagcggctatgagaagggaacggggccagactcagcccgacagcgggattagaggtgtgaggagggggcgggagtggacgagcggcggggccggggctcggggtccgggctggggtcttctggtatcgcctgggtgacagggaccgcggacgagccaccgcctgtctccgctggggggcaggggtctgggctccgtgcgtgaggagactgggctccggcggactgtttccctgaggatgggggagggaggcaccgcaccctgcacagtccacttgccccgctggtcattgcttcacccccaggcaggagtttccatttccctccggttggcagcgaaggagcccaagtggcctggagccgggacattgccctctctctgcctggagatttccctccactcctcgttccccatccatttcctccctccgactgaaaaatagcattcctcctggctccctaatttgttccaagcacatattgtcggacttgaggctattaattatcgactgaaaaacaaagtttattaaaaaatactccacttctccctctttctggcggtggacattaaacagcatccctagactttcccgctctgctcgcccttcagtgatgctaacagggggaggtagggccccgagttaccgtctctctggattgttgttggtgctgactacctgatgtgtcgctccacgtcttcggtgtgaattgtaatttcttccttggtgtcttgcatccttgatgttactggcttttgaggtcagtgttttgtttcattgtttaaaagacatgcagagaactgggatggtcttttgcagcgttatttaacatgggtggttagtcatttctcatgattctctcctcatattctttctctttttgtctttgttttgcttttcagccctccagaatacccatcatatagcccctgaggtggcatggtgatgtctccatgagggaaccccttcccactcatcctgtcacgtatatcatagtgttcttgac

SEQ ID NO: 37262 - DNA, 988 bp, Homo sapiens
gacagaatgttataaaggacggttagtgcctcaaacgtgcacaacctctgatcttcagaggtctggctctggatttaattcttaactattcatgatcacttaaagatgacagctgccaaagtcaagatttcagtaaccttttaagtaagctcctggttccacacggagtgccaatgcatacatcttccaacccactgcactggcagtctcatacccaatgctgaatacagtgttccagcctggtgcctttcagcacacacaaaactgatcaatgtccaattttatccaaccacccacactaaatatgaaacctcgtgatgctgtcacagatgcctgcagggtagcactcctgcaaattttaaaaaacatgagattgttaaaacaactaggaaaaacccctttctgatgccagttacctaaaacttacttgtttttgaagtagcacctttagttttctatatgatgtcagcgaatataatttgttgagaaaaatgtttcttacacattgtttttccacatcctcctagttttataggccttattaaatagtttcagtgagccagtctttgaaataaagcccaggtgaatatttatatttccactgtagcagcagcatgcattcttgatgattgacctttaccctgacataatgtcgtcttgtgacattgaatgaaataaatgaagaaactagtccttggcttgatttgtattggcagaagaaagcaaacagagtggtttgtcaggttgctaaaaacgtcaaaatacagttctgggacaatttctaacacaaaggttttttgttgtttgttttgttttgttttttaaataatgtgtgggtggttggatgttctttgaaaaaagcacacatttgaaaggaaattgaattccagcagtacctgtatcagataataataggaagtaaattgtttccctttatttgaagttgcattttattagtcagatgcttgttggtggcatgtttaaacat

SEQ ID NO: 37263 - DNA, 516 bp, Homo sapiens
ggccccctccgcggccaggactcgggctctccgctcgccttcctcgcctagctctgcgccgcttttgccagccgagtcccggagttagcgcgcgaccggggcggggcgggagggcggggagggcggggtgtggggggcgggggagggcgggggcgcgcggaggtaacccccggctcgcgcagccattgcccggctccctgtcactcagcccgcgcggggcccccgattggcggcctagccccgttacgcactcgcctcgcgttcacatacccggggagggcagtagaaaggtgatcaatcttcatcaggctacatttccaatcacctaaacaaccgagcaagacaagccactccgacaaggtaaatcgcttgatttatttagtttgcaaagtgactctgcaggacttcccagtccccactgcctccacgttgcaccgggagtgccgcggcaacgccgagccacctcccaactctgcccctcgaattcccccccttgcggcccctcggcgcgatccc

SEQ ID NO: 37264 - DNA, 2382 bp, Homo sapiens
cattaattttaaagagaacctcttaagttgttttaccagctgagactgactgactaaacaaccagtgtctccccttcagtcgccagtctttccttagaaatgcctgtttggcataactttaagactcaagatggtttaaggcgcatcctgtttcttccaaaagggaatggacaaaactcaacattcacggagggcttagagcaaattagaaccgtatactgtgacctcctggaagggagaggctcacctcctacaaagtaaatgctcaataaatatttttgatataactctggaagagctccatttggggtcgggggtgcacctactccagggcaccaccccctccaaaatagctgcattcccacagccctcatactccgctcagaaaagggaccggcgagcttgcaggcatccgcacagcggataaaagcaaagcgggacggcgcaccaaccgcattccggatcctaaggttaaaagaaaaccccttgccctcgggccagggctcacctgtctcgggagtggggaagaagcgcgactcccggccgctttggagtaggcgtcccagcaaaactctcgcctcatcaccagacactaccccgggcagaaggttcctaggctaggtcctcggacccgagagggagcgacacgctcgcttggtctcttgggtctccaggacgccgccgccgccgccacagtttcctcaggtgctacaaagcagccagggtgtgcgtgcgctcccgcctcgtcgcttagcaacctgagaagctgtccggtcgtcccaacttatcaattcccccgcccctccagagtgtcaatcgttttttaaaagattttgtttccgggtcgatccagctttacgcagcggaaggtctctttacctcccacgtttaccctcatgggaggatgcagtctcagtcacgcgcgtgggggtgatgtcgctaaggggtgattctcccctccctagagttacacacgctatctctcccgccaattgccgggctccatcaggcaggtcctttcctcctgagcccaaaccatccgtttgttgtcgtcctccaatcacaggggctcatcctcagggactactttgcaatcggcgcagagcgcagtgagaagagcttgaaaaaaacctctggtatcgggaagtgtagttcaacacttgaaggaaatgctttggagattgcgccacaaccagggcagcgtaaactacagttcccagagagcgccgcgtcgggagcggagccttttctcgctaacaccgctcgccctctccgagtcagttccgcggtagaggtgacctgactctctgaggctcattttgcagttgttgaaattgtccccgcagttttcaatcatggtgagtgtgggccccgggttcctgcccacctctggccctcgcgcccttgagtggggtttcttgcactttagggacttttgggaggcagctgtgcaaggcactgtccttcgcgccctttggcaagctcggactcatcttctggggattgccgcagtgacccagtaatgggaagggattgatttccaccttgcggggtatggggcgctcttaggaggactctggagaagtagttgtcctgggagaggagcgatcttaatcctgctgcatgacgggaggacaaaatgcgacgctgcagctattttccaaaggacgttacggtgtttgataaggacgataaggtttgcgatgggagggaaaggttgggtcctaacccctttttctcctcatttgcccacagtgtttataacggcttttgtcacagggaccttgaaagcaaaaagctggaaaggtagtatttaccaggtgctccagattacgatctgcgtttgcagcagacgtgtttccgccatatctaatttctcaaaatgttatttggaacccgttcattgaccttttttgtaatgccaggatatattgaagtgacagcatcactaactaaataactactgcaaatattctttattgaactgtatattgtgaattccagaagcacctctcttaaatgtaacagagtaaccattttgtcatggaagacctgggtaacctgcatctccatcgcttgtctctgctgaaagagagggggagggggagagttggtgaaggaactctggcgtaggaataatctgcgtactgcttgaaggtgacatttgtcatcaaactcagagaaatcgcttcatactatcaatacaatggcttgtatttatagttgcgactgtttttcctactttatctgcaaaatactaaaacggctggagaatgtggagaaatgtttgaatgaattggaaatttcccagaacctgaaaagacacgttttcaaggcaagggcattactctctctgcctgtctaacggggccagtggagaca

SEQ ID NO: 37265 - DNA, 825 bp, Homo sapiens
ctttgattctgattcttggttttaagaaaagttccaatgtgtgttttatatggcttgaatagagttgcttcatatataccctgaaacagtgcaaggagagtacacaaggtccagataatctctgccctggataatctctgtctaatgtcaaaatgcatccctggaaaaagacagagtaaaatagcttcagaaagtccttatggggatgtgtcagctgtttgtcagccaggtacttttcctctccatttctgtgatggggtaatcagacctatgtaccaactatgcagaaagatcagtagttagtaaaaatagctgtataggacaaacagcagagaataccaaagaagaaaccactcaaaaaagcactgagtgtggtatttcaatcaaacaggaccccaaaatttatatttattcttatttatcagaaaatcaaaacattatgaaaaatttaggaaaacatgtaacttagcaattcccaaggtcaggagctaccctggcctttaatgctcaaataacaatagtttgcacccccaacctgtgtaatggcaggaagtcctgtgatttattgggttgctggatccaagtgtttctgggaatccctgagaaatgctgacatgttccacaagtatgagccactttttgttgatcatctcagctggccgacaggctctggtccactgcttttgtttcctcagttctcctctcactaacttgaccttgaatcctaacttagaaattgatctaggactttcgtcgtcttgatttaaaacaaaaacaaaacaaaaaagtaaacaaatcaactccaaaatatctgagctatagttg

SEQ ID NO: 37266 - DNA, 1639 bp, Homo sapiens
ccacatggtctgtttgtgtatatatgtatatgtatgtatgcatacacacacataaattcatatttatgacagaaaacacgagatttctggatcagagaacataccattcattattcacacagtatcttagcactggttccccaagccctacagagcaacatgggaagagcctaccatgttaagcccatgataagagccagggttgcagcacaggagaggaataccaaagtcatgagacttggagctttatatgggctgctgattatctgcccatcatctcttccagagagagagagagagagagagagagagcttatctttgctctggaatttaagcaaatgtctcctggagagaggggtaggtggctccaggaaagataagcctctaaatctctccagaacagtactatatctctaatttcctaggtgtgtttgccattcaatcattctttaaccgagtttgccagtgttctttgttcagaaagcccaaacagtgcagaaatgtgaaaatattcatggagaattgcatcccaacagtaggtagtcagtaaaggttatcttctttcatgagtctgaaaacagtgctctttacttttaaaccttctcccacagatgcccatgccactgttgttgagagacaaaaagctcaccagccatgaggtacctcaaggtgaacagccctagccatgttatgtcatacctgcttccatttggtcatttcctgccttacaacacaacaatctgttggctgcttttttgggcttctttcataaatataatttctgtagattagagattctggagagtatcttgtgtttggacagctaaccattttaactactaattggtagcttccctgtaccctgccccttgccctctgctactgttggcagctacaatgcaggacgactattattttgggaaattttattataagggaactggagaacaaagaggccaacttcttcaatatctctggttcacacttgaagcacatacttggaactttataaaaccagttgcataatgtactccttctctatcttaggactagatacagataactggaaggaaacatcagagaggaaagcaatcatgaatgctggcgtgggttggctcccagcctgactcagtctgagtagagagagaggaagcagagatggaaactcctgtaaagtggcaattgcagattatagatgagatatgatcatttgaactctggctatagaaatggagaaaggacatggaggatttaagattttgtaggtgtgatttataaaagttggtgactgaatacagtttgagaaagagggcagagttcatggtgaattcagtttctaagctgagtgttgtgtgactaaaacatttggatggaggttatagattaattggatgttgtaatgttgcactttcatatttagataaaaatactcgatcatgctatcatggaagaactagaatgggaatttttaaatttgataattgatgttcacatcatgcatttgtggattttttttcatgtttttaatagaaacagacatcacagtttgagaagtcaagagggcattttccctcatatatcaacaaccaccgcacctttaacccaagcagtactgaagggcatttgagcatctagcaa

SEQ ID NO: 37267 - DNA, 821 bp, Homo sapiens
tataaaaagtcttatttgagaaagtcttcctaagtgtctcaacaaacttggtccctataaaaacttcttccccaaatacaggcaaaatttcataaggacttggcactctgcatccccatctgaggcaatcttaccaaatgtttttctaattgtcctcaggaacctgttccattttccagttccagttgctgtggaatttgcctttctacctagttcctgctggacgtgaagctgggtatgctttattggctcccaggtctgacttttccccagaatactgtcattgcttctgtatttgtctcatgtccccaaagcctcaggcagccctgccctgttcttgatcacaactctggtttcgaggagccaaatccacatcagagtcccaaggccacattggtctggggaaaacaaatattttctcctcatggataaaaagaacaatgcgattgattttacgtatttgctttttcctttggctgcaactttaacaggttaaaactttttttttgtttcatttaaaaaattcccaagattactatatagacctatgtagagtaatcaaagcttgccatgggtttttggaaaatttaacaaactggttcaaagtttatcaggtagaatgaaaaaggagcaagggtcaaaacattcctgaaaaagaaaagctacagaggggtaaagctagaggacattatgctaagtgaaataagccaggcacagcaggataaatactgcatgattccacttatattaggtatctaaaatagtcagactcataagaagcagggagtagaatgataattttgttttggggcagagagaaa

SEQ ID NO: 37268 - DNA, 4672 bp, Homo sapiens
ctgtcttgtatttttatttgctaaatctggtagccctactaggaaagaaccactagtcttaagagaggtggatctccttgggctcttttggtttatcaatatctcctacttaaatttttttaatagataaaagtatacttatcatgagtgtatagttcattgaactttcacaaattgaacacacccatgtaaccagcacccaggtcaaaacccaaaatgttatccaccccctagaagcctcccttgtaccctcttccagcaacatggtttcccagagcttgacctttccactaagggtaatcattatcctgacttctaaaagtataaactagttttgcttatttcacaactatttttatctagtgtcagtggcctcatccttgtattctaaaagaatatccactcacttgatagaaacaaagaccccctggcaccaggttaactgaccatttgatttggagatggttgaggttgggggacagctcttccatctccatgtattaagggaattctctaggaagtggtatttatctagaaccccacagtgggtagcaggtgggtagaaccttccggtggacctaagagataataaaggcagaaatctagaagttgtgggtcttccagaatgtggtcaggttataaattttggctaggaggggctgagaaccaagcaggtggtttggttgatgacacctgagagactgtaagaactaggcatttgacacactcccgcatgcacatcttcatggaagtgatccgatccgttgctaataccccagcaagtttcttcttggcagtgttggtctgcaatggcacagctttgttgtataaagttgttccatgaagccatgaaatttttctgtcattccctcagtttgtagacagataactacgcccgttctacaagaatgcatcattatcattaccataactaaggacagaaaccagaaggggtcccttccccttctctccagtagtattgagggggaagaccacaggaatagagctccaagagaaggcagagcaggaccttcacctccaccagcctggaaaatgaggctccagggacccactacagttcactgagtacacaccaatgcttccttggagcagagcccacgtggctgagacacccatggtagcaattgggtaattgggtaaagagtcagagtatatgacctgggtggttaagaatccttttctgaccagaatcttaggttaggaatccaggtgattcagtttggcaaggaccaccaaatatttaactggctgatgccagaaagtctgaatggtttctcagtagcagccttccaggcaaaagtgagatatcaaaatatttgcctctccaccaagctcaaaacaaagaaggtaaaacatagttcttccatccccatcactgcattcctcccctacctggtacatagtctgtcctgttacagaagagggtatttgttgcagtattatttataataccaaaaaagcagaacactctattcaagaatgggactttgactaaataaattacgccacaaccaaacaatgtaatcctattcagtcttaaaatgatgttgtagaagaaaatgtagtagtagttatagtagctgtagtagtagtagtagttatagtagttgtagtagtgtgggccccataaagcccacactacctgccagcattgttctaagtacttggcaaatgttgactcacttaaatatttacaacattttgtgaagtaggagccattattatccccattttacagatgaggaatttgcagaaattatttcagttaaaggacacgcccaagggtcacacggtaagtgatgagccaagattcaaattcagatagatccagagtccactctatgaactgttgcataatgacaaatgaaatgttaatcatttataattataggaaaaagcaggctaaaaaacagtttgaaaagtgtgattccaattccgtatcaagcactaaaaaatcgtatgatcatacacacaaagaaaatttgttgtgttgcctgccatggtgttaatagtattacctctgagaagttgcatttaagtgattcttatttcctttttaataattttctataatgtctatattttctataataaatctttatgatttcttcttttgaaacagagtctcactctgtcacccaggctggagtgcagtggcgtgatcttggctcactgcaccctagacttcctgggctgaggtgattctcccacctcagcctctggagtagctgggactacaggggtgtaccaccatgccaggctaatttttgtatttcttgtagagatggggttttgccatgttgcccaggctggtcttgaactcctgagttcaaaagtgatcctcctaccttggcctcccaaagtgctgggactacaggtatgagtcaccatgcccagcctatgactttttttttttaagatagagtctcgctctgtcgcctgttgcccaggctggagtgcagtggcgtgatctcggctcactgcaacctccacttcctgggttcaagtgattctcgtgcctcagcctcctgagtagctgggattatggatgtgcagcaccatgcctggctaatttttgtatttttattagagacggggtttcaccatgttggccaggctggtctcaaactcctgacctcaggtgatctgccaccttggcctcccaaagtgctcgacttttttaatgaggaaaaaattctaagacaaaatgatttcttgaggtgaaatcagctcaacaattgtgacctttatgcaaggtcttctggtatgaagacatggagagaagtcacatcctatggaaagctttcaaaggacattcccagatcacatcatgccaactgatttgcctcagaggaaaatgaacttcaaactcattaatgcgtaaactcagtgcctgggaggcaagctatgttgagcaccaagcagatgttagaatgttgaagctggcagggacctggagcctctagaatctaatccctctgttggcacagactgaggctggaggggatgcctatggaaagtcaagtcaggtaacagggaggcacttacagaaaatggcatttgccctaggaagcagaagtaagcaggaaatttcacaagtcatttaaaatttagtcacagaatttcctggctagcaagagaacacctgagatgacttttatcttctcgtggccacagaagtttactcagaaaaagagggaggggggaataaagctttgtgaatgtattgcagtaaagatttatgcttgggagagttcaaaattagctgtgatggagaagaatcctgttgcagacaatgacatggacatgtagccatcttttcccagactacaccctctgacaggatgcagttatactcagtatctccctggaaaatgacccagagttcctggacttccagcccagtctggatttcctgagggaagctattacttagtcaggccccacccttccaagacatcacagtgactcatctgagcaaactggagagggctggcaatctccaagcaacacggtttcccagagcttgacccttccaacagctactcccacaaacagggccaattagcgagtcctgctgatgaaggaacactctcagcagctccccttcccagctggttagcagccactgtctttcacccatccatggttgtaggtctctctctggctcactgataatgtactacctctagagggcagttcaaagcaggattctcactgagttctgtaatggtagtacttcacagattgtaatgaaattattcaaaatgtcctcgtgaaagaaacccatgttctttcatataatgtcacaattttagctgtccactcaagcaatttgcaggaccgaatctggatgcaagtatttaactaaaaagaactatgtgataacagatgctagacttacaaagaaggaactgagaggattcagagggacggttgttcccactaaggtggtgtataaagcagtttttgaggcgctggcctttgagctgggccttattaaagatgagctgattttgacagggagatatgttaagggaggcagaggaagagggatacccagacagagggagaagtctaaaaaaaagtttggagctataaaagaatgagtcatggcataacaaagcgagaagtctcgttttctaacatagaggtatcccatagccagggcaaactgggaaaagaaatattgaatctaagacaccatgattgccatcgattgtaacatgcactctgatttcagaggtgtttcaaaggtcttttaaaaaaatgtgtcttagaattgacaaaacacagttaactgggatagtattatacaaggtctcaaaaaccagctaagagggtagatggtgagaaatgaggagcttctgaaggcttttgagcaggggtgtgaggttatgttttatgaagattgctcattgctgtgggtaaggccaaggtagaatatgctttgggctgggcctggtggctcacgcttgtaatcctagcatggtgagaggctgaggcagatggatgtgttgagcccaggagtttgacacccgcctgggcaacctgaccaaacctcatacaaaaaatgcaaaaattagccaggcatggtggtgcacacctgtagtcccagctacttgagaggctgaagtgggaggatcacctg

SEQ ID NO: 37269 - DNA, 886 bp, Homo sapiens
gaaaatattaaaagtagcaatatattcagtgttttgtaatagctcaaggagataaattactgaaagacgaatatcaactcccatagcaagaataatttctcctgtccttggaaaatgttaatcaaactttagagatctaactagcctaatatcttaaagtgataacctgggataaggagagattgagacttaaggttttaatatgaattactctatgaactacatcttcctgaatatgtttgaagcctgcagcatcaggctttctcctgtctgccactaccagttatctataagtgggttcaaaaattccacttcagggacattttgtttctccacaggcataatcattactctcaggaatttgtgagccctcctcaaggagaagtctttttctgtgtgaagacagtgagaccccctgtagtgtgttctcattaatctgtttctaaataatctgatcgagggttcatctgcctacacccaagttgccctgcctgcctgtcctcttttgacctttctacttaaacctgatgtcatcttctccaagagcatgtgactcaggcagcataatgtcagggatcagggctgaactattatagacacagtggattagcagccaaggagtggttcctctgacttgggctagccagggttctctaaggattcattctctggcaacgctgccactcagactgtaacagctttgtaattttgaggagtaattctgaattacaacatggcaggatccacaatggatgagctcatcttctgggtgcactatgtgggcatattgtctcaattatactgacttgaacaaaacctccaagaaagagtgaggtctttgtttctaatgtttccattttgatcctgttacagttttaattccatc

SEQ ID NO: 37270 - DNA, 712 bp, Homo sapiens
ttaatgtcagtttggacagtactcaagtttacctttctcccaacaacttaaactgctgatgagtgacacctctggccccacccaatgctggtttgcagcaccactgagatcttagcacatctccaagaaagctgaggcaacatggattataaatccttattaaatgacattctcattttgaaaatttggcaaagttaaaaaaaaaaggagaagaaaaatttcccataacttcgacatccaggacattgacttctgataaatttgtgtggtattacacaactcttgaaaaatctgtacagaggggcaactcatcttgaactctggctctgggcctggaagaactgctttcatacccatttcagatttgctacctaagtttcaatttgaaattttttcatctttaactaacaacctacacatctagcatatagctatgtcctgcccaatttgagcagtttctatgagagataatttataaaccaaaacatgcagaatgctgagtaataaaggaaaatgcctgaatgataaatatttagtttgatgtagatacatagttgttcattgctgtgctgcaattcttacccataaatatatctacctttaacaacagaacaaaaatgggctaaaagtaccacatttcatctatgtcctaaatttccattaaattaatagacttaaaaaatggtcttcagccttttttttttcatcttct

SEQ ID NO: 37271 - DNA, 906 bp, Homo sapiens
ttttaattcctaagaagtggagttgttctgtggaaaggagttttggagtaaaaataaatgaataacagaataggtggtggtgggggttgcagattcagtttgtatttttcaggaaacacatagccccagttaggagaagtagcctgttgaaggtcatccagttagtggcagggccaggacccacatctcctaacccccaattcaaagcgcttcctctgaaccctgctgcctcctgatagcacatcaggtgatttcaccttcatgccaaaacaaagcaaaacaaaacaaaaaaacccagaaatattgcacaactcaattttctattttcttatttaacatgtggaataactttcatctatagtttaaggctactctctcccccagactaaagggatacagcagttttaaccaaatttctgcacactagttatgtttcctatgctgctttatgtagtgaaaaaaaaaatacagtcaaaagtaaggatcacaaagaggaattaggttgtttgtttttcctgtgcctgacacatgctcctgtattattttcttataatgctgaaattcatcaaatatagtccatgctcatttttctacttggtgcttcattggctggcatttatttacgcatagtgagaatgggagaaagagccattccccaggcaggggcataagtagctcagtgtttgttgtaagggagggaaagagtagtttcagatactaggagacaagtagaaaaagagtaagtgtgaacatggacacttatacacaggcatgtgtgtaattccaagcgacatttgtatgcattatctcatgcaatcttcacaaggaccttaggaagtaggtactattgttattctcatttttttttttttacatgaggaatttgacttacaaagtgactgaccc

SEQ ID NO: 37272 - DNA, 4946 bp, Homo sapiens
atatcacatgaatagaatcacaccatatgtaaccttttgtgtttggtttctttcacttagtgtttttaatgtccatccatgttgtagtaggtatgagtactcagtccattttatggcaaaacaatattccattgttagataaactacattttgttatccattcaccagttgatgaacattttcagtttttttaaatttcctttaatttttttctagtgtgcagatatttggaaattattcttacattcaactagacaaattccaagtatgtgatataaggttcttaagattaattttaagataaagaatttgtataaaaattggcaaacatcacaaaaggcctagaaatgaataaagtggctttatgtatgtatttacatatataaccactttattatatatacatatatatgcatataatgtctatataatgagatcttgtgaccagttatctacatctaactttccctatttaggtacacattttccatcgaatggctgctctttgccaaaaaaataaattaattaattaaaaggccatgacttttctcagtgccccacatgaaacaatacctcgagtaaatcttcacttcactggattaaaacttgtatgttccatctacagagttagtgttgatctttctcagagttgcatcagctttaacaaacatttgaacatcacagtatgcaaacaaatgtgaacctaaaccattgttgaaagctgaccatggcaaaatgcatgaaagaaaggagctggataaaaattacttgctaaacctgcagtttaagttattgcacctttttattttttttcttagttttcctcactgaaaccaaacataggctgagaaattttaagttgcagaaggatagatagatggagatagatagatagacagacagacagacagacagacagacagacagacagatagatagatgatagacagatgaagaaatttcccacttaaaaaatatgccctgtgagtggttctaatttagttgaaggagtttgggtaagttcagatttccatggtaactctgatatcatttattcattaagcaaacatttatagaagaattacttactatgtgccaggtatcttgagggctacaaatacagaacaatattgcttctgacctcatgaaaatgagtatctagtgaggaaagtaagatatgaatacaaatatctataatatagagtggaagtgatagctcctatgatagagatgcagataaattgttacaggagttcagaaaaattataggtcccttgcagttaagagagaccaagaaaagctgggcaggcagagaaggtgatatcagaaccgtggccttaaactgtaaggagaggtagaatctgaacaggtagaaagagggagcaagaaccggtgggacaaagggacaaaatcagagcatttctgggcatgtgaaggaagaacaggaagctcagaagactgtgggacaaggagcaatgcgccacaggatgggaaacagggttgagtcagacagtgcaaggtcttggatgccatgagaaagagttcatattttatattgtagccaacagagagctattaaggtttttgagcagggaagtaatagggaagagctgtatgtgggaaagattaacttgtaatccaagtataaaatcatgtaaaaagggtcggaggaaggggcccaaagtgggaaaaccagttaggagtctattaccatggtccaaaagagagagacaccgtcagactagaggcatggaagaaagaaatattatgaaatcagaatcgaataaatgtttcatattcttgttgttaattgtgttccagaaagctaaattctattaagttaatatagaaacaagctttgactgactggtgacaatatcaggcacctgtacccaaagatacacagaaaataaccctagctctctgttaaaaaagaaacttataataccaatggttttcgagagtcctttccagttaaatttttctttttgaaatacttaatccatcattaagattctccagggagagttctcataatccagaggttaaggattgcagaattctagacactgaagtctaggccagtttccccacctccaattttactgacagtgaaactgaacaccatagaggaaatgacttctccaggaaaacattgctggttagaatgcaaatctcctgatctctgaccctcatctcattaatgcatattctgctgtggatattctatgttggctagaactgaagtatcaaaataaagtgactcttttagttcacatgggcttaaaaaattggtttcaaataaatagcaaacaaaaaatatgactccatcagaaaattggaaacctgcaaggtattgctgtctggatgaaatactgatgtaccacatgccttacttatcaggtatcataaaacactggcttaaatgcaatgtagcaaccacttaactctgtggaaaactctgattacttaggggaattccttaggtcttacagagaacttgtggtctccaaaatataataccaaacttttttttattgagaacaccaaatatgtttttaatagaattcaatttaggatttcaggaagtaactgaaaatctgcagcctataggcattgcagaaatgaaggaaaagggcatcagtctctcaaaattctggcaggaaaggagtggctatctccaaagttatttttcctctggaataagctgcttgctggtgccaaagaacagctcatcagcaatgttgtttgattttgtagggatgttttgaaagagaaaaaaaaattaggaatgaatgctgtgattttttaaacctcatatcccaaaacctataataattttgctgctttttatttttaaaaaacaaaaccaaatgtttgagatttgattttgagtccaccatgttcactgcaggcatattatgtcaatcttattacaagatgcagcatgtaatttctttaaatgctgccaaagacaaagaaaaaaaaaaccatatattaccttatagactcaaacgacagcacaaaaacaagctataaactaccatttctctacctctcctggagggctctcatcctccaaaaatgtacagggatgtctcatgtgtactcccaaaacagttctcttggctgccatgtggttcacaattctccatgcctgatataagcagctgctggcaatccttcaagccatgtcccactgcccaccaaaagcactaccaccactgttgcagttgctgatgtgtgcaagcaggcctccaaggctcaaagctcaacttcaagggcatcaaagatattgatagtcctggagccaaggctgctgctgctggcaccaatattcatgacacaaacaagctgcactctccatgtcctaagaagattagcaaacaccaactcctttagtttctactaggtcttatattacagacactttggggtcacagaactcagagacagatgaggtagatgttcaatagctatttgttgaaagaatgaattagtcctccttgctgggctagaagcaacctgagtggcagacatcatgtgtactcagacatgttcaacctcatctgctgtcttaatacaacctctgtactttggttcttccttccactgggatgagttctttcctggaggctacttgagttgtcttataagtagaattccagaaggcccatcccactagataccaggcatgtccagatatgcctgaatactggggaagataaaacttaggctcaacctttaccacatactatctttcttcatcttaaaaaaggaaatacagaactgacataattatacaaataattcaagtttttgtttttcatttgaatctcattgggagttacaaattggcagcctgtaggctgaatctggccagatgatttttttttaagcacacatgattttaaaaaattttgtttgagttagtatacatctagatcagtggttctcatacttgaatgtgcatcagaatcaagcttgttacaactccagggcttgttaaaacttagattgctgggccccacccccagcatttctaattccatggctctgggttgggggccagataacttgaatgtctacctagttcctaatgtagctggtctggagacatattctgacaaccagtgcttaggtgctctgtagttttcccacacccctcaccagtccccattgcatttcatctgacccgttttattcatttctattactaactgcttggcctgtgagtctgaaaattctgtgagtctcaatatttcaggtgaaatcccttttacagcatgactcatggagatgattgtataatattatccactttatttcacttgtaatacgtggtttatctatggcctcacaacagaatgttcagcaaatactcaggttcttattttttttatcagggctactattgacatttgcttgttcaggggaccacccccactccttctcctgtgcacatagatctgcttgatatcagcccaatccagaagtggaaaatgagaaaggccagaatgcttatgacaaatgagaaagcaatttcatttttgtctgtttgatcatgtcacttttagaattaaatggtgatttttcaagcatatctgtatttgaaattttaatctataccttggtcaaagaccaaacattgcctgaaaaccaaatactgattatattcatagctataggcatagtaatatgtgaggataatttaaatctgtcataaaggataaatgtttatgttttttaaactttttattgaagtattaccagataaacagaatagtatatacatcataaatgtacagatcattgaattttcacaactgaacacactcatgtaactaccacctagagcaagaaagagatcattaccagctccccaaaatccccccgacaaccctttcaaatattaactcccaaggttactactatgctgacttcta

SEQ ID NO: 37273 - DNA, 1668 bp, Homo sapiens
caaaccacaatttccataatacattaagaagtttaagacctcactctagtcttactgtacaaggtaatttgtccatttgctgctcctagttcctacagcccagagccatgcccaacacatgagcagttaattgtcttttggtataaaaacatagttctttctcctgtccatgaggaatatataattgctttacttctagttcttctgctcatgcattcttggcacatctattttgtgaaattctgtcctgatgattttggtattaaccaattttggtattaatcaaaattgtggtatgtggaaagctattgctgagaaattttatatccttaatgggatatccaggaagtcagatgtttctggataatgtctgcctttagggaaggaagctggaattttctggataaaggttgactctaacaatcagtaacaaatttctgatattgtgcaatgtctcttactttgctgtaagctgatccttcaaaaatactgagacaaagcacttaataaagacatcttttgtggcaccattaagcactagctagggagtcagtctcaggtccctcggaccttctttgatttattttttttttcaggctcatttatccactgtacaccctgagttaagatacctgcacagagctgggtttctcctgggcatctctggcagccagctgttagaaataaatgttttatttaattgtttaattgagtgggaaatggtttaagtagagttggtctcttgtatttcactatgcttaatgtttactttctttgcttgcctactttgaatgatttctggctttgataaattgcatcttaaatttttttggtttacctgcatgattacaatatttgcatttttttttcaaatttaatggcttaacaatgtaacgtcattcctcatttgccacttttaatcagaaactgggtaagtgaaaaatcagtgttgtggattattttatttaaaaaccctctgatttctttaaataaatcatttaaaaattcaagcaatttataaaagcacaacaaataaagccccctcttaccactcagaaaatgactgttgctaactttaggtgaatattattccagacttctctatgcctatatacagataaaagattagacaaacaaaaagcaagataaatggaaaacgttattaaaattggatcatacaacagctggtggttaataaagaactattaaagtttacttcagtttaacaaaagaaaaagaaaactgaatgatatggattagctgaactccagataaattttttctcacatgtcaggcatattttagagatctcaatcatgtgtgcttgggcttgactcagtctgatgtctatctcttggcataaacccagaggaatttcttgactgtatgtccaggaatattagtctcccctatctctaatagttcatcttattacagtgtaagtgtttttgtcagtagcctgttgttctttctgtaaaaagataaaatggaaagaaagaaacaggaagaagagaaaaggaaggaagggagggaggaaggaaggaagggagagagggaggaaggaagggagaaaggaaggaaagtttctatttcaatgtctgtattctagcttataattttagtggtcctcttaattaaagtgccatgtaacttgtggatgatactcac

SEQ ID NO: 37274 - DNA, 878 bp, Homo sapiens
acactcgctgcctggaaaattagtaaccaaggtgcaaaatattctatcccttctttaagaatctcccctgcagaaatgtttcctatgcactgacttaggtcagagaccaggtaattctcattgcatttcctattaaaacagtaaaatctcagatagaagattaaatattgaaccaaaagattttttaattagttttgcttaatgaggaagagataatctcagttgtaacaagaacctcaagtgaaaaatagttttcttcctaatttgtcccaaacattctgttttggctttgagtcatattctgcatcagtgaactggaattcagaatgttattgatttttcctaaacatttaacaactcagaactagtcttgcccacatttccactgaagatagtatatattcattctttttaaagtaagtttgcttgactacacttgattggaatgatagaagtagcacattataaaaaattctgtatcctttgaattgctgcatcctgcattgttattataacaatttaagaaagcaatagccttatttcagggtccatcagttctttgtaatgcagaaatgtgtaaatcagatggcaaaattcttgtcaatgattatgatcactctgtgacatcttgattcatgataaaaaaccaaatatacattatatattttctatagaatttaataacatttacctcaaaacaaggagcagctgtgtgggagtagaatgtacacaagatatcaagttgggaatcttgactctatcatttattagctttatcatatcatttaatatatgggcaagccatatcatttcttacatgggcaagtcatctagtctatttgagttccagtttcctcatataaaaacaaatactaaca

SEQ ID NO: 37275 - DNA, 5087 bp, Homo sapiens
gaactcatgatatctagcatatctgtagctgtatgttgcaacattttgtagctagaatgactacacagcccttcaagacacacgtacaaacaagtagtataattttccagaccatgatgttccagtacagtcaagtaccataaaaaaacaaaatgagcaatatgtcattggtgggtatgactcgcagggcattagctaatgcaattttccaatagggagtctactcaacagatataacgctaaacagaatttttcttagtaaaatttacaacttcatatttttatacttgagagaaacatatggttcagtacttacagacttagcagtagtgggaggcctgtgaaaactgtttgcagctacaacttggagcacatctttaggacttctctcagaactcttttaaggacttattctttttctaatgctaaatacatacttagttctattttacttacttgtatcattcattataatcaacatgaatattatctaaaggacatttttatttttaccaagagaaacaaactgccaaagttccttgtgctactgatttaaaaaaagaaataaatcaaagaaaaaatattgccttaatttttttgcaccaattctgcaaatggttttcaaaagctatgattaggtgcacataaattctatctgccttggttgacctcacattttcaaatcccttttctttctttacctatccactgatatcaccttctgctcctggcattgtcagacttcagtatcacacatatctatctatagagtatgcctataattctgagcattcagaccctaaacactaaacatagatcctcactatgctgcccaggttggtcctgaattcctgggctcaagcaatcctcccacctcagcctcctgagtagctggaactacaggtaaacaccactgtgcctggcttaacattgtcattctcacaactatttttatttctataaaaaattcacataattattgttatatgaaaagatggttaaagaatatgcagacaaaaatatagaaaaatataacagagatgtgccagataagtcaataaaaacattatatcatttttctggattttgtaatttttagtggtatttgtcagtttttgaaaacttaaatttgtcacaattttttttctcttattcattttcataccaattttggtctgcaattaagtattttttttcttagcaagggcccccaaattaataatcttcaggccacacaaaacctgggtctgcctttgcccagtgcctggctcagaacctggcaaattaggtatttgttgaaaggaacactctgtttctatcaacccaagggtagtgacttcatactcagcttagtgaaagtagagtcagcctatgctgagagttctttagcatatccagcctccagactggaccagtttcggcagagtggtagtactacacctgccagcagagatcctaaactcagctagtgggaagccgagatagcaaaggcagagaaaatgaggccgaagactgtcacgttgttttacagtcaagaaacaatatttttccttatgctttcatttttgaaaggtactgaaattaatgaaaagaaactctttctgtctccaaagagtatgcaaattagttttcatgtgcttggaaatttattcttttgagttatgtttctcatttgaagaatatggttactcacccttccctttacactgtataatgcgaaacatatgtgaataggattacatcaagtcccaagatatcagtatttggaagtgactgaagtcttccacatagagttccaagttaaaatactttacttgaattagcatgtgaattgtgaattgtgatattgttattctatttatgtttgtactatttccaccctaaaataatgtttaacctcaaaatttctagattgcttcatcaagtgctagaagtttaggaaactcccttaactaaagataaagtcaaatctagatatggggctgggttaactgcttcataatggagctgcttctgaagcaccagcacctagatctagagccacccatcagaccaggtgggatcacccagagcctgatgggagagatggggtagccagtcctcactcaaggtgctgggcgaaattatagtgcatcatgatacctaaggagtataacaatcgataaattcacacagttgatgctatggattctgatactcagagtggggtgccccaaatgggagaaaatatgaaactaagaagaaaccaaaccaataacagagtcagtaccagccacagggaagcaaggcagaaactccgttaactaaactgaagcacaagcaggtgcacaagtggatcttggaggatgagacagagacttgtaatcagaacttgagcaggtagtcagagttggcctggcaacatgggtgacttgatgctgaatcccatagtattgggctacagccccttaaacctcttctgttcaagtcgtataatagacagtaggataagttcagctcatggttaggaccatgaagcctttgatgagggaagaagggaactgcagaaacttggagccaagcgagaactaactgatgatgaaataaaggaaagtcctatttctgtacaggacttttgaaataaaacatcaaaagagaacatgtaaataaaacttaatgacataaggaaaataactggactcttctatgctacttctaagaaagagaagacctcttagtaaggggaaatatttttagtgggagaaagaaataatcagatttttaaaacacacattgtttagttttcctttacatataataaggcaagaaagtaactgtcaatagagaacataattaaggactcttttttaaaaattcaggaagaattaagttaggataaagaaagctgctttctctttctaatactgatttagcaactgtttgacatgaattcctcacctaggaagctgctcagcacattttttctcttgactcactgcctgactcaccagggagataggctgtttccaattctggacgtcactggggtctatcatttagccccacatataattgctcaattcctgggtctagggtggggaatactttaaaggattcaatatattgtaagtggaatttagaatttgccttgttggcatagacttggtgtctgacaagctcaggatgaccacatattagtccctaacgctgccatgttggctcagtttctatcactgctccaatctccgttccttacttagtattccaattctttatgggatggagacttataccaagacctagtcttcctagctgggcatctgatgcattgttagctctggatcttgtctcctaaaagactgaatcctgctttttatacccatagcctccacctagcattcttcttggaaggtaaatgataaccctaaagccatggaaatggtgcttgcttatcttagagcactgcttactgcttgaatatttgcctagaataacactgagattagcaccattacacccttggacactgaatggagctgactgaatagtgatcctgaaggccatcagaccagagtctccagtctctttcttcacctagggtatcagggaggatctccataatgtgttgcatggaggataaaagcaaagatttggaacctaacagacgtagggttgatcctagctctgtcacttaattttagataaattactgaatgtttctagacctattatctcatctgcaaaaatgaggataatgattcctattcacataataactatgaaattaaatgagataaataatataaagcatttactacggtgcctgcatgtaaacgctgcttaaatcattgctatttagttattagcaaatgtaagggaaaaaaactatattaattcatccaacaaatgtttagttgcctatttgctgccaattattgtattgagctctggaggtacaaaggtgatgacatgaaaaagaatcagtaaatagacatcttcaaaacagtgtgctgtgaatagtgcaatgacatgtgtattagtccatttacacactgttataaagaactacccaagactgggtaatatataaagaaaagaaatttaattgagtcacagttccacatggctggggaggcctcaggaaacttacaatcatggcagaaaagaaagcagtcatgttttacatggcagcaggcgagagagggcatgtgaaggaggaactgtcaaacacgtataaaaccatcagatctcatgagaactcactcactatcatgagaacagcatgggggaaactgcccccatgatccaatcacctcccaccaggtcgctccctcgacacatgggattatggggattacaatttgggatgagatttgggtggggacacagccaaaccatatcaacatgtcagccctgagtgatacggctatacatatgaggggcatctaaaccaggagagacaatcctggaagagtatcctaaagaaaagagctgattaggagaaaagagggataaaaggtgctcctggcagagcatgaaagagcttgacgcatttgagaaattgcaagtagtctatcaacatggctggaatacagacagaggacagggaggtgagtcagagcaggaagtggaaattaagtaggggtttctcatcatggcccttgtggctgggcaaaggaatgtaggatcagacctgagggctatgagtagcagatgatgggttttaagcagaggaacaaaatgatcagatttgtgttttagaaaaaaaaatcactccaaaggcctcatgaataacatcatagattcaaataacagtgtaaaaaaaaaaaggcagaactaccatggtagaagcctaaaagtgtttgacaattcctccttcctgtgctactcaagaggtatgctctcctcttcttaattttgaaatgtaaatgtcatcacagaataatttcaaagacaataggataatgaaaataaaacatttttagaataaaaagtctttcagtttgagcttcttgatttttttttttagagacagggtctcattaaattgcccacaccagagtacagtgtctatttgcaggcacatttatagcacactattgccacaa

SEQ ID NO: 37276 - DNA, 2681 bp, Homo sapiens
gttattacctgcattgttatttcctgtgctttactaatggctgtgagttcctcagcacgtttacaggtcaggtggcttgggtttccctaatagtcataaaccagcaggtggaggatattaagctttctgctctgcaagcccagtggttctcaaacatgagtgtttatcacaatctcctggaggacttgtattaaaatacagcttgctgggctccactttcggagttttaattcatagacatgcagtaagacatgagaatttgcatttatttaacaagttctagtaagttcccgggtgatactgttgcttctggtccaggcacagtatttctagaacctctattctagcccaatgtcagaaaagttggtaaactgggtccccttcacttaaaagagagaggaaggagcttctttgctctcaggctctccaagtacaaaggagacagttttcacagacacttggcaagagagtgactctatctacctatgcaggcccccttttcctcttagacaggggtcagccttcctgagctacagacttcatatgtcgctcatttaccctctcctatgagagctcacagattttctcagaagcatggattacttccaagggactctggcagttgcttttagtccctgagttgctccagtaaggaactgtgggaagagagagatcaggaacatgtgttcattttcttcccaaaaacttcttctgtgagaattaagggagataaaagcatgatgtctgggacattaagagtacttaataaatgttactgtcattgttatgacttcaacttttttgaagtggatgtttgcaaagatggttgcatcataacagaaacagtacatgagatgaacaggtttgtcaggaaaatgaatagtttagttaggaacattttaatgtttataaattttatatttattttcatattgataaatttttgtatcatggctctaaggttaaagttgaggaattttataaaacagaccagattagtaatctgagagacagaggagacaacagaaagcttgtggagcttcttttgggaaatagtgatgcaacccagtttgagacctaactagctagaggataacacaaatgctagcagctggctggctcacagagactcgtttttgagagcaggcagtaagcacatgttaagcttgtgatgtactttggcagacagtcttgacaaacctatctcattctttaaacacatggttccaaagttgctaagcaaagttcagtctgaaccttgactttgcctcccttagaagcgggggcttgtatattttgcaatgcctcattaaatatttccgcattttggtctctgcaaaaaaacgtgtgttctttttaggaaacggtggttttttggggacaaacttaatatttgtatcttagttatccataccaatattatttctatgctttatacgctttcaaattactctgaggcatttacctaggttctaggaattacacaaaccttaaagtaaaaaaaacaacaaacaaaaatcccatataaatttaacttaaatttattaaaaactatagtatatatacttatttctaaaactttagcaaccattttgtggtttgttttttaaagccaaattatgagactatagcttttgaaaatctacatagtcaatattcttagaagtgaaaatgcaattataaattcattccacatgattcagttacatttaattcgacatgtgactagtaggtactggagacacagacatgaataaatgatgatgtccttgtccttgaggagttcacagttcttctgaccatgtgtttgactatttgtttccatgtctctctcacccactagactatgatttgtctagtccctagaggaggaggtgactgactctgccagggagtctgaacttggaggtgtcattaagaaggtgaactctgggttggctcttgaaggatactaagatttggggtgaggaagtagggagagaagggcaggacaatctaaatggaaataacagaataagtgcaaaagcactgacatggaaaataattgttaagatttacaagtatcactgcgtggctacagctcctgtgttcctttgagtgtagtacaaatgaggagggtagagttaggtgagaccagatagtgaaaggttctttttctcatctaaggagttttgattttacctgtaggtggctgggagacgtggaagctttgtaagcagcagagtgacaagatcagatttgtgttttgacaacaacttcagtgtcaacagtacagagagtggaccatggtgaactacctcagacaaaaatctagttaggatgtggtcacaacaggccgtctattgctgtttccaatgtttgactcaatattagtctcaaattctattttaaaattgttacataaaatgataacagtcagtgaaaatgagctaaaactataggccctactcaaaggcttaaagctcaaaattgaggatatcaaaggatttcagaaaaaaatacacacacaaacgcacacttaaggtatgaagttaagtagtaaggataggttttcagcaccttttcagtcactcagctaattaacataagactaaaatatgaaccacctctgtgtgagggaagagggattacgattgttgagatatactgtgaaacaattcaatgttttattaaagaaaata

SEQ ID NO: 37277 - DNA, 2939 bp, Homo sapiens
aaattaaaacacatcaacaaatatttcctgacacaaaattataaaaatgagcaaaaagccaacatacacatgtatcttgctcaattcaatgccattaaaagttcagatgcatcagtttgccaaattctctgttgaggaaaaatagtcacttacgtaccaaaaataacacattaacaagtatggtgtcttacttcttataataggatacaggatactgtatcctattttttcttttttgcctactaggagagtttttgctttgcttaatttaatacatatcctcagaatcagggttcaagagtactgtgaaaaggccactctgcctcgctagtgggtaatatttggcaatatatattaaaaggctcttatcttctgacttagcacaattctcagtattcattatggtgacatcttgtcaccagaatactgtgtcctattataggtattttaagcagtccttgttaacttttagttcttttttctcttttatatttatgaaaattaattccactaacagacacactagtggtgtaactttgaaataaaatttttaaaaagtctgctacttctttcttaggcttctaagttagtttaattgagaagtatcctgaagttatcatttggaaatacttaccttactcttgcataaccaaaatagagaaataaattaaatgataatgcagataagagtggaactgtcatccataactcctgattttaaatattttgcatgttcaccaaatagcatccctcttctactctttaaaaaataaatgctatacagttaaacttaaaaaataaatccgtactaacaaatatatcatttttctaactttgaagttctaattttgaagttctctgtaagatttaatttggaaaaatggtccaaagctaaaattaattttgagaactacttctatagaccattgtctttgtcacaaatccatttggtatttatttgacttttaggtctcccatcttttgaaaaatcttctaaaaatgcaaatgtaatctcttgtgtctcaagactttcagacttccttgaatctttcttccttgtaagtcatcctagaaagactccctagtgaacaaaatgtgcaaattttaaaagcagcttatactgcatatttgttaaaattccttcaataaacccaaaaaaatgaggcaagagtttattttctattatacaatcccctgttacccctgttacttggctaacaaaattaagccctccttctgaccctgtgtcattgtattcttctcaatccttcagctttgttttattaaacaaaatatgctcaatatttttcttgtttcttttctctttgtttttcttagaattctcaaaagatgtaatattactatgattcaaatagttcaatcaaaccagtgcacaggttttatggtctcctatacatgttgattgcatattggccttattagtcacagccatctttatagccagcaacattttaagaaattcactgatcatggattctataataatttatttaagaaagtgagctgagtctaccatctctaacatgatcatttcatttgcataagacagacaatccaacttaaaatggcctaaacgaataaaaaaaattattggcttacataatttaaaagtccatggatagcctgcagaggcggatctcagttaaacggttcaaaccttgtaatcaaaactctgtctcttcattctccactacgctggcttcattttcaggcttcatggaattcctaacaagagggatcttaacatgtctaggtaacatcactaagcagcaaggtgaggaatctctaggtcaatagctctgaagggcagcagctgtttgtggtcttttatagccacagagtttgtcttatctatggccagaagatgttgggtgcagtttcatgggggtatgccaagcaggtatgacctaatggctaaaatatgctcatttgagctatatttaaagcaactagacatgcaagaatttgagtctggcactgacaggctttgatctactggtcctagcctgctgcaaagaagtaaacattgggctaatacacaggggccatctttaacccatttatgtaacaattgagaaatctgtcttttctccctggatgttttttagatctcttctttatctttatttaggtgtggatttactttttttttttttcattcttcttgccactgtgtctcctgaatttccccagaatgctcccaactcaaagtttttgcatgtcctagcactgcagcttgaaagcatttcttccagatatatttttggcttgctttcccaactggctcaaacctctgctccaactatttcctcagagagggcttccctgaacccaacttcttcaaactttctatcccttaccctgctttttaaataaaacttagtactacttgatattatatgaaatatttgttcatcattctccttcccccaagaatatatatctatgtggggagagaccgttttactcattgctatatacttagtacctagaacggtgcctaaggctcaaacatttgttgacttaatgaaaaaataacctctcctctatgcttcattttctcctttttaggcagatgaggttttctgtgtaactatgcagatggcccaaatattttcactgtcagatggaacactactacatacaatcatcaaggttgtattcaagatcatccttagcattggttttctttgtgacaatgatacctaagattttttatttcttttgctttgtcttcttcctattcaatccattgcctggattctaatgttttaaactcttgcccctgccctagccttccctcttgtgagccttaaataatctttaaaaattattaagtttaactttttctattttgctaagcaatggtaagattgactatcatttttttactcaagaaaattgcttaatatttgctt

SEQ ID NO: 37278 - DNA, 4562 bp, Homo sapiens
caggggtttgagaccagcctggccaacatggcgaaaccccgcctctactaaaaatacaaacattagccaggtgcggtggcacgagcctgcggccccagctactcgagaggctaaggcaggagaatcgcttgaacccgggaggcggaggttgcagtgagcctagactgtgccattgcactccagcctgggcgacagagcaagactccgtctcaaaacaaaaacaaaaacaaaacaacaacaacaaataaatctcttcattgtccttcatcttttgcaggctaagtaaccctacgtggcccaaatctttcggtagtattttattttggtactaatgctcattggtaaagactgctttttcagtgctggaacaatttttgtactgtatacaaaggatgtagagattttgttaagatcttcagtctccaaatgctgttattaaactgtagacatctggattttagacacttgttttgtctggggaaaattcgttttacggccgagaggtttttgagtgtaatctttttggatttcatgtaagaaacacagtaccaatggttgtcattctctagtataacaatttttcactagccttttctgtgttgtttgttctaataacatttccatataaagacgtagaaccaaaaaatcaaagttcctttgtttagacaatgagtcattaaaaaattctcactttaccttggttgattagtgctgcccaaagcctcaaactcttctgtaattaccgtacttgtttattgaaggcacttaagagaaggcgctggcaaatcatctgccctggtgcgggctatttgagtcttaaagtggaaatgcaaagtctgaaatgcactcgctgccaggcacactgagtcttagatgcaggtggggttgacggtaccaggtgtgatttgacaagccgtgggctggccctgtaacagtccccaggctagtgtcaagttccgtgtaacatcctctttccttgaggacttcaagaatctaccaaaagaaaagcatctcttgaggagtaacttaggccagttccacgttgaagagaaaagtaaacgcctatcacagcagctctacaggattaggaaccggggcaatggggatggtggtggttccggtgagggagccttcacttgtcactttcttcaatgcctaaaccctccttttgttagctggcccacacaggccaatgcctactccctaacgcatcctcaccctcccccaaccagatgtgatgaggggagcaagcgtcccctgagaagcgtctgggctccctcggggcagctgcggtggggagctccggctctatccgcagggctttctttagtccctagtcagcgggaatatttttactgattggaaaaataaccagtcgtgctcaggtgctctccctcactgagatatactggcgaggcttccctggccgcaacgccgccgtaagtgctgctcccacgcgcggtatccccgcgtactgctcagtgcccaactccgacgggctctcaagtgccgcaacgccccgccccttgccacctccacacgtctcattggccagagcctgcgtccgcctcggctcctgactggcggctgcgcctgtcggtccgtgcggcagggacatttccgcattgaaggggctgctccgaatggagggggaggggaggtgtttaggagaaagtaggggctgtgggtgtcgggagccggctgacgggtggacaagggggggttagcagctgggctgcgaccgttagggaggggctcaaggtgtgcatgtgtgagggaagagagagagagagaagggcgcctcagaggtgactttcagcctgcgagccttcttcccggggcgccataaacgcccccaatttcccagctgctaaaggaagaggaaggtgggtctcgctggcggcttgaggaggggcggggttgggcttccggcgaccccctggatgagtgtgtttcccgctctcgctggcccgctgtgtggtctcggaggcggaatttgggcttctgaggagcgcagggcaggcggggcgagaatatgtacgggaagggtcggtgccctcccttgggactcccgcgccggtgcacgggtctgcctctagccggtgaccccttagtgtccgctgcgggggaggggcagcgtagccttcggcccctaccgagaaaaagctgcggccgggtttcactgctcgaggcgggaaggcggggagctgaggccccgaccggtcggccagccagagcgtggaattggtagcgcctcctagtcccaggatgtttatggctggtgaaaatggttgcactgcccccgctggccggcctcgcccgcctccccgacccctgcttgggcgggagccgctgttaaccggggttttcgggggaggcgtttggggcctggacggcggcgcggggagggggcagctaggggcgcggcctgccagtgcctcctgcagtacagccctggagggcgtggggacttgggggcggtgaaatagccgctgtaggtccgcctctttcattgaagaaatttaagttcgtgtggttttaccttttccgggagtctccagctggccctcatttgtgtccggagctcaggagttcccaaaccgactcagtcgcaccaagtttccgtcttttggaattggggaaggagtttctttctttcttttcttttttcttgagccagttttaatcgctttgaataaatactcccttaagtagttaaatataggaggagaaagaatacatcggttgttaaagcaggagaggaagagagacctgccctgtagcgtgactcctctagaaaaaaaaaaaaaaagccggagtattttactaagcccctaaaatgtcgagatttgtacaaggtaagaaatgctgctgcttatatcccgagttgcttcaggcaaatttgggtactgacagtggagaggttggtgggtggtttggaagtggaaatgttcatttgagataacatttgcgaaacccttttcgttgaattgtcatctgagctgccttgagctgctgggttgacgttccagacgcgtataatttatgctcctgtaccctgctgggtttagttttgcctccctgaaatcaggttagtagtaccgtcgctttcctggatagtggctgtaagtgataaaacaggatttttggctgctaattaatccttgttctcttttcctggtctgtgtcaaggtacctgtgcgtgcacgcagacgggaagggctggggaagcgggaggactgagaaaagccgggtgggttttgccgggactgttggggaagctttagtgttctccgcttctacttcgtttgtgtgtacgtggtttgcgtctcagattcacttattgcgaaactgggagtagcccgaagaagctggaggtcatttcagctggagaaatgactttgctgcattgctgtgtttattttttccttttttgaactatgaaaagatgattaaggttcctttgaagtttgaaaactgctctctaaattccacatgtgtatttaaaaagggttagggaatgcctcaactgagattatcagtaacgtgtatatgaatgcatgtgtgtacggtgtactcactgaaattggtgctggcataaacctttgacaccagtttgtagcatgagatttgccttctggtatgcaagtaaactctttccttgtagactccagtgtgtgaaagcttcagccatcttgatgaacacacagctagtaaagttcacaaacacttattatgcttcctgataaatgtaggtgtacttttggaaaaaaaaagttgtgtcagtaatggccatcatttgaccctgggaataaaaatgccctactgagttctacatcgctttattaactcttctttaaattttgtgtagtagattaaagtaagagaattcgactgcctgtgttattatcgaaacagatcgaacgctatgcttgcctttagcgctaagctcagaaatgtcacttgttattagactttcaaattcatgttataccttatatgtggtaagagatgcttatgttctgattgagtaaatgtcttattcaagaatagaaaggcagaactgttagaaacgtactggttttgtaataacaatattcagttaccataaaggcggtattttgcaagaatatgctaggtaaaagtggacaagttacttctctttaaaagttagaaatattaataaacccaaggtgttccatgtagagttatgctttagaataggttgcagaattggcaagcattgactgatttcacagcctttgctgtaatgccaacttgtcctcagaagattcaaaatcaagtggtaagagttgctgtgtatgtttgtcattactttgtcatccactttttttaaaaaaactttttatattttggaatacttcaggatttatagaaaagttgcacatttgtcaaaactaagaaattaacataggtacattactgttaactaaaggctttgttcagattacagttcccatgattcactctaagataccagattgcacttagttgccagccactttttttcttttttctttttctttcttctttttttgtca

SEQ ID NO: 37279 - DNA, 757 bp, Homo sapiens
ctccaattctctgactttgagtatctctcattgtgggttttccaggaaggttgggactgatcagacagaggtggcctagggatggctcttcaacttctctgttgctcttggtgccttccctgtggtttttccatggcctgtgcattatgaaactagcttgtgtacttattttgtttgcgccagtgtcagggtgtcagggaagggtattatgtatccctcttacttgctgaaatacatgaaatgagatccatgaattaagaaacaaaaatattcacttgtcagattgactgtagccctctctcttttttggctccagctggataaaaaagcccatgatgttgaaattttagttcctatgaacaggaagaattaggaaactgggggaaaggaggaacttgtgaaaaaaagttattgcctgttctatctgaaattgacttaaagtgtctagtaagtccagttttatgtggtggggaattatcttgtctgttgattgaacataagaagaggttctgatataaatgcttttggaggagagtgtggtatttagggatttttgcgtcaaggttaaagagagccaggccaggaaaaaaacattagcaaggtatttctgcctcactgtggtggaatgggactaaaaaaacatggctttgcttctgggctccaccattggcctgctctgtgaccttggataagtcattcaactattttcaacctgtttcctcgtctgtaaaatgatgagagtaggttaaatgctccc

SEQ ID NO: 37280 - DNA, 3944 bp, Homo sapiens
aaaatcttgaggcaatctggccaagcatctgatatagtatgccatataggatgatttgctttgagcatgtgaagatttcccagctgcaactagccaatgataaagccattagagacttgttttgtgtgtatgtggagatacacacacaaatgagattctaaaaagtattccacaaaaaggaattagtggcatttaaagaaatggctctgaggacatggctgaataccaaagagtctcatcatttctttgacataaagttttaaaacagtaatatatagaaatactgacactaagcagacatactaatttagcaaatattgccaaagcttcaacttttgatttcatgatgaattgaacagtttttgaatttccctcgggattaccttccttcacattccttcgtgtacaggactttcagaaatggggacctgataaaggaactgacaacaagcccatgattattaattccatactggttacatgtctataatttcactttagaaatagcaatagcaaatacatggaactttaatggcagttacatatttgatttgatagactcccggttttattgttggaccagggtctctaactactgcctttgtgtccaaagtagaggacagtccagtcccacagaattgaattcattaggaaaatcagagtgtgggtttaggtggtaatactactatttgaacattgccagtccctccaattccaatttccaccccacagagaaagtatggtgttaaagaaatggtgttaaagtttctgaaacttcttttgcccacaggcaggctaacaagaagggagatacaagatgattttagtaaagagtcctttactaaggactttactggaacagattgtgacgtaagcaggttggtatttggaactccatttctgttagcatacctttccagctccctgagtcatctacctttgtcctttctaatcatactaaagtggagtgttcttttaaaactatcttcttagctgataaggatatgggtcagatgttccacaaggttgactaattttatgacttcagctgacttctataaaaaggtgatgaatatacataactgttggtagtgtttgaatttttttaaaccatctgtgtatcacttttaccttttacacttaaaaaatactcagaagtctttgaacttcttaaaatttctataaaaattctagatacagtaaggtttagggagcagttggtaccttctcttcataggtaccatctactttgtaggatcgtttgccatctgtaaccacagtgttttacttatttcttgtttttttcatctgggttttctgccaattcttttattgtcatctcttctctagttttccaggtttaaagtgcacagttgggagcattataattttacatctctttagcattttggaaattgctacaatttttaatgaaagggcagtagttacatgagtttgagaggcaaatatatcaagaggaagaaataaaatgctgtaagtaggttaacacatgagcattgaataagtgagaagcaacttacaatatgtgttttaaaatcaacttttaattttagaatagtttgatttacaaaaaagttgcaaagatacactatttttaactagaaacattataaagctatccaagctaatttgttactgtatctcatttttaaaattcccactgagtcaaaggaaggacaaggtaataactaagagtactgatggaatttttctttcaaggtcagaagtgaaaatatatgaaagatagctgagaagaaacttggatgtgccaggagaatacctgtgactagactaaatatggaaagaagtagaagtaggccattaaatacagatttctatttatagatgggcttatttaagacaagtgtcttcatcgtacatagtcctaatgccaacagcagattggaaaatattctcttatttcaaaagaacaagaaacaccatttcaaagggttttttggtttttaatgaagcaaagctttaagcatttttccttttttaaaactttgtaaaaagctgtgtatgcaaagctctatattctgtagttaatgattattgccagtgtttgggtactgacatgtcaggctttgtgctgaatcctttatgtttgtgatttcatttaatattcataacagacctggaagataggtactgttatgtcattttacaaaagaggaaactgaagttcagagtaagtcacctaagagaaggggccctgatgaaccaggtgtagatagtcaggccctaagacctggttctttggtatcctgtagtaacaacaaggagtacatccctatgtttatctctagtgcacagaatgtggcatattttatgtgcttatcaacaacagtagtaataacaatagcaacaaacatttattcagcactaataagcattcttctcaactcttctacatgtgttttcttacatgatactcagataactctaggagctcactgttatcctttttttcataatgcaagacacagtgggggctgagagggattgagttatccacacaattttccttagctaataaggcagaatttaggcccaggtctacctgagcccgcattcctaatcactatgatgtattgtagaacacccaccagttaccaccagtgtttgaaagaaacttgaaagtctttaaagtatggcctttccatcagttctccatctttgggtagagtagagcaggctccattccttcctttagagcctaaaataccctcacttctctttgaagttcttcccacgatacatttaacaaatatttattgactagctactgtgtgataggcactgggcactgagatacaagtgaacaagatagtcaagggcctaatactaacagagctctattctagtgggagagataaaacataaattcataaataagtaaaataatttagaagactaatttcccatcactgctcttctggcccaggcttacccccaacagtcacatctccctgtctgaagtacttttttctgatttatctgtagtcactatgtgaggctgtcgaagtctcctttattcattacatttattctacagacctatcaaatacccactgttttattttaattattgggaatgcaaaaataaagacagtcactcccctcaaagaacttaaaatttggaccatacagtgtttcccaaattttcccgtagaaaatgagtagggtaaatgtaagaggccgtttagttgggaaggaggctgtggctgcctccagccctgcccagctgcctagagggctgaaggaatcaataacacaggcatgcaatagcaagccagttcagaacttttggtttagtgaggagatgtttgcacaaaaatatgtttattgtgcaactgagtaatagctatgaatgtggttcaggagatatttcactaacaggcttctacctagagagaatgaataactggtgttctccattctcagaatgcttgggtctatttttttttttttttttttttaaagagacagggtctcactctgttgcccaggctgaagtgcagtggtgtgaccatagctcattgttaccttgaacttgtgaactcaagggatcctcttgcctcgacctcttgagtagcagggactacaggcacgtgtcagcatgcccacctaattttcaaattttttataaagacaaggtctcgctgtgttacccaggctggtaactcctgggctcaagcgattctcctacctaggtctcccaaagtgctgggattgtaggtgtgagtgacctcacctggccttgggtctactttttattatgcatatgttctcccaccaaagtgagtggcttgcttaccgaagtcagttgtgcttgttctcaaatgtgttcatgctagttatcttggttataatgacataatataattaaattttatacaaactagtgaaatgggtttaaa

SEQ ID NO: 37281 - DNA, 1433 bp, Homo sapiens
agagctgcaccagattcactactagggctgagggtcacaaatggcttctaaaggaagtgatagttttgccatttggttcttgaactccttgatggggcatacatgtgtgactgcacatacacacacaaaatattttttaaattaaattttaaattgtaaaatacacataacataaaatttactatcttaattattttaaaatgtatccttcagtgttgttaagtatatttttattatttggcaaccaatcttcagaactttttcatcttgtaaaactgagactctgtagcattaaagaacagttccccattcccttctaccccctctcccctaatcccctggcaagcaccattctggtttctgtctgtatgaatttgattacttttgatgactcactagtggacaaaagccttttttttttcctccttgctcttactgcccaggctggagtgcagtggtgcaatcttggctcaccgtaacctctgcctcccaggttcaagcaattttcctgcctcagcctcctgagtagctgggattacaggaatgcgccaccatgtctggctaatttttgtacttttagtagagacggggttttgccgtgttggccaggctggtgttgaactcctgacctcaggtgatccgcccgcctcggcctcccagtgtgctgggattacaggcgtgagccactgtgcacggccacaaaaacctttttaaatctcaagttttctttctgttgttttgaaaattgcctgatttctgttaccaattacatattactggttttgctttcctggagaaatttgagaacatacaaaagcctagggggttgtttatatggcagcgttcttgccagtggaagcacgaagccaacatatagccttagttagagagaccctcttttctctggccatcctgaggcgtctcaggcagtatggagctattttaggagaagaagcatggtttgaaaagggagaaatattatcaaagcttgggttttttccagaaggctttcttaaatcaggggttggcaaacgttttctgtaaggggcagatagtaaatattttaggttttataggccatacaatttggggatgattactcaattcagccatggtagcatgaaaatagccgtagactatatgtaaacgaatgagtatggctatgttccaataaaactttatgaaaacaagtggcagctctcacagaccatagtttgttgacctctgtcttaacatcctcaggctacacatgactggagagaaactttggctgaagcccatgtctgggagatcattcagctagttcgtgacttgaaacctagaaattcaatactatatttcatcaaatttgggccattgattataagttacaccttttatgtaccactaataaagaaaagaaatcaaccaattaattgtaagaacctattggt

SEQ ID NO: 37282 - DNA, 419 bp, Homo sapiens
tgctgtgttagaggctggattacacatcgctcaggacaaaattcaacagaccactcctgttcaatatttaggaatcatggtcgataaacatattcaacctcaaaaagttcaaattaggagagattatttgaaaactttaaatgacttccaaaaacttttgggtaacattaattatttaacacctactttaggcattccgacctatgcactaacttgttttctatgctgcggggagattccaatctccgcagtcccaggactttgacccctgaggcttcactagaactggaattcgtaaagaattcagaccatccagttatctagagtacagccgtttcagccttttcagcttctggttttcgcctcattgcactcccctactgggctaatagttcaacataatgatttagcggagtggt

SEQ ID NO: 37283 - DNA, 3233 bp, Homo sapiens
gtagtgtaataattcttaagttatcagaacataatttaaaaatagccaaattacaataaaatcgcaaacatctactgtcgtcccaaacaactatcaattacagctactggtaacctatcataagcaatgatgagcactacgaaccatcaacatccatttctaggaaatccgattctgactacactacaaatacagtcaaacaaatcccatcattccctctgttccatcatttaactgcttagaaatcatttaggctctgaaggtgctttttccaattagaactccccttcggatttataaaagtgaatgtacatcaaaatctgcagtttaggttatcgcagtaatatttctcggtatactacaagtaatttatcacggtattacttaaaggcgtttagtattaagaccgcccttgatttgacaaatcagaaatacagccaattaaaaacaaaaacagtccaaacaatttaattcttcgaaagagcctcaataaagaccaaaaaataaagctggttagaagaaaaaaatttttttttgaaacgcctgtcagtcaaaatgctaaaaataccatcttgaactcaacacatgaacagaccaaacggctaattataattggcaagccaaagttcccaagtcaacgacgggagagcagaaacggcagagagggcctgccctttctgtctatgcagagatggaaggaggcagaactgaagaaaattattgcacaaattatttcaagctacattgccaaaatgcaaaatactgagtaactctttgggttagccttccccggagagaaaaacaaacaaatgttttaacgattccagtagaatccaataggactaagggcctggctggaaaaagaaaaggaaagtttgggggcagcgtctaagggggtgatggaagttccagagctgggatcccggaaagataagagaggggcaagagcggcgtttgcggtcgctgacaggaggcagggaacacagctgccagccccgatcccggagggagagtgaaaaggaaaaaaaaaaaaaaaaaaggaagtggcggagaggagcatggaagcttcagtgccggtcagctgtgaccgaaactcggtccgtttggggctggggaggagagccgagggggtggggtctcggtccctctctccgctgtaggtcggggtgagagtgggctgagacgcgcggggggccgcggggcacacctacctgcgggtcccggggcagccgccctgagcgaggcctagtgcatcgccgccgcctccagccctccacgtcgcaccgaggctgctgctccacggccgccgccgcccggcgcccggccgggcccgagcccgggttcccgcccccgccccgcgcccgctggccagtcggcccggggagcacagggccgccctctcgagcccagcttcactcaggggtgagaggtggcagcggcggctccctcacgtctctcccgggtgtcctgtcagccagcagtttcccccgggtccgcagcgccgcctccgccgctgctgccaccgcctctcccacatccccggcctccaggggagccgccgccgccgcgccacgaccactgcctctagcgcttctgctcccgactccactgctttccctcaccccgccggcccagccggctcggcccggtcgggtgcggggagacagcgccggaggccgccgcagcccccagcccacaatccaccgcgcggctccgccggggcgggagggccgcggcccgggccggggggagcgcccgccgcctggggaaagcggccttggcgcaggccggcgtgcccgtcgcaggcgcagccagagttctctcggggcggggaatacaccgcgtggctcccctgcgcctcctctaatagtcctacacgcagacaaatccacgctgaattccactttccccaccacccttccccccaactcccagttttcaggaacacccagaaaacctcctgccgccttccccgggactgggacgcgacccctccagcgtagccctcgccacccccaagaccaaccgactcgaaacatccctaaatcacccgggacctattaaagcaaatacttccacgagattcctcctctcccccaccccctcgaagtaaatgcttttcagctgttccctagtaaatgcccttccaaaggttaaaggtcacccctccgcaacaacccagttctctctattgaggccttttccccatccagtcctcccctccaagtcttccccaagttccaggccttcctcccagacactgtaatcagttattcctgttacttgactgagatacttggagtgtgtatgataattaataccttctaattctgacttcagcctggtttcacaggacttgcaactttaaaccaataaaacacagtccacaagaaagggaaggtcttagtatataaatataaagacacacacacacacacacacacacatatattttaggaagaaaaagatcctcaatcctttgagtgcttgtgacttaattttgggaagattttattcaatgttgaaattcttgcctaaaaataaatttcaagcatttataagacatagtatgttttaacaaatcaaaagtgaaaatgtaactcttatagttggggggttgaaaaaaatgttgatccaagtttcacttctaagaagtcactttgaaaactgcaaacataacttttatgaaataatattttccccaccaaagagctaaagttggggaaagaggacaaaaagtaaggaagcatcaaaaatagttgagagaaaactcttacattatatttttctaagttcaatcctctaaaattatgtaagaaacaaagtgagaaaatcattccccaatatgaaataaatttaactgtaaaagagtgaagtcctcttaaatccctgatcacttataaaaccagatgagtttacatagaagcagagtagaatggtggttaccaaagactggggggtaaagggtgatgaggaaaggggaaatgtgagtcaaagggtataaagtttcaggtaggaggaataaattttagtgatctattgcacagcacgatgaccacagttaataacaatgtatttaatattccagaatagctaaaagagtactttctttgttttgttttgttgagactgtgtctggctctgttgcccaggccagagtgcagtggcatgatcttggctcactgcaacctctgcctcccaggttgaagcaattctcctgcctcagcctcccg

SEQ ID NO: 37284 - DNA, 1484 bp, Homo sapiens
aggctgcaatcaaagcatccatcagcctgtattgtcatctgaaagcttgactgaggaagaatctgcttccagtctccttcaggttgttggcagcatttattttcttgcatttacagactgagagccctggctccttgctggctcaaggctgccctcagattttagaggccacctgcagttcctcaccctgtgggtttccctaacacagctgtttacttcatcagccagtgaggagtgtctttaaagtctctaaagtgaatctgctagccaaatggagtgatatcctagcatattttctaggtttatagcaggtcacaagtttcactcacacttgaggagaggggattacaaaaagtgtgaacaatcatggttgcctttgatggtagcaatcatgaagggctaccctcgagcctatagttaataccacaggctttggagtttggccaaccttgggctttaaacttggctgtgacactttagctatgtgactttattatcagcctctaactcatagcttgttcatctgcaaagagggaaaacaagctctttgcactttatttttctcccatgtaaaatgggactaataatagagtttaaggattaaatgagcattttaacacagtaactggtaacatgaaatactcaataaacacttgttagttttctccttttgttccccctctttccctcatctctttttattttgaacctggtctgttagaagtcccagttggcatttttaccctttcaactgctatgtatttaccctgggtccagagttcatgtacatgtgtgtacacctgtatctagggccattcaaaaccaattctagtatcaacaccttaaaaaaaaggatggatagtattgcaaatgttatttccaacttgagcttggaaaaataaataaaatgataaatgcataacattagaaagatcattattagacatagaggctttgagagtttagagaacgttgctggggttggcttcagttctccctctgaatcatgttcaataggtacaaggtacaaaaggacgtgttctggcataatagtgttcctgggctctgagtttgtattccagctttgccactttctaagtaaccttgggatattatttaagctctttaaagctcagttcattgtggggtaatgatagtatttagacttcgtagatgtgctgtgaggattacgtttaaagtgcacagtcagccctcaatatctgcggattccacatcaatagattcaaccaactgtgtattgaatatatatatatttaaaaacaataaaaaataccaataaaaaacaatacagtataacaactatttacattgcatttacattgcattaggtagtataaataatctagagatgatttaaagtatctgggaggatgtgtgtaggttatatgcaagtactttgccattttatataaaagacttactcaaatccctgattttggtaactgcagaggagggggtagtcc

SEQ ID NO: 37285 - DNA, 594 bp, Homo sapiens
tcctgggctcaagcaatcctcccacctcagcctcccagagagctgggactacaaatgtgtgccaccacacctagctaattttttgtagagatggggttttgccatgttgctcaggctggtcttgagctcctgggcttaagcaatcttcttgtcttggcctccaaaagtgctgggattacaggtgtgagtcaccatgcccagcacccagggcagaatttgaaagtccttgcttcagtgtttgtacagctgttcaggactttccagtgtatcagttattcaaattttaaagcacttatcaaagagagcttagttttcagtctcaaaagtccaagaaagacctaaagattgttggtggttattttatagcacacccaaacaaatctttcacattgtctctctttagaccacttgcctctgatcaggcctgcctcctcagccacacttcaaatgaaagaaatcaagtaaacaacttttagcaatcagggcaccctaaaatagcaggtgatctgcagcaggttaagcacacaccaacatacatgcaaatcagtcaaattttgtacctggcaaataaggctaacaatttatattttgact

SEQ ID NO: 37286 - DNA, 1342 bp, Homo sapiens
aatgagcatctttaacttttccacggggctttggagaacgggttcttcctcataaacgctttcatatactcagacacgaggcgcggtagaagatcaagcgtatccatcaatttgagagcttttcacgacctcagtttacccacttagggaaacgggcgtattaacttgtttcctaggggacccgggggtgaaattaattagcgtgtttaaaatgctctgagatccaaagatgaaaggaaatgtgaaagacgcgcagagatgatgacaacaatcataacaataaaaagaatgactaacttgaagtctgcgttatgtaagggaggaaaagaagttatcagatccgcacaaacaaaagggaaacccaccgccccttttgtttctcccatttccctctcctccccgccacccgcagagctcccctctcgcagccggagcgcgcggccagccaggcgcggggctcggagttggccgccgcgcgccccgctcccgggcggagggggaggccgcgtagggccggttcctgacaaaggcgcttcctcgagccagggcgcgggatgcaggcgccgcaaactccgctccccgccgcagcgggggcgcgcaggcgggcggggagagccggctgctggccgccggggaagccgccgaggaagttgcgcgcccgccctccccgcgcccctcggcggccccgccgccatccatcccgcggcgccccgcggtcacacttaccggacaattgctggtggccgggatcccagagcggcccccgagacccgaggcgagagggtgaagtgttgtgcgcggggagcgcgagcagacagcccgccgttccgccgctgccctccgcgcccgccagccgagcccagcgaggggaagttgaccacggagccgagcgctgaggagccgcggacgcagggagaggcgttggggctgctttgtggtgcgctcccggagggctggggaccaattcgaccgcaccgcgggactagggctgctgccgctgctgctagtggaggcggcggcggcgccccccgacggtccctccgcctcacaccgcctctgggtcactgacatacactcgcaaggaggggaggggtctagccggggggcggggcctgagggaggggaccgggcagggccacagcggaaggcggtgtcgccgcaccgagaaggctcttgggaattgtagttctccggttgaagaaaaaagggattcattgttgtccagcaccctaccaggctcgctctgcactgagcatgctcgagggcgaggtttggaccgccccctcccaccgttaccatggtcaccgacacacttagcgaacgtgttcagtgctgctgttgg

SEQ ID NO: 37287 - DNA, 603 bp, Homo sapiens
attgttagttgatacttaataataaaatcagaacatgtcaaattactctgaagacaggtccccatgtacagctttgagaggtaacaaagggccagattagtgactgtgtgtaatgttaagatttgggaatggtgtttagctggcagtcattattgcatctcacctttccccttggaaaagtgtctgctatgttgcaatcactgagcaaatgccaaatgccttctgggaaagtctgatactgccaagaattccctcacccccaagctgtcttccattgtgtgggaaagttttagaatttctagtctctagcatgctacacctaaatcctggccaaccaaccctaacaaatgtgtaattcaagcagtcccttagattgcttgggtaaccaaaaatgtccagggaacagaagagaatgacagcatagatacatatgcttatgtatgacttttgacacaacagagagaaaaaattgccattagaatgctactaatgttggaatcaatggtcatattatgtcttgataaataagcataaaaaggaaccatagaaaccttgttctataggtatagagcagtgaaactgatacaaaataagaaaataagc

SEQ ID NO: 37288 - DNA, 339 bp, Homo sapiens
cagctacttctaagtagtcatttgtcatcatcgaggtcaattttcaattttagtttatgtatttgcattcctagttttggtgaaatccctcttcctactcacaaatttgtgcttgtaaatgaccagttgttcttttcacttgggcagttaagcaacaaaaggattgcatgtgcaaattcaggggtttggagacaaacacaacggtgcggtgttagtggttgcgtaactccaaactgggaaatggaaaaactaagagacaactgtgaaaatcattactaacgttttctttctgaactatcaagaaataaaattatttatttggtttttggaacatgatag

SEQ ID NO: 37289 - DNA, 1340 bp, Homo sapiens
caccaatttgtatgtaacaggtgattttggctgagaagtttttgtaactattgccagtcaactacccagaccatgaacaaacaaacaaacaaataagcacttaatgtgttcttgtagaataaggactaaacttaaatcctgcaaaggctcagtaactcctctgtggtggagaatgctagctgtctgccagaatcagtgcttctatttcccaggctcctttggagtttgggaggaattgatttgggcaactttcatcctatttacttaagagtcatctctggccctggactgtcctctttccctttctggatagctggaatagagcagccctgggagatgcatgttgaagatagcaagagacactgtctgtaccagctctcaaaggactatgtggctcagagctgtctgccaaccctgagcgagtcatctaagaccaaaatatgacagaggcaaccttctgcattctctgagttagtgggtcttccatcacagctacttagcccactttgtctaatgtaccttcaaaaaacagggattctggcaaattgtgctggggagtatgacttggacctatgatctcccatctttgaccctaaatctctgctttaggactcacaaagtccagtgtgtctttgggcacatgcctaagcctgcagcacagattccaactaacccagccacctgcgtggaggcaaagtccatctcactccccaggtcaaggctgaacagggcagggaagagaatggttggcctccccttgtgagaggaccttgctggttttgctcctatatggataaatgaagcacaggggtggacaagaagaatttgaactagataggctggagcctgttcctcctattatgagacatgtaatccaccatagataagagtggggcttagtcagtgttaagctctggccaactggttcagcccttcctcccttgaggagcaacagcaagtagttagggagaaaacatggagattccctctccatcattccccagaagggaggacacagaagctctatagaaaagacctggtatagggaagtgtatattgattagggtgggagaaggggtagagaaaatcttccctttactcaaacaagtcagctatcaaatgtgctttccgagttgatctgttgaatgagcctaattggtggcatccacatcaatattagagaatgtttgccaaatatgagaattttggtttcactgtttggtaatcctggcctttttgagacacaccctgtgggagaggacacagaagcattggataatagatgcaaaggtaatgaatccccaggaaacagaatctcagtcacaccctgttctttccca

SEQ ID NO: 37290 - DNA, 2815 bp, Homo sapiens
cttccctttctgcaaagaatgagttaagaatgagagggtcattggccgagtcattttccctctgtgggcttagtagtctcatctataaaagagggtgagtgtaatgaaagatttctaagatcccttttcagctttatcattctgggttctaaaaactgttttgtagtgtgaataatcacttcataatgtgcccatcatcttttaaaatctgagatttttactcttggctgccttaagaggggttcaactgaattgggactagcaggttgtctgaattcgttactcatctcctttattcttttgggatgaagtggaacaagtgttaagtgataaagctataaaagcacacacagatcaacaggaagacagagacaggaagagaagtggagacgcgtcagcattttcccgagacagcttgatctcggaaagcagaagtggaagtccctgttgttggctcacagctttagcgcactgacctgtcggtcacaagcctttcctggaacctggtgggtttcaaatgcaagtggctgtgctgcgggtgtctgtgcaggagaggagtctgtgaactgtatgagttacaggaggttaatccacacggtcaatgctggggcaaggccctcccatcttcaccctgtgaaattgtccccaaaccaaaacattcattgaatgagttttttcttagtatttctattgtgggaaattaaaagccctttccttgctgatggtaaaaattaggtaattttgtggcatcagtggctttcggtagtgtaaacctactcttggagcaaaggtctattggctaagaatatttattaatatattttgaagagaattgacacaggatcaaaggctgttttatgtataatcatttcaaaaaccataaacctgttattaattgttttaataactcttatatcatcaataaacataccttggctatattttacctacataattttggctgaattgatgggagtaaatactacaaaggtacagtctaacctggagtgggatatactcctgaaaatactgtcaaatttcagcgttctctagatacctcattatttatcaaaagttaataattagggatctaaagccaccatatgatattgtcacaaaagtggtaactaaaccccacatccagtaacaagataattaaaacctaaatctgaatatgggagaaaatagagtttaaagggaagtgtgtagaagaggtgctaggaagttactgaaggcaaattccacttgctcaacaattctcctgtggaccacggtggtagccatcagagtgggactggaaagacatggcacaccatataaatgttagcagggcgctttgtaaattgaatatatttagtgtctattgaacgtttagtctgagggtccatttctacctgcctgccttgaggtcttgttctcagtgctgctcagtcgtgacacatgacagaggtgtggctgagatcagctaggaccccagctaactctcctgcttttcccagctgcactctcagtagaccttcttttctagtctcccaggcttaattgaagctgttgttttgctcttggatccattcttccttcaaatctatgaaaaaactactcgaaagaagattgtgagctcttgctgctcctgatccctgagcaggaaaggtgactctaatatgattaatgagctcagctggactttgccccctgacctaagtgatgatgtgggctcccgagaacatttagaggaggagcaggaagagctccagcatgctgtgatgtcagatgccctcctggaaaggtctgggcctggaagaggcactctatcccagcaggatcccctgtcagagtgtgacagaaacatgcggaaggggacagctacccacccactcaccaataataattccacccctctgctagctatatgtgccctctgattcaaggatgttcctgttaaacatggtagcacctaaattaatggggaaaatggcttgaatgggatacagaaaggagcttagccaagagggagaaccaggcgggaaggagatggcctgaactgcaaccagccgcagttctcaagctcagaagggctgtcatcaccacccaaaccatgctgagattagatggtggctgtgaccttcttggtaaactgtgtagtgtttattgtatggattcagttcttctcagtaagcttttctttcttttaagaaacatcccttcttggagaggagaggtctttgaactgagtgggcacttgacgcttgtattggctgtgcctggagatggtggcttgtctgggatgaagggcttgagcaggggctggatctagcctgcttggcttgctgagctgcacctggctcaggactgggtcagctatgggaaggagcatctttgcggaactggtctgccttctagtttgcagaaaggcctcttaaggtgctagtggtatgtgaccaccatcccaggagggtccaggagcaatgtgcagtgcatcctggtaccagcaaggtagctcatgcacatacctgaatggagcccgttcctgttttaggttgctgcttaccactcttgtacctaaagagaaacaaaaccgtggccttcaagaattgggtgaatgactgtgctgacctactctgctcttgatgagacctgagactccctccagcatggacttagggaataaaccctctacccagagacaactcagaagacctgagtttttgctctgactccatctccaagagcagttttatctagggtgagccttttaacccaaactttagaaccttcatttccttacctgtaaatggggatgaaaattttcacattc

SEQ ID NO: 37291 - DNA, 1968 bp, Homo sapiens
gtagagacggggtttcactgtgttgcccaggctggtttcaaacttctgagctcaggcaatccgcccacctcggcctcccaaggtgctaggattacagacgtgagccaccgagcccggccgacttgtttttaaatcaattaccaaattcccactgctatctaaaatgacacagccactgctatctattgggtcctagcccaaaagactgtacccaagagactctgccactcacacaggagaatgtaatctttaactaattaggttaggatgcacaaaaaagtgtgggaggctggacgctaatatagcttagacttgaggaaatgccagggtgatgggtaacttgctccatgtgttacttgcaggcttcagacctgccagatgtgcatctcataggcatttcaaatcacaccatcacctgcccctgcaaagctgttttgctctcttaccctctctcctgccctgctgtctctctctctctctctctctctctctcacacacacacaccccttagtgttgtgctttcttttgttaactcttttaatcagactttgattttctagatctgtatgtttcaattaaatcctagtctcttttggacattgaacttgcagaagttttttcctgtatcttcagttcttggttcttctgataagtgcctaaggagaaacaaataaacaaacatgaacaaagagataaacagcaaaaaccactcccggaggccttcacatggaacccattcattatgtaacaacaaaaggccccaaacaactgcagaccagcatgacatatcgatgacttattctttttaatattaatgacagtctgaaggaagttgtggtgacaagtcagggattaatactgctatctctttatgaatatctgatctattaacaccactgggcttaatgggattcatgagtctcagtcactgtcatgtcattgcccatattgtgcaatcagagatcagttttgcaatggctgataaaaacaaaggcccagaaccaaggagttccagcagagaggaaggaaatgaagcttcctgctggctgaagctgctcacccaaaagaaagggaattagataaagtgaaaggtatttctcagagatgggcccaaagctgcttctgtttccttgtggcctcaggctggctctagctagtaggacaccatgacccagagtaactaaagggaattattggcatcctcccacgagctcctaccaggccagtgccagaaacactcatctactcccttatggaagatcactgagtcatgagatctgtggtttgtctgattctccacttcccgaagccagccaaggctaaccgacctgggattctgagagactgtccaggtgagctcgggtgcttcagtagcaactggccttctgggtgtgccccagagcaattctgagtccagagatcgtttctggcaccaccctcagctctctcagggttctgggaacccagtgatcagaggctggctggctgtgagatgttctttctcttaccctgtggtgggctccacattgcagtcacttcatgcctgctgctaaaaacctaggccaggcttattacctttcatccagaccagaactgaaagcagtttccatctcctgggccaattccaactaattggtagtggctgcccgagcactgtgtagagaaagattttgagttcagcagcagagtgtggttgtccattggtgacgattgccagaggcacaggtgggtcactgcaacttgcattctgtgtgtttactaattctgatctggaccattacatcagcctgctaagtggtgcacttacctctatttccttccagaaaaaaagattaatcttccagaagcattctttgataagagccttatcaaaaaaaatttcaactccactccactttagcaactcagacctgttctacatttgtgatcaatccttctctctctctctagcatatatatacacacat

SEQ ID NO: 37292 - DNA, 2229 bp, Homo sapiens
gctattaatttccctctaagcactgctctacctgcaccccacaaattttgaaatataatattgaattttcattatccctcaatctgaatattttctaattcccctaaaatgtctcctttgatccatggttatttataaatgtgttatttaatttctaaatatgtaggattatctaggtagtttaatatatgatctaatttcattgtggttagagaacatactctgtaagatttcaatattttgaaatttattgatataaaacaagtatataacttaccttatagaaagtagaaagtggccatcagagaggtgtaaataaaatgccatgggagttagaggagggagaggtaaattccaactatattaaacaatggaagacttatggaaggaggtgggatttgagctgggttttgaaagatagatagaattgggaagtaaggagatagagggacaacaggcaggaaaagctacagttagactcagctttctttaaaaggcgtaactatgattaccttttatgagacccaaggcctcagagcactgctgggaaagtgactgcagacccatggccccagtattcttctctcagttgcctctaaatatctgttttcaaataaccacttagacattttaaactctgaatttggccacctcctgttttagaaactgaagcagtaacatgtactttaaactcacaatgagaagggccaaatttcataacttgaaaagcaatttcctttttatttttaggatatgcaccattctatgatttctttttctgcccacagatctgggagcatgagtgtgatacactgagacatttgtgttcctagtcacagcctctccctttggggaagtttagacttcttaatgatgtcattggagaaaacttcacttatctctatggtcacatggcaagagtcactcttagaagtgtcatgggtagaaggcaagtggctcctcgggatctgtgtcatctgaaagaagctcctggtcagagccccctgagcgagtgatacaaaaaaaaaaaaaagtctgggcctgagatcattatccttcagccaaacacatggaggccacaattcagatctgcatactcccaaatctgtgtgagctgagactaattgtagtttttcctgcctgctgtccctctatctccttatttctcaattcccaaacacacataggccacagttcagatctgctggcatctttaggggtgtacagccaccatcccagagctccagggcagggctggtattttcttccccacttcatatgcctcagctcccagagtggcatttgtggaagttcatcaagtggacaggcagagccagcctgagctttcttcttccctgagctctggtccacagcaggagtggactttaccctgaacttccctcgagagataagactgttgcccttatctttggtgattcctgggggttgagttcccagtgtggaaaggttggtttggaatgttttctcagatgtactctgacatgctaacacccacattcctgcctaaactaaatagtcctgccagccctgccagatgtcatggtcttttgttgccatagatgcccctggaggaaaggggtaaagggctgacctggaataaacatgagcccttgatagccatgtccttaaaagactgagaagccacaccaagcaaagtgtggctatcaagacctctagttccagatatagtcattgaacataattcctggcaagaaaggggtaatccaaagtcaggcaaaggttagtcttctgtgggtctaatgaagtctatttgaagagttcatcctgatgcctcatttggccttgctgaggtgtgtcctttagccagaagctatacggggcacactagcatatatctggggcacactagcatgtatccagagcacactagcatgcctgtccatgtgcgacacattttagccatgtgtttacagtgaaacctggccaaaggactccacctccagtgagcagcccctccctgacttttgcaactctgagtctggaagggttccctatccaggatggtgatgaagatgaaactgtccctagaatgtccctcttcagaggcagtctgatgagttcatgtaggagacacagacaaaggttaagagcagaaagtgcctgtgatggcatctggttgtgaggctttcaagtctggatggtctcaacaaagcctgccaggccagttcttaacacgggacaaagact

SEQ ID NO: 37293 - DNA, 493 bp, Homo sapiens
acacataaaagagatgcagcctcacttcatctctcaattttgcaaagaattcaccgttttaatgaattagagcaattcaaggtcaccctataataacaatgctcttacttacatgcattctttctttcctcctaagctagagaggaagaggtgaagttagggtttgggagctgggaattgcaaacaaatttgacagttgtggccaaatctcgcaatgtgcataggggtgagtcatgtaggtaaaggtcatgtgagttacattaaaatacaagttgaaaatgattggttttataggtttttatcagagatttaatgtttattaaatgtatgaatgtttccctgtcccttatagtgtaagatctccagaattctcccacagtggccattaacactgctgtgggttcttacctctctttagcttgtccctggcattcaccctgtaatgtgacaccaggttctgaggcctccagagatgacagactgcagaacattc

SEQ ID NO: 37294 - DNA, 1872 bp, Homo sapiens
agagagagagagagacagagacagagacagagagagaattccctgacttactcccccaaaagagccctgcttttttattaggcaaagcgcaggaattaacatggggcatgaggtatacagggtgggctgggcaaagcacctgagggtaggggatgagggtcagcatatctggttgccacggttatcttgagtaatggaccacctgatgctctggtcagtggcaacaaggcggtaactcaattgttagcattccttcccgaagtgggacacttcacaaccttgttatctccaaaggccagtgcctgaaatttgtaaagtaaaaggcatggttgcacattatggtatcagcgaggcagtagtgtgggttttgtgatcactaagaatgctccagcaggggtgagctgaagccgagccgccatctccactgtctcatttggtcctcccttagagctctccctccccgagttcacctgcctgatcagccagagcagatttcctgcacatctaggttctttacaccctctagcctacaaagcacgaagaggcccctattggccctctggctctaatggactgagaaggagcttagcaggagaaaaagtgagtttcccagccccatcctaggagagagtctagaaggcttgttcttcctcagaaatgtgaacagtagagatgatttttctatctcattattccaaagaattctcaggcagtgaccatgaatagcttataattctctgtctttaaaaacgaaaacacacacccctgggaataattgcgcccacaggaagtaggctggcccgagtgcacacagccaggaagaataagaaccctccatgtttacttcagagcaaggtttttagcagggaaaatgttgctaggttgtgtctactccctccagtgccctcttccctcctccctccccacaaatcccccacttccgtcacatattggcaggaacttgctgttccttggccagctgggaggcctgccagagcccttccattttccggagggcttctcttctatttctaaacagagttgtttgaaaccggatgctacacagagccaatctcctcacccttcaaaccccctccctgacccctgaccctgtgaagcaggcccctcctccctttattgttcttgactctgggcctgtccctgtaaccaaagccaatgagttgggggcaggggccggcacaggctgcaggccaagggggaaagctgccagaggaaatttcacagggtaaagaggctcccagaagagccacgttgtccctcagcccctcccatttccctctccctctgccctgctgtcctggagggcacaagaatgagaccagcccatcgaggaagtccctcacttgagcagggccagacttaggccatcacagaacacagggagagatttctagttggaaaaacaaccaaaggactgtctatgcccttcattcatttagctgtaatagatggctcttttaacaggtgtccattcattcatactgtcactcattcattttctattcaacaaggtgaggtaggaggtggcactcaactccagaggcatggcttggacacttggacacgggaccagattgaggactagctaaaacggccccagagaaagccgctttcaatcagacacgcccactagtgtgccgggtcaattcaccgttgccatagcaacatgtgggcgttaccacccttttccatggcaatgacccaatgacccaaaagttactatcccttccctagaaattgctgcataaactgttcctttatctgcatgcaattaaagtgcgtgtaaatatgactgcagaatggccctgaacggctactctctccctacacagtagtcctgctctacaggag

SEQ ID NO: 37295 - DNA, 1365 bp, Homo sapiens
tgttgcaatcttaaagggatatgccgggtcaccaggcccgaagccagatctgacagtcaggaagaccagaaaccagccaagagtctaatggctaacagaagtggcaaatcagaaacatggctttggatttcctgctgcaacagatgtgtagaggggaagcagatgggctctgctcaggtttgggaggcagggcattctggaggtttccctcaggctggcctccatgcctgctgccactgtcttggctgcaccatcataaccacacatcatccacagcaacgggggaggacccaaaaacaaacaaccttggccttcctcaagagctgtggtgatgttcaagtcattgcaaaaaaatttcattttcctcagtgaactagtcctcacgtgtgggggaggctttgtcactggtcctgattattgcttcttgggcaatacctccaacattttgctttcagtttctctgcttccagcgtatctgtcccatgctagcgatctataattcattcaaacatacactaggtagcaaccatgtgtcaggccctgcacagggtgctgaaaatgcccttctggaggagagagacacgagtggtgccttgagggctgtcatgagagaggcaggcatgccatgaacagcacacacctgggctgagctcttgtggagggatagtgagccaggagctctgcgggcagccgggaaggagggcactcctgactcagccttgggtccttgagaattcgcttggcattttttggtaggttgcactgtgctaggcactgccatttcaagaaggcatagcttagctcagaagggacagtgaacgttcatttgagatgaatgaatagaactttccaaggcaggcaggcaactatggagaagaagtgggggaggcgtgcagtcagagtgagcagcctctgtagagctgagagctgggaaagggcagggttcatgggaaggccagggagtggtgctcatgatgggagcctgagggtgggggaagggaggtggctgattggagggaagcttggtgctggagggtggagaggacagagggcatggaggccatgccaaggaaagtttggactttatcctatagtaagcaagaaggaactatggaaggcttttaaggctgggcatgatatgatcagatctgggagctacagacacacatatacacatatagatagctataagagaaattcaaacatctaaatagtctctctctatatactttaagtacacatatatgcgtatatttcacccatacaaacctagatcagttattgtgcttttcttcctctatcacttctcccctgtacagtcaggggagtcagaggcctatacattgcccaggagaattatgattc

SEQ ID NO: 37296 - DNA, 2294 bp, Homo sapiens
atcattagctctggtccataaagggaaaactaagacacaaaagccacattgatgttctaggccacacagccaattgcagtgactagaagaaagaagcctccccgggcggcgaaggttgcagtgagctgagatcgcgccactgcactccagcctgggccacagagggagactccgtctcaatttaaaaaaaaaaaaaaaaaaaaaaaaaggagcctctgaggggccctctgggactgcagtaggtcacacatgctccctgcttattagcatagaacgccccggtgattcatgcaatggaatgtttcagccaaggatgtcacctaatagaggatatgttgatacagctttatctgagaagttacataatcgtcctagtgtggaaatgccataaaggaatttctggcttgaataaaagaggtgtgtatcccctgggaagtactccacaaagggtatgaggagattttcagtgagaagctgactaccccagactgggcaagtgacttgttaaaaacagggctcaatggaggctctctgaggacagtgactgcgcccactttgatttggtaaggctttgactcctgctcgagagagtccagggacccctagacctgcctgtccttccacagggaagagcgacctttctgtatctagcctcctgggatagaaaggtccctaccttgagtcctctctgcttcgttctttcaggtcacacatttatttctgcaagccttcagaccttccattctctttctgccctagagagcagaatgaatccttcccccgattttgttggaattctctgaaagaaatcctgccaagtctcccactctggaataccacccccagcacccaatcttccctcgacctcgcctcccatcgccccaccagcgcccaggacgtggcaggaggaaggaggctggagggaggggcgcgggtggcacgagcacctgtcacctgaccggctcgggccctcacttctccagccccggccctgcccaccctctggccggtgagagccgacagggcccccgccctcccggacccggacaggcccgtccctcccgccccggcctccgccaccgtccaatggccgaggggcagggcccgctgagcaagccgcggcagccccgccgggtccccgccctgttcccggttcccgagccgggccccggaggcctttaaatgctgcccagggccgacgcggcacggccctcgccacttttcttggtcgggcagcggcagcggcagcggcagcaagcagccccgtcggcccgggtccggggccgttctgggccgcggcaagcaccttcgccctcccagctcgcgctgcctccctcccctcccctcctcccaggctctgcctgccaggtcggcgccgggccccgggcgcgcgcgcgcgcgccccctcgtgtgtgcgcgcgcccgccgccagctcggacccgcgcccccgcccccgccccgcgcaggacagccccgggatccccgcccgcgcgccgcgtcccacgtaccccgccgcgccgggcaagaagatggcgggatcagtggccgacagcgatgccgtggtggtgagtgtggcagggcgcgcgcgaggcgcccctccccgccgtcccgcactccgccgccgcctgctccagcagtgctggggtgctgagcagccgcaggcccggccggcgcccggcgcgtgggaaggcgcccggtacctgttagcagccgctggctgcgcgcggccggtgttaggggctggagaggctcccgggctgcggggctctgggctggggagggagtttggggaggatggcgggtagggacgcccgacagccccctctgtgccgtgcaaccgccagccaggtgtgcgcgtgggtgagtgtgtccggggcgcgcgccccgccaccgcccccgacgtaccggggattcccccttggaaatgggtcggcgcccggggctcccgagagaagttgagcacggccgctgcacttcagtcacgtcccgaaggacaggcctggcccaccgcgcttccagaagcgtttacggttggagaggggcctgccctcctccggcgtggggctctggctcttcggtggacctcgaccttgattttgatctggatctgaagggtctgcggatcttcagaggcttaactaccgggtggaaaggatgggttttgttcgggggtgatgagattatctaagagacggtgaagaggcatcatctgcagacactgtgtgcatgtggaaggctgctggattccaccacatctgtgtgggttcttcctccagccccccaaaaaagagccc

SEQ ID NO: 37297 - DNA, 3135 bp, Homo sapiens
atttcccacagatttatcaccttaaaaacactcaaatactttccctttgtaataaaatgtcatgagcattagggcactgtcttcggaattacatgtaagattaccaattacaagttagttggccaaataggtactcaatttccctattacaaaattgtaagctgatggggggtgtgcaatttaatttaatttttttttagacagggtttcactctgtcgcgcaggctggagtgcagtttaaattcatttagtttaaacatgttcttagtgtagggtctgctttaaggtctagtcatatgttcttattttgatatttctgtttagtagagctgtaaaatgaaaacaagcatgtgttcgtttaaaatcaatttctagtttctacacacacacaaattcaagcttgcacacgagctaaaccagcagggggcgaaatacaataggcataaatttgacaagccatatagatttttcttactttagtgactgagcaataacacaaaatccagcataaccacaaagcaattgatactcccatttaaagtgatgcagtctccgtatatcttacagcgattgaatagtaaagagacaaatgcgggtccattggagcgctccgagttaatttgtctagaacattgcagaggcgggataaatcgtgatgaactgctattgtccttatctttctcctgatttgtataattcctccacccaaaggggtggacacttctctgtgcctgaggggatgttttccattcttgtttctttgcgtaactgctgagctttgctgttttggaactattttaaattattcaaattactgatgcagacgtttggcaaatatgggcagaatgaggggccggcgggggtcatgatttgtaggaccccgggctcatcatccgagacagtaatcataatcctgtagccttgtagtctgattgttacactggcaggtgttctaacagatattcattgtaaaggaggaggaaaggtaatatttttattacctttatataaataacagttgattatataaataatcaactgttcaggactgatgatggaaacaaaatcggttacgacctctgttccagaaatgcgtttgaatgcataagtttatggtgatctctttagcttcactagatattctccgtaagggtctatgaaaaacgaccaccttctccatccattagccaaattccggactactattttcttgtcggtctcgaagacgatttgtcagtttggcggctgctttcccaccttaaattctatttatcgcaacctcttgttatttgttaaatatcagcttcttcctctgtcggcataaatttaaaaagaggaagagacaggctgtgaatgaaaaagtcgtttttcggggcgaaaagggcaagctgacgaatgctctctagtaggtttttggtaaaaatgtggttctatatttccaaacctttacaattttatttggagagcaagagacttaatccggtcttgagctgaacgttaaccggctgaaaggagcacctgtccttcgccaggagcgcagcctcaaccggcgcctgagtgcgggaagacgtctatccccctacagctctatgactcgcaaggaagtaaaaggaaagggcagcttgcccgcacccaaaatggcggtcggcgctctgcacgacagcgcctgcgcagggataagcgttctgtgacaccaattcccctggagtgtcctcccccaccccacagcacccaccagcgcccggtcccgacctagccacctgcgcccggaagtgacgtgtcggcggcagcggttcccccgctgcatgatgggagagtgtgtggagtgggcggggggtctccgcggaggaggtggaggaggcggcggcggcggcggaagagggcggagggtagtgggatgggggtcccgcggcagcggtgaaactccgggtgggcgtccatggtgctgctgcgctgacagggctgtgagcagccggccttccgctctcaccagttccgcgtcggaatagacggtccttccccggggagtcagttcctccccgggcccctgagccatgcccatcgcagccgccccgaaggagccaggtaagcgccgccgctccgctcccctagctgcgccggggaaagagggtgcggggaccaggcccggcccagcagccagaccctcacccgggccgggagcatctgcccgccgcggagccgggagctgtgaggacggagctggctctgcgggcctgcgggctcccggctctgctctcttctgcggcgagtgcgggaacgccgctggtggcgcccgaagcgcacggccccctcctcgccatcccgggcaccggccgggtaagtgggagtccttccctccccggccaccgccggctctccctgcccctttgcttccacctcccaaagctccgcgctggctgcgttctccagggagctgttcagaagtttggggctttgcttgggcttcttcgctctccttccccctccctcgtgacaggtgtaaacactgcctccttcaccgaggcccgaggctggccgcgacctgagtgtgctgcttccaagggtctctgaagcaagcgaatttggaatcctccaacaggcagaggggacagccccaaagctcacgcatcccttcctcagagtaccttttctgctgtcttcttgcactcttcaagaaattatctgcgtctcctctccagtttgcgtttgaaaagttggaccatattccttaagtgcctggtttggcaggtgctgcgtcttgcttggggcagaggcagagtatggagtgaggggtggtagggtccttgctctattaggaaagtaatggggatagcaaggtttttttttccttgttgctttgtgcaagttatagcttggttatactgaatcttttctgttggggccgagggaagaactgactcatacatgtaaattttttactgggcggggggatgaaacaaaagtaatggttccgtttcaaagttctcactttaggagaagtaaagtagaactttggttttcaacttttcctacagtgtaagtcttccttccacctcctattccgaggattttatttggtggaggggagacacagagtttatctttgatgctacacttaattgttgctttcagtta

SEQ ID NO: 37298 - DNA, 4050 bp, Homo sapiens
caaattacttttgctatcataaataagctccaaagtcccccatttaatttttttttaattttgtgtatgatgggtttcagatctggcttttgttaacattttggggcttttttaatcttttcaatctggcgtattgctgtttgaccttttgcaaggtacttaattgctcttttgttatagggtatggatcattgtcagaacttgattggaggggtttaaagagattgtgtctgtttaaaatcagtatgattcagagaaggaccaaattatatgaatgtcttacaatggaatttacttgttactgatttttttgttctattgtaccactattttttgaggattttgcacagtgtaaaatgacataatcatagattgctatggtttaggctgtatatacagtgaaaactatgggttttaaatgtttggggaaattcctatggaaaaaagagagacatgtagaagaacctctaacaaggttaatgtgcatgcccaaggtcttttgaaatttcagtgtgtaaatttccttttagcttatacaaaaataaaataatttaaaagaaatttagcctggtgtctttgtactttggtatgtgaggaaaaatgtaatgagtttgaatgagaagttttgttgaatattaacatatttcaatccagagaaaatctttggtagggcttctactttgttgaagccaggaagaattagaatctggcctataagaattggatcagcacttttagtagctgagctgtttgtttttatatagaacatgagatcagtaaagaaattcccatgattcattataatgtgtcttcatcagagtattggcaaggttaaatagggatttgtagggattttttttctttccaagaatatataagcgtgaaatgaaggtaggcagaaaaagtctaaaaattttagaatattagatattgcttcagcaaaaagtcacatgacattgcatcaggaacaggcagtcagctgacagtcggcctcatccactctgggaatgtgccagtggaactcctgcacctctgtcattggcagattcctgtgttgccaggggattacactggccattggaacgcttgcctgagtgtaatgtaagtatggcctggagtgacggagtgacaagatgcctatccagtccatatcccaccatttccctaactattaaaaaaaaaaaaaagtttggtctttttcagagaaactttctttcaaaataatcacaagtttttagtgtccagcaaaccttttgggtggaaaaagatgactcggaaaattccttagcagaatttttcatgtttcagtaattgaaacataaagggctacttctatagtacattacaactaaattataatggcaagtttcaccaacctaagttcacagcccacatgttaactgtgttaccaagagaaaattaatcaacttctctgagcctgaattatccataaaaatgggagtgatcctacctcatgaggttgatgtattaaataatggatgtatttaataagacatttgtcacatgagtaaacagtcagtgagcggtagccagagcatagcatcagggaactccgtgaaagctcctggagtcccagtaggttcaagaagcagacacaggagaaagggtcactaaataataatagagtcacttggcattttaaaattaagtgggccttcgttatgaaagtggcttattttaatgactcagatatttcatcttataaccacttttagataagccagactttccttttgttgttgtattggtctttgatgatttcataacaggtacattaatattggatcatcataacttaaagttaatgcttcagtactgaagaccaaaagatggtcagctttgtgccagaccagatttaaactatacaatagcagtggctggcaggaagagctttgagcaccttcttgggatctcagctaaggggcagcctgtcgcttacaagcttgtcttggtcatcagcagctgcacatctgtcttaaagtcaaccaggaagttcctgcagagttaagaggggaagaaactaagtagtaggagccgcaaaaggccaaagcctacactggggttcagcaaacagctttgggtcctctatgtcttaaaaccagctcattcatcccgcagcttcatcccactggatgcccaagtcccgagagccagacataattccccaggttaatccaagccagactgggaagcatgggagaaaactttcctaagttgagtcacatcagtactatttttatgagtcgtctttttttttttttttaatagagaagcttgttcttccctcttcatgattgtgttctttatgtagaatttgtcatcttttcattccttcatgtttattgaatcagttaggattaggcttggctgtgagtaacaaaaacccaaaatactgcatttcatgtagtaagactcatccttttgtcacattttaacttctctgaaattggaatgtgtcatacaattggatgggttgtctttagttggcagcagtttctttttcttagcgacgtactaagtaatgctaccttacaaccaatgacagagtagatgaaaatggtaatggtggcttaaacagtggaattttatttccctcctgtaaaatgctggaagaaaacagtctggggctggtaaggggcttcatatgatcaccttctgaagtccttactagcttgttccatcattctcaacacatggtttctaccctctggtccaaggtggccgttaaggttatggccttccatgcctatattccagccatcagggtagaaagagtgaagaagggattctccttcccattaaggatactttcattagggcatacacagtatttccagttataatctattggccagaacttcattgcaggttcctatctagcagcaacagaggctgggaaatacctctattctgggtggccatctaaaagatggggaacctagttgtaaggaagaagagatcatatagggcaaccagtagtctgagccacacctattttttatttctcagctcataaacatacttccttgagataaactaatgcatagagaaatgaattccaagatcattttctcaggctgcaatgcctcaggctagatttattgccttcttgatgcttttccaaaagggaaaggatctatagagggcagtacaggatttcctgggaccatggaggaacaagtgctaagacaagtcccgggtggaagtaggggcagcctgatgagatgaacactgaattggagtgggagttgtgtgttaaatacagccctgtcactaaccagctgtaagatcttcgataaatcccttttttaagcaccaggtacttcataaaatgagggattggagtctatagaatcaaaaactaaggtaggagaaaaccttaaagaatagaattttagggctggaagatcagctggtccagtgctttccaactactcccaggagccccgcagcagtgccaggaggccttggcacctacagtcagggtgtgtccaataataacacactgggcttatatatttagggaggggaaaggtgattgcagaagatttcatgtaataaaaacgttccattgctaccaaaagttgaaaaccaaagatgactcaatactcatagctgaagaaatggaagcctaaataagaaaactgactggcacatcattacatatctataaccaggggcaggacctgaacccagtttcccttactcttggcttttttgtttataccctcctgcatccccaccccacccccaacccccgtctgaatagctggctggccaccttttgcctgaacatttgcagggacactgagtgggctcaggacttcaccaggaagtctccttgcccacctccaatgcacacgtacacacacacacacacacacacacacacacacacacacgcttggctggcagcacagattgctaggaccttgagcggaaacctggtttctcataaccggttgctcattggttcaagttaccttctctcaagctgcagggatgaacctagactcttccatgaatatc

SEQ ID NO: 37299 - DNA, 1838 bp, Homo sapiens
gtgaaactcttgctatgcccgcacctcacccaggagctcaggctcatttaggaaacaaggcccgattgaaggaggcaggttcgggttttgttttattttcttttgttgagttatcatttcttgagagcttcctgtatgcacagcacaacattaagctctctgacaacaacaataatagctagctctcaacccagcacttagcgccaggtcctgttcaaggtgttttctgtgtatttgctcattgactctcccaagagtcctaagaaataggtaccattattctcatctcactttacagatgataaaactgaggcacagaaaaggaacttgccccaaaacccacggcaagacagatctgaacccagggggtctggctccaggcccatgtgcctataggacccctcaagctctgttatttcattggaacctacacttacctccaaagtatgtagtcttgttttctccgttctacaggtgataacactgaggttgaacaacttgcccaaggtcacctcatgctttacacacctgtcactgtgagactgacaaccagagaacagtcaaaggaattcagagggggtcatttcaggaaggggagacaggggaagagtcaagcaggggcggtgggaatctgggaggtcatggagctcaagtgtgtgtgcctgaaaaaccgctccccgagtgctgaggagcagccaagcctccttccagagccctcagcccaggagaggtggcttacagtcccacaggtggaggaggagccttaggctcaaggttaacacccactctccttccctgttctgcatcacagtcacgggggtcacccaaggagtgccttgtatggtagagagagattaacagggcagcctcccagcagtccccaccccaaccctgctccctgggccagctgtcccgctgtcattgacccggtccctatttacagttcagtagcagaggcctatgactcagggacagagggaattcccacggtgccaggcctcaggccatgtggagagtggctcattaagagccacggcacagcgattacctccagagaggcgtgtgagcaggtaccttggaagctctgtttctcatgtttctaaagatcgccaaggtgttgtgttctgagtaataatgaattgccttcattattcacacgcacaacctgcaccaccgcccacaaaggccttggacactcctgctgaagaggtcaagtcagccctctggtcccagctctcccattgactggctggtgggtgtcagcctaagagccgtatggacttcgtcagtgccggagtgtgaggccctttgtattttggagccattaccagaaagcagagcctccagtagacctttttcaaactttctgtgtggtttgcacgttcgtccactgtaccgaggtagcatttcttctcattatgactcctggggctgtccgcctgcctccggttcccaaaaccctgtgggtgtggaagctgtgaggtaagcagaacatggcccagcccccgggccctgctgattggttcagaagtggacctctggcgcaggcccctccaaccacaacatcctgagctcttggcaacaattgtttggtgacggcctcagcttttaactagaattttggagaaaagctgcagtgtgtctttaacttgttaagcttgggagctgctatcggagagtcttgcattctgggcccagccacatccctgctcttggtaaaggttagttatttacctttagttaattacctttaccaaaattatttgagcaaaaaataaattatatacatgcacacgcgtgcacacacacacacacccatacatatgtctttaaactac

SEQ ID NO: 37300 - DNA, 1523 bp, Homo sapiens
agctactcgggagactgaggcaagagaatcgcttgaacccaggaggcggaggttgcagtgagccgagatcgtgccactgcactccagcctgggcgacagagcaagactctgtcaaaaaaaaaaaaaaaaaaaaaaaaagacagaagaaggaaggaaggaaggaggaaggagaaccagtggccagcgccctgagtgtgtttggagaggattggggtgtgggggtgtgcgtttgaagccttgtgtctcctgtggacaaggaggagcgctctgtgccctgggggaagccaagggagaggaggggttggagaggcagggaccccgtccgcctggacactcgggagtgaaggcgtgacaggcctcagccggccgtccctcctcgcgcctctgccccgggggacgcacgaggaccagaaagccgagggggcgcagggcctgctctggccgccgggcccgggatgccaggatgcggggggccggggctgccggtgctcttgggggcagggggaagctccgctccctctacagaggacaaccgccccgccgccccggcagcctccgaggcgccctctccgcgcttcactctcggccgctcccccggagccacgcgagccggtcgtggcggctggacccgagcctgggagcctgcaggcggccgcgccgcgctgcgctgccgaaccgcccggagccgcaggtccgccgcccgcccgctcgggggcgccccagcttccggcctccggcggcttccgcgtcgcgctcccaaggcccggcggccgcgccaggtcccctcggcgccccccgtcccctctgccgggcgctcgcccccgcctccaccctgggatctgagcccgggccgtctccccgcggcgccgcgcctgacggtcactctctctgacctcctgggcccagtcctggggccaagagccgcatccccggggaccttggtagaaaaatatgcggctcctgtagccacccaagatcttctggatgagaacccctgcaccagcagactgggtgtcgtggacctccaagcggttttgacgctgcggaagcttgagaacctccgctctggagcccagaccccgctggagggtggacagagcgggagggtggactgagcctctcggggacagcgaccctgtctttgttccctgaaatagcagggagtcctgctgattattgactggtgagacagggaaaatggttcctgcaggcagccctggggtactttaataaaaatggtctttcctggatgatgaccaggagtgacttggaaactgacacaaatttcctcaaaggattgatccatttagcatctgtttagattacatcccaagttgttggcaatggagctggaaaagcactctgaccctctattgtcaatggtctctgaggggctcacagcacctggcgtggctcacatatccagcattctgccaggaacgtggacccttgcttcatggacgtcatttataggctgagtgaaaatctatcccagaaggtttgggatacatttgaagatactt

SEQ ID NO: 37301 - DNA, 550 bp, Homo sapiens
aaacaagaaggccataaacagtttcggcaacaagcatgatacattgcaacctttttaaaattaaatgtacaccactaggaataaaaagctacttctcaagtgtgtcctgggagataaggtgatgggggggggaattggggggaggagggaaaacatgcatagaaagtcctgtctgagttttggggtaaaacagccttgacaagtgtgaagtagctgactcaggaaagcaaccagatgggaagctgtgacgtaatgtgatgaactccaggttcaagagtcacacatgttgtaagagtgcatcccgggccggccgaggcgagccaagctcactgtggtgatcacgaagatgccattttcagctcttagcaacacagggaaagctctagggaaaggaagctgcagaagacaattaagcaacatgatggatgccttctggggagattttcttctttaagggccctaagcattgcaacagggctgagttccatgaagaagttggttgcttttcggatgtaaaattttgttcggatgtaaaatttcaggtcatcat

SEQ ID NO: 37302 - DNA, 918 bp, Homo sapiens
acataatatgctctgatgcctggaatttgctttaaaatactccaaaacaaacaaacaaaaaaaaacccaaaacctggccatgtagatgaaacaagatttgacaaaatgttgatacctgctgaggctggctgataagtacaaggcggtgctttgtactcttccttttacttttgaatgtgtttggaattttccataataaaaagttaaaaaccacagcacgccaatacatatttctaaattaaaacatataaaatgagcacaataaattactcacacccccagtgaaaactattatattaatttgatagggttttttttttttcttcacacagaagaaagctattagtgctccatgtaaacaagcacgcccaattcaagttggaactctttaaattctggaagacagcacatcacatccagccacgagggggcgcagccgagcagcaaggagcgcaaaagtctcattcttcactgcaatttctacctacagctctctcaaagtatacacattttcaagattgtttccaaattcaggtatccacaggacactgctaagcaagctgggagctttgccaaggccaaaataaattaaattatggtacggttcaaactctggaagtactgtgtataggaaaggttgtttctctgtatataaaagttaatactggtatttcaaaaaccatggttaaaatccctggaggattcctgaaatgagaacaaacacacaacaacaaacacacacccaagtcatgagatgtgaacgtggagaaaccaacagttcagaatttccagtggggcttgcaacatggactcccaataaaacaatgagtctcaataaattcggcactaagcttttaccagtatagatagacgcctttactgggcctacttactacttcttaataactataaattatc

SEQ ID NO: 37303 - DNA, 4940 bp, Homo sapiens
tgtgcctttctaaagtagtgttgtaacttactctgccattggaaccctgtttaaaatagcagataccataagctatcagtcgccacacaaatttgaatgagttttaaaatatcaaaatatgtgctattttactaggctcattatcagtaataattcagtgtgtagcaactgggcaaaattcatattttagcttctcaattaaatagaaaagctttaaagagggacaattcagcaaacagaagtgtaaagattttctaaatctgaattaatatccttctcttagttcttcaagggaaacaagcttgagcagctgttacctaagacgctgtgacattcgcctgacaataaaaccgttccctaggacacctcctgtcacacatacacttggttggctttacaaaatgtgagtcctctcccttacctgtctgaatgaagtaaggaaaagggccgggtgttaaggaaaaagggggttgggggatgtcaaatccaaaataagatttctcatctgagaacaacatggttatgtatattttaattagggggtgaaacaagtaaaaaaaaaaaactgttaaaggattccaaacttaatgaacgacataaacaattttatattaacatataatacccctctaaagaagtcaatgaagctaaaggaaaacttttaaacatttgtctcttttaaataaaaagaaaaaaaaccctgaaaaaataaacagaaaagcagagatccacaaacaaactattcttgttcactccagaagttgggatcttaggatggatattttcatcttcacagcacaccctagcacactcatatcagaatagactgctataaaaagggggagggatgggagctgccagggtgagacatgccttctgctgagctgagcaactacccccaacccccatcggccaagcagcccagacgctctcaggtggacggtccttcaggggcggagcgaagcccaaagcccacttcactcttgtcagggactagtctctaactacaaaaagctactgtgaacacttagggcctcaggaatcctggtgactacaacttctagcctctttacacacattatggatatttcttaacatacattgggaaatcaaaaagcgtatttcatgaacaaagcttgaaaacatgtactctctaccctaagcccaactgaggctgcccaattcgattcaaataaaaactgctgtggtctgaggctggctgtctcactctgctgactgtcctccccattcagtgtctgtgaaaacttactttctacctcctgaaacgactcggcttgcaagcaaaaagttattccaatgcaaactatacctgatattttcgtgaaacttagaaactaaacctaaaactcgactcccatcgcaatctattactaccacttctgctaaaggtaacttatagccaagaaaacaaaacaaaatacgattttctgtccatgtagtggccctgtgacgacaccccctctcttactggtacaaagtctagggcttgggacagctggctcccctcagccccctccctttcagtcataggcggttaccacgaagatgacttgtagatttctaacttaaaaaccaacgagacgttaagtttaatatacatgtagatcccaaatcaattcatttgggcatggacgaaagaaaagagggtggagaggaaggttttcaacattattaaaaaaaacaccgggaaattcacaaaaacgcactacagtaagttggatgcaaacccggccacggaactcaaaagtgaagcagccttcgcgccagcaatccgagccttaaaaaaagtctcgcacgttcacaacaacacaaccgccacaacgcgcacacacatcccagctgtagaggcgacagctccaggcgcccccgcccgccgctcggctctccgagctcccgaccccctcctgaccccggccctgccccccagcggctcagcccgcaggcgccgggggtccgagagcgcggggcccggaccggggccgcgggagggagcgctcctcccgtacctgctccgtccccggctccctcccgcggcggcgcccggcccctcctccgccctccgggctctcccagccctggccgagtcccaacaccggccccccatccacccggagccccccgcgcccgcggatcccctccagcccgacgccgggagaacttaccacatgcagctccacctgggaactaacgcatcaggaggggtttccgcccactcctcagctactcccgctccatgcggagtgccccgctccaggggcccgagggtggcgccggggagcgggcagcaggcgaggctgaagctaagactccgccgttctctgcctgcgcgccccgagcattatacaatggtggaggcggcggcggcaggcagcggaggaggaagcaggaggcgggcggagggggcgccctgaccgagcgagcggtacgtcgtgctccagcactcgccgtgcaggagtgacgtgcggcccgcgagcctcccgcgagctccgggccccggcgccgcaggccccgcccctggccgcccgaccccgcccccgccggccccgccccggcccgcctctccccggcggtcccgggaggcgcgataaaggccggggccggccgcggccggccgcggccgcaggaggagcaggaaggggcggcggggcgcagtgggcgcctggtggcagcgccgcccccagctccctgccgggccggcgcgcccctgattttctcgtaaggacgggctgaaagaggaggggagacagaaggagacactccggcccgaggaccaccactgccactagtaacgccccctacacactctagaagtgctcaggcgaatgacgaagcggctggtgacaaaggcggcggcgagtgcagcgcgtgcacagcccgcggagccgcgcgaccgcaaatatgacaagcatttgagctatttggcaacgtggggccggtcagcggggcgggcagggtccccgcggggggcgaggggcagagagctggcccgggcgcccgtctcgctgcctgcaggggttcctgggcgggggtccgctgcgggacactcctccgaggcccgcactggtccgaacggcaggatgggggctccagccgtgagccggggacagaaaaagtcccttgcccgcgtggcctcagcccgacacgagaagtgggtcaccaagtccacggcactttgggagccggaccgaacgagttgcatccttcggggccggccggggctcggtgcagacccggcaggagggaagccaagctaggagacgcagccaggtcggaggcgcagtcctctgcccacaagtttcacattgatagcctttccctcccgtggagtaagcttatgcttggaactacttaaatttaccagggaaatttatactagttggaagagaatgtgtgtatgcccaaatggtgagaatttaagagcactagggaaagaggccagatagatggttccactggaaaattaatgattattttaaaaattacacgtgcattcagcgtcaagatgtaaaaggcaatgcaggcaggcaccttaaaattttggctgccaccccaatcaatatcatttcagatcactttggagtttaatggtccactatactagttgtatttaagaataataaagctttaagacctaacataaaggcgattgtaagtcgttaacatcaagagaaatttagacttgtttaaactgttctgtaatgatttgttatcaatcaaattgatgatctcatcgaaattaaacttgtgctgaaatgttgatagaggagacaacgcttcttgttttatctttaaggaggatggaaaaggtttttactggaccctcagtataattaaagtcttatacagtataacctaagccaaaagctaattatttgtggatatctttgcaaagtctcattataatggcattcaaaatgacatattatggaagctgtgctcaccggccctctgcaggtcttgctcagtttgcgcctgagtggcataacattcaaacattttgctgtgaagcgaagatatttttcatttccagagttctgcagtttagagagggcattaactactaacagtttcctaaccacccactcacttatactttcagtgctcactttaaggaaaagccattgaaatagaagctgcaataatctcttcctgtgatatctttgtagaggaggccagaggcattagctctgttgaatttaaggtgaatttaaactgctatttgtgaatttaaactgctattcttgaattaaagtaagcaggaagttacacttgcagaacttttgtgacacttggatattttctagcaaatagattacaccaaatgcagtgtttctgtataaaataacaggatttaagtcaaagtgacaattttgtgtcactaggatagacaggattctgctgaagtccataaggtctgtattctgtacctgctcaaacaaaggtttgcgctcttaacgagaccagcaacctgcgtttttggagtgaaatagtttccatctctttatacctctgaaggctgtaacatcttatcaatgtacacattacaaatagctcccacttcccccacttttagaatctggcatctttgaccaagaagttaaagtgagctggcagtttcaacagctgccaatgtggttaacaccagctggttaaccctctccctccccttatgcaaccccctaccccaaggctgagccacacataggccaggacagcaatctctacccagccctagaaattcaagtctatgaggataaggaaaggcactttccacacttctgaagtcagctcccttcagtatgcaatgacatgatttgaaatatttattcaataaaatattatttcaaatcatgtcattgaataagcagtgtttagtgaatatgtaaattttgttctcactctttgggagatttaaaagc

SEQ ID NO: 37304 - DNA, 745 bp, Homo sapiens
tctttttagaaatatattctatttttccttcttaatacacccacatacagcctaagttactataaacagctttagcttagagtgaaattttatgactgaattttaaacacttaaatagaaaatgctaagatggtcttatctagtaaacaagagcattagctctaaaaacaaaaagctcaaaatgtactgatttcacaagcatttggcttctatgtgaaaaactgcaggtacttcaatggtgtgttttatttgtgtttctagagtactactatgcttccatgctaattcaacccacgtatgttgacgacacatgcggatcctaaaatgccatgattcatctgaggctgccacagttgtgcagcttagggatgtacccatcagatgtgaggctgcatgcattcacactttctgtccctgtcacacactgcaaataactccagcaaagcatagtcatccgcctctgactcaccctcccacctgagggagagcctgtgctatgagactgaagtaaaggcacccttcatcagaaatcatcttttctacattaacggtaaaaaaaaaaaaaaaagaaaaagaaaaaagtcttcattatgagtttggccgcttttataccattttataccattagtacctgttagttcttttgcagagaaaccagagaagcaaaacaaagagtattttgagactacttaacatgtaacttagcaaactgtgggcaacattttctgacatgcctgcaaacact

SEQ ID NO: 37305 - DNA, 1631 bp, Homo sapiens
ggattggtgaatataataagtactttcttcaaaaacaaggaaaagtactagtgccaaaccctctgagataatatataatcctagactccaaaaatggaattcagaaggcattttcctacacaaacaatgtggtgttaattagatgaaggtgaaaagaatggcaagcagaggggcctctcctttatttgacagaatcactttcatagaacattatacataaatgaaaattccagaaaactgatgaagcttaccttcttttagagtgtcaaaatgttttttcttttaaccacagtggaagactctggatcttgattacttaacctaaatattttactatgtggcaatgttgttaaatgggcaatgcctcagggccactaaagttcataggactatttgcccctgtatcagattcctctgaattgccagtttaacttttgcctcagccttttgtacatccttatttgttttggggcattctgctctcaatttttgcagctgtcaagatgcctgccactcactacacttccttttaatctgtaacgatttaggaagccctataaccaagctaataagaattctgtctaaataagactaagaggctctgaactggggacatgattttagtcacctctgggtaaaatgcattaatgcatggctgtgtgatatccattttgatgttgttgacagccttgggcagagacttctagctttccatatatattctcccctttcctccacaataattaatttttagttgagtccatgactgcccaaccaaagactaaatttcctagcctcttttgtagctgggtgtgcccatgtgattggcaaacaggatttgagctgaagtgagctaaattgacagctgtcacttttgggttgtgcccatcccccctccctttccaatggctgatttaatgggtgttcagccatcttggacaaaggcaatgctccagggatggtgaagcaagtgaagatagaaagttatatgatcatagtgctagtgcattgttccctaatctttctttatatctttgagtatcactaatattttcgggagataccacaaaattcttagtaaaaaatgaattctaagttgaaatatatattatgtagaaccttctgagagacacgttgtggtaggcagcctctgagatggcctccagtgattcctgcctccaggtattcacaccctggggaaattcccttttccttgacagtaggctggcctagcgactcacttctaacaaacagaggcagtaaaggtcatgattaggtttacaaaaggactgtggcttccatcttccttaccctttcttgctctcttgcttgcttgctctggtgaaagccagctgccatgctgtgagctactctagacagaaattcctatgatacggacaccatccaacagcccatgagggactgaggtcctcattccaacagcctgtaaggaactgaatccttcccccaaccatgtgagagagcctggaagtaaatctttccttatttgagccttcatatgcgactgtgaccctgcctgacactgagacactgtggggcagaggcacccaactacgctgcagctggatttttgactcatggaaaaactgagataataaatgcttgttgtt

SEQ ID NO: 37306 - DNA, 946 bp, Homo sapiens
catatcttgaaaccgaccatgttccaattattctgttaggtattggagcaatataaataaaaagacagtcccttataatctggaaaaatagacatctagtcagtataagacattgtgataggagtacccaggtaatggtataacagaatgttaacaaagaaaacccctggacatggtttgagaaacaaagagaagagaaatcagtcagcagatgagaaatggctgcctctagctaaggatcagatttctcagggaacctggaatgcaaacctcatgaaggcagggacaacttctaccttatttaccaccatatcccaacaccacacaatgcctagattattccaggtattagatacattttgttgaatgaatagagttcacactcctcttcttatgcaatgtgacctagtaaccaagggttcatttttgccagtctctagagaattacaaaaccattgggaacatggtgacctttggctttagtctgctgggattaattgatccctttctggggactctgataatctgggtatttctcaattctgcattaaatctaagtacaagaattcattttaattaagtcaacatatgtttatttagtgcccactatgatggaaagttattattttactagaaaatttacagatttcacaatattcattttaaaaaatgttatctgccaaataaaccgtgtaagaaaagtgaggttctagacaggtcatatttttttttaaaacgaaacagggaagatctagttctgagaagaaataattaagtactgctttagcccaggaagaaacacctaggaataagaagaagaaagagggaaagaataagttgagaagttgaattcagaaaagggaaacactcactaaaacaaatcaaaaagaaaggcagagtgagtgcagatggtcacagttcattttatatctatttatgatggcat

SEQ ID NO: 37307 - DNA, 3493 bp, Homo sapiens
gtatctccctcatagagttgttgtgagggtatttgaaggagatacttcctggtggagaggaagatctatagaatgcttaatgctaatactaataatagtgccaagcactatcataaatattggacaaaaatgaataagatacaggaataagatacagccccttccctcaaggaggttacaacccagtacaggacacacaacaagaagattttttttttccaaatatttgataaatattcagataatcattgtaagaaaacatttactgtgcactaaataacattctctgtcacttaatcctagtgacacagttagagactactgttatatccaggttacaaataacaaaactgagtacttgaaggtttacacaattacccaaagtcattcagctgctatatagctgggatctaaacccaggtagcctaattccagagaaatagagatttactggctcaccatagcataatggttaaaagcataagctctggaatcacaaaagaaaacaccattaattctccctactaaggccaaggaagagataacatttgggttacgcttaaaggaggaataaaatttcaccatgcagaaacagggagaagcaaccacaaaatgatgtaattaaggatggggaaataaaatggcaaagtgtgtgtatttaggatactgagactttttttgatgaggttataacataaaatgtacttgaggagagagggagaggatgaagcagaagtcagttggggtcatttctggcacagccttcatacgagtgtaaattctatcctgaatactttccaaaccttttcacatcagggcatacaaaaataaaacatttgtacagcatactgcaggaaatgaacccacctgtttgctgctggagcccacaggtgaccagcgcagccaggatctattgcccgctctcccctaagggccgaggggattggatatggggtgtgaaatagagagctgggattccagtttagatgattaagggatggagagagatgccgtgacaggaaatagagaatttagaagggtaagctgggaaaacagaacaagtttaattcaggatatgctgtcaggggcctgcaagacaattaggagagaactttgtaataccttaccagagatcaggagaaaaatcctaccattatctgactcatcaacccacactttccaaaatccttgctttcttaccttaattaattattaccccagtgttgtgttcaagccatatgtccaatgtcttttggatccatgaaaaagaagattgaatattttttgggaaatgtgtttataaatatggggagaaagtagaaggattagaaggagagggggtgaaaatgacttgcatttttagaaaaggtgacaagtgcggcttttgatatatctttataagagcacagcctacaaaatggttctaaaaagttaaggggaatagtttgtagccaaacaattaaattcactgggtattagggaaggtacaatgcaattgtgcaacactggaatttgaccaggtcattagggtcaagtagttaaatgtagaaggtacttctgattacctagaatatgaaaacgtctgttttcctatgcattaaaggaaaacttctaaatcacactgtctttcatttctcttgtcccttaattctgaatgtaaccaatgatacttaagtggtacaactggaggggagaaaagataatactcccaaaatacagatgagaaaatgttttaattagtgattttgaagtagttaatgtgtgttaacaactgtggttctataaaaagaaaccatgcggagaatataccaacatttagtttatgttttcacaagtatatgctgactgtctcattattaagtacacagagctcaaaaaaaaccagtgctacagagagtgtacactaactgttaaacattgtagaagaggttgagagatactggctaatgactaccataaaaggagtagatgactaagaacagagaggatgtgtgactaaaaagtccctctatggttctttgaaaattccctgaataactaggcatgccaaatgtggtctgtcataaaattatttgatgctaaactctgtagttagacgacaaatatacgctgtgtccaaaggagaaagtctttgtatagaccatttaattgcaaagtgccaagacaaatcaagaccattaataagtgaaagtgttaatcaaattaaagtgtgacccagagttcaaacactcctgggctagattgggctcactctacagactcattcaatttttagggggcatgaccactgtgcagcggccaggcactttgggccaccactgctcctttctactcctgaaaatgtacaggaagtattgcttctcacagatccttgaacactgtagagtaatactagctggcacatcacagcctatctctagtaaatcaaccttttcaccccaaaggcttacttaccacagctataccaaaactgcagatattaaaaaaaaaatcccagtacacatttggaaatgtatcataattcccctacacatacaaccgtctctgaatatgctaattggaacaaccgattttctttaaaaatgttacttttccctcaagtaataactccaaattattataataatggtaatagttactactgttacgtaaaaacatcatttgatccttaaactcatgaggtaggtttcagatggggagacatatgcaaggtcatatcctttaagatcagactggaagccaggcacagtggtgtgcccctgaaattccaactgctcaggaggctgaagtaccaggatcgcttgagcccagagaggcaacacagtaagatcctgacaaggtctcgctctgggtccccacacaaatctcatcttgaattgtaatccaaattgtaatccccatgcactgggggagggacctcgtaggaggtgactagatgatggaggcagtccccccatgctgttctcatgatagcgaagtgagtcctcacaagatctgatggttttataaggggtttttcccactttgctcgcacttctccttgctgccaccatgtgaagaaggacgagtttgcatcccgtccgccataattgtaagtttcctgaggcctcctcagccatgctgaactgtgagtcaattaagcctctttcctttataaattacccagtctcaggtatgtctttatcagcagcgttgagaatggactaatacagatctcatctcatatcaaaaaaacaaacaaacatcagattgaaacccaagtttgtctaacttcaaaacccatgtttgtttcactacactacattgtttcttgatactcttctgtttgctaaaatacatattacagacattcatgggagaaaatatattgagtaactagtgactcaaatggggaaacagttttgaatgactacaggactgtcttgtaaaacacagcaatgactttttatgccatgtgattgaggttttttttttttttttttagttttagttt

SEQ ID NO: 37308 - DNA, 2762 bp, Homo sapiens
taacaaataagttatattttcaccagtggctattcaactttctcctcctcccccaataaaattctgatttctaactaatagagcagtcctttcatgttggttttgtctcttccagttaacaacacaaaagaattacgacgattcatcctctcaattttatgtagctttcagaagccaaatgagcaacaggatcatcttgttaataaatctttccaattaagttgtgagtgtaggcttatgttagatttttcaaaggctctctcagaagcagaggagtgggttaccttattgtctaggagttcccaaatgcagaaagagtgtatctgatgttaatgcacagatgtcttgactggggaaaaaaagaaaactcataaatcatcaccccacacattttagatgggagaggaaatagcagaatggaacaattaacaattactattctacagaaattatttaatatagtggaaagagagacaaggcagggtttagaaggcctgaatttcagtcattccaccaccatttactaacttttttattctctggacttgaattggcacatttctaacataggaatagccacaattctcttgctgatcacacagatttgttgttgggattacatgtgaaaattcacagataagtattttaaaaacagttttaaagggctactccagtatttctgacattaacaaatttctctgcattgcattcactcaagcgtgactgaagatgatcaaagccagcccttccacagctctgtcaattgggaatctctgaagtgggtctgctatcaccactgcatggggtgacgtcaggctgttgtttacaggagaagagaggctgccaatttccactgagcccaagacctctatggccaggcttctcagtctgcacgtgagcaagaatggactctttatgcgtggcatgtgtggacatgcaccagttcacgttcagcggcactaaaacaacaaaactgcttaactgcttggtgtgtgcacaacagcatgtactttggatcttacgatttcactaagaagactaagcaaaattgatcaaaatgcaactttcacttttgttactctgaaagcggggaaaacctgtcattcggcaactttatcctcagtttgatttttaaaaagcattttgaaagcaaaacagttgattctagtttttacagaactctcctcaagctctacattcactaacaaaagaactatggacaaaatatttcaaagcatgaaatatattcagactgcagtaaccaagttttataggaaccacttcattttcagagtggttgcagttgcttcctcctataagttcaggaagtactcactcaagtactaacatagtctaactgaatccactttggggagatattttgttacatttattactataaacaggaaaaaaatctggcttattaacatttgcccattcatgaaatttcctggcagaaagcagcctgttaaatcaaatttagagggcaaaaaagaaaataggggctgctttcattataatctttcttcaactatccatcaccttctgggacagcagtcaaatcaggaataatatgggagcggatcgtgtttataactggcaatgaaactttacctcagacaataaatctcgtgtaaatcctaacactggaacactgaagaagagatggaagagatgtgggaaatattcttggtccctggaaattagtttctttggtcctgttttaagtgtagctgaagaaaggagaaactatggctcaggaataaaatgaagcccagaaagaatcccaagttctgtttttggctctgcagttcattacatataatcctaggtcaaacacttagccaagatggtccttattctcagtgtatgagaaatggtgatgataatagaaaatactacttttcaatttttaagaggacataagaaaaaaagaagacaacgagtgaaagttttatgcaacattacattacaggaactagaaaagaacagaaacatggactgcgcattcagccggaccctggccatctcctctgagagctgcggaggagaactcactaaataagggggaagtgccatgagcacttccttcattttatagttagacataacaggagcataaaaagtatgacaccagttcaactttttcagggttggtgccagcaagtaacattagccacatatcctaaacacgtcaagaaacctaaagagctatctatcccagggttcctccccaacataagtgctaatccagatgccaaacacctttgtagaaaaatgtggaagtagtttcagattatacttgaaaatggctgtcatcagcttcattcctttatgtggtgaaagacacctgaatacacgaatcaatgatgatgtgaaacaatgatagcaaaaaggcggcaggcaggagcattaatagtctcagttaggaatgcttcaaatgagcaggaattttatcgactgaacaaagcaatgattagagcagagcttcacacgtttggagccagtacaaagttcatgaactctatctttaaaagaataaaacctcacataaagtaaagcagtcaacttgtcagtcaaggcaatcagtaagaggaatagtaagagaaactgaattgacaggaacccttattcttaatatttgcccctatccaacttttacttaaaattctaaaactggctatttcgactttacttttctaaccttttctgtttgtcaaattgacaggatcactgaaagcaattataaacgcacacaaaga

SEQ ID NO: 37309 - DNA, 3026 bp, Homo sapiens
atagacaggtatttgtacttctgagctatggacaaccaagaaaccaaatcaaaattttacaaaattctgtagtatgacattgctgaacaagcaatgaagtacacaaaagatggatatcaaaagagaaataatccatatttctctcatatccttaacatgctccattgtgtccagtgactgagaaatttaaaactctgtgttgtaatgcctccctgtaacagaggtgagctaaagatgaagtgtcaagctggatttccatcttaccttgctttcccccaacaggttcaaagacttcataacctttgatacggacttgatattttttcaatagggaacccataaaactattttcaaataaaaacactaagcaatgccactagacaatctgtctttctctgctttatcgctgccctatcgccacgcattaaaattaaaaatacctttctgccttgcctttattgaataaaagtttaactttgaattagaagaaaacgtacccatcgtcccttttacactttttgcaggtgatagaatctatcagatcacattggtggctatcactgctctctaagcatcctaaagacagaaagcatgccattaccaaatgttttataagcgttataatgccccgatggtggaagtctggcaatacctagatatacagcaaggctggtgaataaggagctgaggggcggaggaagcgggagcgagggagggaggaaaggagggagtcgccaccttaaatccacgccggaccgggaacctgcagcccacaacctgatccctgccctccccaacagtggaccggccaccacattttttcagatcctcctcacccaacccagcacagcactcacccttctgcgaagaagtcggcacccagtccagctccgagacgggtcggggtggcagcgagggagggggcgtctgggctgtgggcggggggtgtctgtgcgtcactcgagtacaggacggtgagttcgaggggtgggagcgcagaggagcggggaaatcaagtcacggccgaaaagggagaaggagaaacggaggggtggggtgatggagcgccccctccctaaaataaacccaccggcccctacgatctctgccccagagagggaaaataaaatcaggggaaataatagaccaaccaataaatctctaaaacgacgaggagcgaggaacagactttaatttaaaggggggaaaattgagcgagggctggaggggagacagagggaagcggctctgggtctatcccatgcctttgcagtccccaggcagaggaggaggctggctgaggggaagttgcagcggctcccgaggaggaggaggagaaggaggaggaggatgttacaccgtaacaagtacagacagacagccatggatcagaggggcgctgcaagcaggagcaggggcggccgcggcggggcgagcggcggcgggcggcagcaccgcctgctcggctcgctcaagacatttaattggattgatgggttgtgcagtgactcacagactttacagagtcgtacagcaatccccgcccagctggacaggggtgatgcggcggggacgggcggggtaagggggccgagaaagaggtgagctaggaggcggcgacgagagggtgaggagctgagggggcggagcggagcggagctacccaatggtgaggcccatcgttccgacgggcgtgggcctcgacctatggcggcgcggctcgttaagcggctggctgcacccctggcccaatgagtcttctaaggacactgccgcgagcggggcgggggcagtggagtggggggtggggagaggtgggtggacgttcaagtgtggggtggagggaaggaggaggcgccggagacccgcggagtcactcggccctcctcgctccagaagtgcgccttctgccaatccgagcgcctcgcgggagtgatggacgcgagcgtgtggccaatggggaggagagggcttccgcagccggccagaggggaaggagcgggcgggcccggcctcctcctctccaccagctcctctccgggccagccctcccctcccgcgcggctcgggtcagtcacgcaaataacagtgtgagggccggggctgcgcgggggggcggcggcccgctgctggctgcgtgacagcgatggggactggctgtgctgcctactctgatccggcaggaggaggcggcggcggaggctggctcctaactctgcgtgcaggcggcggctgctgctcagactctgcctggcgctgccggggagcccctacggccaaaccccactcccgggggacagccagatttggagtgaatcagatcacgcagtgcccactcttggagaccgctccgggggaagtccggcggggctgtgtgctgggatctgaggaggctggaagccgtaggcgggaggcttggccgtgacatttgccccttgcttgcttgcctgttttctgggaaagtcagggtagggtgtgggcaggtcgaaacagctcctgaatacgtcctgttgctttactgagtttctggaaaaggcacttcttaacctggtatgagcgaagctgtaaatgcatgtcgatacctcagcttcctccaaccctccctcccgcacggatcttcctcccactggctcaccttgaaccctgacgtcggtgctccgcagcacccactactagatcttctcctccctgctgattcccaggagttatggcttttcacagtttcttggctactgtccagcaatcattttacagaccttaaccctttacacacccttgtacttgaaagtactgtaactgtaaccaccaataaacctgaatggagatgttcactaaagcaaatacactggcaagaacccaccttcttccccacaggtgcatttctgcacgtaatttgagacttaaagacaattgcttctgtgaagaaactaaggaaaggcaaattagacactgtatctctactcaaattcacttagaatacccgacatcccctttccacaaaggagtcatctggagagacctaggaa

SEQ ID NO: 37310 - DNA, 2503 bp, Homo sapiens
gatacttccctatcagtacataaagggattgttttaatcttcttcaaggccacataacagttcattatatagatgtaccatgattgtgggacattaatattgtttctaaccttttgctagtacacacattgcaacaaccaatgacttcacatgtaagtactgcatctgtagcataaacttctagaaatgaaatgactggatccaagggtaagtgcagttgccaaattgtctttcatgagggtcctgccatcaaatgggtgttttataatgaatgcactgttaacaattgctattgtggttgttgtttaagtactcatacagtggtagggcacagtactctcctcagcaaaaccatgtaataatgctgtttttacagacacccccacttcatagactagttgttagcaagaacagtacattgtatgctactctacttgaattttgtggttatagaataattggcatggtaaccaagccatggtttagttaggctttaaaaaacaaacctatatctatgtatgtatatccaatcctttttcttaataaatctaaaaggcagtcgactctggagtatgtggagtttagaaagtgaaactgactagaaaccaagatgaaagataatcaggcttcctcttcagtgctgactgcagcagaccaaccaaattataagaaataaattaccgttaaaaaaattccccgttttaattactgcaaatgttaacgtgactaggtaagaactatttttaatcacctataattacacggttagtgtacagctaaaagcacgaagtcagtatccaaaagccacaattaaaaaaaacaacaacactaagacaaactttgcttttgtttgaaatgtgcaatatttttcctttacatgctctctcttcccgaataaatgctacgtttagaattgctagggttccgcagatacagaaagccagctagaaacatcccttccctgaattcgatgggcttacgtcttacccagcttgagcaaattcttggcgaatatttcatgaactcacaagagacgaatttgacatatttagaagggatgtaaaataaagtagtgtaggttttaaagctttagaaaattggggaattccttgggccagagagagatcattagacctgcaattcatacttggaattacaaagggatacacaaaattgaattctttccgatcattgtgtattagcatctcccattctaggtaggatttttcgttcacgatgaaggcaaggagagggagggccagctaggtccgcggtcggaggagtgtctataaatagaaggtgaagtgttctaataccgacagggtgcgtcatagcgtccctcccccgagccgaaagcgcccaggcagcccgcgggagccactgcgcggcaccgggacgcccgcccggcttcccgctccccgccctggcccgcgcccctctccctcctaggagctggagacctgcaggcaggggcaggggacccggtcctctgcagaacccgagctcagggttgcgttagacccactccggggcgcacggtcttcagcggagggacggcggggtgcgaaggaccgaggcgcccctgctcgggtggcagccgatcgccgcctcccgcatcccccggctgcctcccccgtccggtcctaccctcctccctgcccgcgaagggagaacaataacccgagcgcgcctgggaagcggagacactgggaggcgggcagacaatgcgagggagttgcgagggggcagccccagcgcaccgcgcgttctcgctgtgtcccagccgcgcccgagggcttggcctggggcaagcgggccgcgggggcgcagtaagaggctacgtggaagataatttaggtctcttgaaatctaaaatctcacagcgtctgttcaaggccggggagaatttcctccagtctagatagaacatcagcagttggttaaaatacacacagacatgtgtgtatttgggtccttttctattttggatctgaatctctaaagtcacttttggaatttccataagcctgtctttttgtaaacagatttttctgggattcccccaccccgactcctgtcttgcgctgcttgttcttccagcttgaccctgtccaggtatccctccctctctccctccctccttcttttcctccttccctctctccctacacacatacatttgccccagtttgcaccttttttttttttttttttttttttggtgctgcaattctttctcccttttgattggcgctttctttgggttcttctgcccttttcgaagtgctggttttatttccatccctctcataatttgttttctccaattcatttcctcttttttttttttgtcacaagtaactgtatctgcatgattttttcttcctactgccataagttctgttcccttaagggctcaagcgttcctggggtagggaggggacaagagaatttcattgcattttatctgagggaaataatgtgttgtagttccactttcagg

SEQ ID NO: 37311 - DNA, 1544 bp, Homo sapiens
acctcggcctcccaaagtgctgagatttcccgcgcccggccttgttttgcattcttaccgccccctagccccgtaacagtttaaggttccagagcaaccccgctgctgtgatgaactgactgagacaacccctttccccttgtgctgttttccaggaagcacgtggctgcagaagcaatgagctctttgtgccctctcttcctgctccagggttccatgtgtctgtgactctaagcctggtgtgtggaccgggaaacattcaaacaaggctaagagaagcctgtcagtccagctcgggctacacactgggtgagccatgcaccacccaggaatttccagggcacgtgccacgtaaggggcacacccgacagagtccaatggggttccccactgggcctcccactgagttgctcagcctgggccggaaaagggtgagtcaccctgggggtggggctctccagggtagaggccaaaggagtgactaccatgacaattctccggagggcctgaggcggcggtggacagccccggcaacagtgggccctccccgcagaactgtggttccaatccctctccacccagcccaggagtctcctggccccagaaggaggagcaggaggcgccaaaaagaggaaaaagaattccttttccagtcatttcagtcctaaattttccctgagactgccagaaaagatgctaatgaaagaccaattgtgtggccagagtgttttcttcggacatctgcccagggaactggaggatacccagttcagaagcgaggtcactagccccatcctatggcaacaccttttgctcgctactgacccctactggggaagtggagacaagcggctgagggctgggaagcagctgaaagaaactagacccagacatgtctactgggttcttaaatccaacatctgctgttggaggatgagtcctgcctaaaccttaggccacagatgcagaggatctaaccttgggaattccgtttccttcaaggggccccaaaacctttcacactggacttctcttttgcttaactccccttaatgttttgtcctatgggaaatgaggagcctttaaagccagcttgtccaacctaccacccacgggccgcctgtggcccaggatgctttgaatactgcccaacataaaacattatgagtttttttttttcgcattttttttctcatcaactatcgttcgtgttagtgtattttatgtgtggcccaagataacttttcttccaatgtggcccagggaagccaaaaattggacacccctgcttgaaggcctttaggagaatgaaatgaacatgtagttacatgttagcagcagaacaaagggaggattaggagcaaggctagggtcagcaggggtacttgattatttcttgatgtcctactaggtgctgtctccagcagaaagaccagttaggaggctgtggcaataacccaacagaaacatctggagggactaacagagggcaagcggatggagggaagaggatgtctgcagggaggggaatatttgggaaggac

SEQ ID NO: 37312 - DNA, 1303 bp, Homo sapiens
atacgtcagtatttgtagcctgtagaaggtcactcaagaatgtgcatttgtaaccatctggggagaaaataggctttgtcagtgagtgtttcctctggtacacttattacactctagcaagtatcatgtacgggagatgaaacaggcagctgaaaggtgtcccgcctgtgcaccttcctgctggcccagcgtctatttccagcctcctctcccagggttgctgaaacccggagctgatttctacattggaagttaggagctgcaggaaacgcctcgtgccgtgccggggacgtggaggaaagccaagtgcccttgataggctcctcctctggagctagggagttccctggatggtggcaggaggagctgcggttctgcagctgctgcgggcggggcagctgctggcggcactgtgtcttgggtttgaccttgacccctgggcaacacagggagactttcacacccttcacccttgcatcactccactcagaggtgcgcagggcccagccccagctacagatgaggagactgaggctcggaggctctcggaccgcccaaggtctctgggcagatcaaacggtggagagaggccagagccaagtgtcttggctcccgggctgggagaggccccggcgtggccctctggaggccgccgtctgcgactgcccgggcgccctggggcggcagcctggcctcctgggctcgaggcagggggcagaggtgtcccggcggggccggggccgggacacgaagagggaggcgagcaggggctaggaactggagccggtttgtgctcgcgcgcctgcaggccctttgcctcgggcacccccgctccagcccagcgggggcggcgccgagaggggcccatggcccagacggaggctcgggctgcgtccattggcggccgcagccccggggcgggagggggagcggcccggcgtcgggttaccggggaccagcacggcagctggccccgggaggcagccgcggggtgagggtgcattcttggattcctggccgggaagggaaaccaaaccgcacttgtatccaacgcaatcaacaaacatgatgtgtcaagtgctgtattgcacttgagcgggtgtaaaatggtagagctggggttcctgcccaaacgttcgtctaattgaggaaataagaaatccacagagaagaagaacgctggagataccgggaaggacataataaaccccgagaaccacgaccaaccgaatttagaggggttcctggaaagggaagtctgtttttccccaaagtcttctggaaagcttccacaacagggcga

SEQ ID NO: 37313 - DNA, 1557 bp, Homo sapiens
attcatacacacgtgttaacgagctggtgccccagtgtccctgggctcccttataccctcccccgacacacacacacacacacacacacacacacacacacacacacacacacacacagttgctttcatgtacccagtggctgaacacaagcttccccatacccccaccccacggatgcatctctaacccagctacttgccttcccagccccctccacccaattctattgtcagggctgaacaaaaggcccaaggcatcctgggttaaaggatttttaactctgccaatcccaggaggctccaacatgaagcagcttcctgctggagaaaagtgactgagacatctccccaggcgacaggggaattttttttttttttaatctggtctgaaaaacagaacctagccgccaatcagacactcctccccccaggaccccaccccggagacctcccagcagtcaaatgggccttgaggtctctttcctgatgacttctatttgcaggcgtcaggcttgttgcttcccacgtcccccccgacccccatcagaccggactctggctctcctctcctcccgcacctcccccaccccgccctgtgcccggtggctgcccccggcgcacggacagtgccccctccgcctctctgctccccgggagtgccggcagtgcccgggcaaggccagaagcccaggctaggccccctccgtgggcgcgccaggttctgtgccgcgtcgtccttcccctccttgggcaccggctctgaacctgcccggccagaaaccgaacccgttttcaggaggagcgcctgcgggcgtgctggctccacgcgcggctctcggggcggccgggttcgggcgtgtgcgtttccaggcgcctctgtccccagcgggaggagcggctgtggagggggcctgctggcggctcaccccaggcccggagggttcgggaactaaacctgcatctggtgtcaaaacccctttttgcccaccctggcactgacgttaagcatgcatcttttttccctgaagttttttttccgtagaagacatactgggtaaattagaaacatgtttgagaaaggagtgagcggcgaacgctggcatctaaacaacacaaaagtgcccacgccaggccacacgcccaggcggccgcggcctcggcggcggcgcagcgccccctggcggccgcgcggggcccctaccgagccgcccccggccgtgtcccctcacctcccctcacctcccacgctcctgagccgggagcagccgggagggccagggagacccctgctcccccaagtcagagcaacagtgggacactttgggaggaagggaatgaaaggagtccaacgccaaggtcctgggggatgctttctgtggtttcgtggctggcgccgaagtcaagaacctagggaaggagccaacataaaagaaaacccttgatccattttcaatgaatgcctgaaattctaccaatccagcatcatcccttcacctgcaggctttgattccttttaaaatgcaaatgcctcaaggaaggggaacccttaaaacaagg

SEQ ID NO: 37314 - DNA, 473 bp, Homo sapiens
cctaggtgggtggtctcctgcacagccagtacgactgcggctcctcgcagttatggcatggctattcttccatccaacaactggatccatccctcttctatcacctgccctccctctgcctggagaaggtccttctcttctttagattaagtaagtacaaggtcaggtacctgagggagcagggggactgtgactgatgcccggtagggggtggatgctgattttcgagcctctgagtcagctcaggagttgcccaatgcaatcaaggtggaagttcactggtgttctttgcagtgcatgactgccaccttttggagcttccatactgcctcaataactgcaggatctcttgctgatatatgtcttttcccccagagttcaacaggacttttcctttatataaagccccatgcacttggagggttaagaaggcataccgagagccagtataaatatttacagtcttaccttca

SEQ ID NO: 37315 - DNA, 1324 bp, Homo sapiens
tctacgtctgtcctcttaaccacggtgcaggggtctaaaaccagctgtaaccaagtgtctatgtacagaaactggtctaggtatcctttaccagttaccttgtgccacacctttgaaacaagggagctgtctagacttccttctgatggccaacccacttctaatgccggccactctatctcacacaaagttttcctggtgtcatagtaactccatagtctccactaaatccttccttgaaattttccaacatagttcctagcggagtgggcgcttactttgcgttgcacccatcttcctcccgagacaaaacaacactcccaccacaagaaggaaagggtaaaggggtcactcacttgtctcgcccatcttaaactcaagcactcactcactttcactttcctttttgcaaacgagtcaagccaaatcaaaatcaatactgagaccaaagtgctgataagggcacaccgtggttgatcaggcctcgcttccattcaaatggagtgggcaaattcccagaaccagcctgttaagcaattcaaaccaagtcaagaatcaaaaccaaaaccaaagtgccgacaaaggtgggctgtgggtgatcaggccacgcttccactcaaatcgagtgggcaagttcccaggaccgggcctaccgtattccagatgtccagactccaagcgccagttccttcccggtgttcggctgctgcattgatcctccgcgggggcctgcagtgcactgctctgacgaggcgttccaccgaggcaaatgcctaccctggagcgctctcaggatccgcatcgctcaagctggccggagtcccccgtaggaatacttcccagggcaagcctaagctgcctaaggggctgcctcgaccgtccatcaaccacctctcttcctggtcagggaaccaagaaatgaagcaggacagccgcggacaaaacccctcagacacccggctacgaaggatttggctttattgggctgtgagcctcggcagactcgcgtctcaacggcggggagttttggcagactcgcgtctcaagaaccgagctccaggaagccagagttttaaggccttacaactctaaggggttccatgtgaaagggtcgtgatagattgagagcacatgcggttagagtcgggggttaatcttttaacctcaggcctggtcatcagtggcactggctggtcttgccactgacttcattcctgttgtttttcaacttttacttcctccttctcttcagagacaggagacagtaagagaaatggcctctctcctcattatgacgtgtaaatattgcccaactttctacaag

SEQ ID NO: 37316 - DNA, 939 bp, Homo sapiens
gaaacctaagatgtacttactgtgccttcacatagagtctaggtcatgttctcgttatccttgggaggtggtggtgtggtgtgcacagggaccgggctccgaagtgcagcaaaatgggttggaatcccagctctcacccttgccagctgggtgaccttgggcaagtcacatgtccttccccattggcttccactggcttgttgtggaggttcatgctgtagccgtatgggcggtgcctggtaattcgtagccaatcagcagcccctaggaagctaattttactggtctcctattattattacttcctattgaggtcattgacctcaggttttgccaacagccttcccctcccgcaaaggcaactggcgccccctctcaactctttccaggtcagcagcagcaaatagctaaaatttgctgtgaaatcttggcttgcagggcccgtattgattttgttctcgaagcctttcaagtagccgctgccctgtgatctccctgcaaagccccttacaaaacccagcagcttccccagacagctactggagacacatatgcttctagaaagaaacccggacccctgggccactagaaccagtcctgtctttatctcaaagccccaaggtctcagagctcagtgtgtttatcaggtcatttagcagctacccaggtaatggttgaggagcatgggcaggaggctcctgcctcatcaccttcctctcaacagatattgatctcgttccactatgtgcaagggaaccacacacaatgctcccaggacctttgacgtcccagtgctgcttgttggctagggtagtggtaaacaaaggaaaggcaaccttagctgagtccctgcctccattcttgccaaaatttaaaccaggtcaatttttccggcctagtgcaccctttaactttgttgctgaactgtttgctagtcct

SEQ ID NO: 37317 - DNA, 1135 bp, Homo sapiens
gcctgaggtgggcagatcacttgaggtcaggagtttgagaccagcctggccaaaatggtgaaaccccatctctactaaaaataccaaatagctgagcatgatggccgtaatcccagctactcatgggctgaggcaggagaatcgcttgaacacaggaggcggaggttgcagtgagctgagatcatgccactgcaccccagcccaggtgacagagctaggctccatggcaaataaagaaaaaaagaaaaaccactggcttacactctggccgtggtcacctctcttcctcattatcagaaccctggctttgcttgggaaagtgggaatcaggaccacatgctcaggacagaagagagacagacagggactcagggccactgagagcacagagctgctgcacctgccctgacccacacacctctagtctaggcttgtgcggttgggaaacttaaacccctaatttgctgaagctgctattttcagattcctgctatttacaactgaatccattctctaccagtgaacctggggacaggaagttctgaaaacaccaggtttgtcctggttggagaagtgtgggatttttctcttgcaggaaccaagcacatgggctgtcgtacacgcgaggggccagggttcagagctagatttctggtttcagtttctctgcagggctggggcaggccagctgggccaggccatgggtgaagtgggcgggctctgaccagagtgccaggggtgccatcccgggtgcccacgccctgcccccctgcttcagccttagctgctttctcccaggacctggcagttgacaactctcccatgacaaaaagtctgcgcctgggtggctccagggtcagttcagtgactcaataacatgaagcacgctggctttttatttttatttttgtatttttttgagacggagtttcgctcttgttgcccaggctgtagtgcaatggcgcaatcttggctcatgcaaactccacctcctggattcaagcaattctcctgcctcagcctctcgagtagctaggattacaggcatgcaccactatgcccagctaattttgtatttttagtagagacaaggtttcaccatgttggtcaggctggtcttggactcctgacctca

SEQ ID NO: 37318 - DNA, 752 bp, Homo sapiens
tggtcccagccgctcaggaggctgagagaggaggatcacttgggcccaggagtttgaggctgcagtgagctttgatcacactcagaggcgtgaggtgcccccagcatggtatgatttagagggtggaattctaacagaaggctcctagcattttagtgtcagaagggacatttagaagatcccatcccatccgctgcacacagggacgctgagtcagaaggctgaggtgactctcaggctgccttactgtttgctcaagcttaaacttgacaacaaggattacaaaagccatttgatcagaggcctggcactgcttaactgaaatgagaaaacatgttgccgtaaggatgattatgtaaaggggggatgcggttcccagactggccttgctcgtgtctgctggagccctgccacagttactccagcatcctgcccacactggcaagccccggcagccttggcctgctctttgccttagcgttgccatgctgcttgcttcaatgccaactggccccatgtgccggccactccctgccactttggcagttcctctggtgctcctggcagtgccaggcattatgccatggttcaggctttccccacccctggagcaaaagaaatgtgcaaaaggcccatcgttcttaccatgggagaggatgcattcagccccatcattttacagcagtgaaaactgagtcccggagggatgacgtgacttgcccaaggttccaaagctggttggggacagagcc

SEQ ID NO: 37319 - DNA, 1247 bp, Homo sapiens
cacacagtaggggctcgaagtggcagctccccacccccaccccgtctacttcctggagacaccctgggttaacaggctaaggtgtaatgcagacctgtcttatgcaaagttttaaaaataaacattttaattttagaatcgtcttagacctacataaaaattatggcaataatacaaagagctttcatattcccacacccacttttccctattattaacatcttatgttagcatggtacatttgtcacaattaatgaaccaatacattattattattaactaaagttcacactttattcagactcccttagtttttgcctaatgtccttttctgttctaggatcccctccaggaagccgtgctacatccgtcatcatgtctccttaggctcctcttggctgtgacagtttctcagacatcccttgcttttgatggccctgagagttttaaggagtgccagtcgtgtattttgtagggtgtccctctattgggatttgtctgctgtttttctcatgaataacagggtgatggcttttgaggagaaaaaccgcagaagtaaagtgccattctcatcacatcattatcatggtacatattatcaacatggcatcactgttgatgctgatcttgcctcctatgcagatttaaccattcctcattcctgctaaaatgaagtcctttgcctttcatgtcaaggtggggatcttgttacagttccgatagtcagtctccctagttagcttggacacaggcagcctaaacacggggatgactcaaaagaaagacatgtgaccttcacactggccctgggcatgggaggagggtgtggggtgaagaagagtcaggatgacatgcccacttctgccacttgccaaactcacaatggatgcttgccaagggccaagattggctgccaagcagggacgaatgcccattccttttcctgttaactagtgatgacctttcatagtgccacttagattttttaactccatctcatctacacgtgccttcttgcagatggtgacttactccccagcactcagcaacagcagcaagaatccaggaaagctgtgccagagtacaagagaaagaaaaaagaaaacaagaatttgatctgaaaaattcaccagaaaatgcctaaccttctcccatgacacagcaaggttttgcttggattcttccttgcattattcaaacatatagtgaacaagaattcaaattctttttccttagatggaagtaga

SEQ ID NO: 37320 - DNA, 2752 bp, Homo sapiens
atctgacactacctcccccgcccaccccccccccccccacacacaatccttacaagttctagccaatagctggctggctccaagcaataaaatactcactgtctcaaaatttggacagctccttaaagttccttatgaaggcattttgatttgcacaaatatgtcatgacatgttttaagatgactcctttatagcaagaaatctatagtaaattgccttcctccttaattgaggttagccacaattaagtcttcccttgcctggcacagtgggtggtgccagctaccaaggaggatcccataagcccaggaactgggagaccagcctgggcaacatagcgagaccttgtcccagaaagagaggaaagaaaggaaagaaagggaaagaaggaaagaaggaaggaagggagggagggagggagggggggaggaaggaaggaaggaaggaaggaaggaaggaaggaaggaaggaaggaaaaagaaaaaacaaaagaccacccacggaagtctttaaagaacaattcacaagcagaataaaaaaatataaaaatataataactgtgatacagtaaaaagactcagcagaagtttcccttgtaactcgcgtggccaaagcagatatcaaataaaagatgaaataaacaggaaatccatagaacgtgaacaataaggaaccgttcaggatggccaaaccgccgtctgcgctgttttctcgccagggctcaggcctgggaacggaagaggttaaaatccagtggcttgtgtttcagctttggttacgtggcagaaaccaactggaagtggtggcgtgagagctctgtttcttctagaagagctttgcgtcttaaacgcccataccgcagacagctgcctggcgggcgacccagccccatcctgatggccccaggacacaagcccaggagcgccccggtgcgcgcggttccgcggcccaggggcgccgggtttggtggcacagcgagccccctttctctagcggtatggctgcgttagagccctaatgagcgcgtgcgaaggctccccttattcatccatcctccggtccgtcctttgtctcaaggccggggccttgctgggcaccatggcgtgctttaccgcacaagcccctgaggacccctggaagaagggatcttccgcaggaggggacgcgacggcaggaccgccccgggccccctcaccgcgcccggccccctggcgggagaggccggcgagctctggagaggagcgcgggccgcgcggggcgaaagcgccacccgggagagagggatcctcccctctcctcctctcttctcccctcccctccctcccctcccacagtcctcaggaggaggaacgccgctgcgttctaagttctcccgggccctctggccccgaggactcagatcccggccgcgggagagggcccggcaggtgccaaggagcccgggcggtccttcagcccgcacttccccgcggtcgcccggagccggcctccgttagccgggcgggtaggcggctattggcgccaggattggccggcgccgcccgcgcccccgcggcctcgggtggagcctcccgcccggccgccccctgcggcacccgcgacacgggtggggaccagaggctcccggcggcggctcccggcggcggctcccgggctgtgattggccagcgccacagggggcgggacggcgggcgtgaagtgagcgggctggggccgctggcgcgccctcctacttccccgtctgcgtccgcgttcgcggctcccgtttgcatcatctccagccggcggctgctccagggaggctgggcgcgatcctctccgcccgcggctccaacccgcactctgcgcctctcctcgcctttctcgcacctgctcctgcgccaggcccggagacccccggggcggcttcccagaacctgcggagcacaactggccgaccgacccattcattgggaaccccgtcttttgccagagcccacgtcccctgccacctctagctcggagcggcgtgtagcgccatggagaagagcaacgagaccaacggctaccttgacagcgctcaggcggggcctgcggccgggcccggagctccggggaccgcggcgggacgcgcacggcgttgcgcgggcttcctgcggcgccaagcgctggtgctgctcaccgtgtccggggtgctggcgggcgcgggcctgggcgcggcgttgcgcgggctcagcctgagccgcacgcaggtcacctacctggccttccccggcgagatgctgctccgcatgctgcgcatgatcatcctgccgctggtggtctgcagcctggtgtcgggcgccgcctcgctcgatgccagctgcctcgggcgtctgggcggcatcgctgtcgcctactttggcctcaccacactgagtgcctcggcgctcgccgtggccttggcgttcatcatcaagccaggatccggtgcgcagacccttcagtccagcgacctggggctggaggactcggggcctcctcctgtccccaaagagacggtggactctttcctcgacctggccaggtaacactctccacctctcccagggcccagtgggagacgccagttctcggatgccctccagttcatacacccatatgcttatacactcctaagagttaattcttagctggctgctggtggcgtttaacgttttaaaaatatcaaaatgacgtctggagtttttgcgtgctgaccacacctttgcaaacagctggggcgcaccgcac

SEQ ID NO: 37321 - DNA, 568 bp, Homo sapiens
ataaaagaaaaaaagaaagaaagaggagcagtgtgtcctcgctggttccaggctttcctaaaccctgtggcgagaagactgtgtaaaggcatagcaggtgtgggccttgtccccaaggttgggatattggtgacagaatgaaaagtcaaggacctagccaggcatggtgactcacgcttgtaatctcaatgactcagaaggctgaggtgggaggattgcttgaagccagaaatttgagaccagcctgggcaacatagatacgtatctaaaaaaaagttttttttctatactagccaagtatggtggcgtgtgcctgtagtaccagctacttgggaggctgaagtaggaggatcccttgagccaaggagtttaagattactgtactctagacagcaacagagggagactttgtctctaaaaagaattaaatcaatcaaggacccagaggctcaaggacacttggaagggtgcctctgacccgtggctctatcttccatggccactttgatcccacgtaataacttgccacagacacactcctcctaggctttagttgaatcattaattc

SEQ ID NO: 37322 - DNA, 833 bp, Homo sapiens
cttgcctgtggttcccaatctggatgcatattacactactctgggaaccctgaaaaatcccatgcccaggccatacctgaaagcaaataaccaaaatttctgggggtgggacccaagcaccagtattttcaaagctgcccaggggtttcagccaaggctgacaactgccgggtcagcagcactgtgggcagcctaggaattctgcatttaacaagctcctggcaaatacttgggcatgtgagtgtttgagaatcacagacctagtaccctcagcatctgtgggcaccctggttcatggtcttttctggaaaactccattctaggtaatttcccaaaagcctctaactacagtggccatggatgacctcatttgaggggaaatctactcttgtttacactctgtcagccaaggagatgatctttccccagataaaactgaaatgcaggccaggcatagtggctcacgcctgtaatcccagcactttgggaggctgaggcaggtggatcacctgaggtcaggagttcaaggccagcctgaccaacatggtgaaaccccatctctacaaaaattagccaggtgtggtggcgcacgcctgtagtcccagctactcaggaggctgagacaggagaattgcttgaacccaggaggcagaggttgcagtgagctgagatcacaccattgcactccagcctgggcaatagagcgagactctgtaagtgcctctattggtgtcttgcaatacaatgtctcaaaaacaaaaaacaaacaaaaaaactgcaatgcaattcatactctggttgttgtaacatggacaattacagaatcatcattt

SEQ ID NO: 37323 - DNA, 1633 bp, Homo sapiens
tcaccgatttcccatcagagcaggctgctcagagtggctaagtagctaccagttcattttccacacccttcccattctccacgagccagagctccacctccccccagaagctgtcttcaaccacccggcctggggagctcccctcagcactggctccccgccccgcctcgcagcacctgttcgggcctcggtcgcgccgccgggtcttgcagacgcgaatgtaaacagaaacacagtgaaaggcgttcggagagcctcgtgactgcggcacggcggcgagccgggaacatcagtgcgtccagagcaaaatgaacgaatgtacgcatgactcctggagcgaccttcacgagggaaagcgcgccccccggcacccacccctaagcgccccaaaatgaccagcctttacacaacccagctcgcaggcgaagctgaggtcggagctccaaaagcgagggaggacagccgctgaagaagtcccggcttcccataggccaggacgaagtagggggcgggctcatcttgcaggagcgtccacgtattggtggagccgcggacttagagctgcgattcgctgcgcgaaattgccgaaagccctcccgcggagggagaaggggcgggaagaagggcgtggtcagcgcggccgaagggcgtggttggcgctcggtcctgccctgcgcgttttgggctgcggttggagggccgcagttgcagtcagggtccgccagctcggggccagcgcatggggctgctgagaccgctccggacgtgcgaagcgttcgcggtgcggtaggtaggcagtgtcccgcgtgcgggtgctggtgtcgggggtgccgcggcgctgggggcggtggcccgggctagatccgcgcgcgcgcccggccccctcccccgcgtctcttcggtgcctgcggggcccttgcggtgcgggccgtctggcctcgcgtccccgccggcaagggcacaaaggctccctggggggcgggggcgcctcgtgccttcgcctccatcttgcgagcggaacggcgtgtgctgtggcggccgaggggtcggggccgaggcgggcggctgggcttgggaatgcccgggcgcggcgagggagtgcgcgagtccgcgcatctggcggccgagcagctgcgccgctggtcggcctgggccccgggggaggtcactttccctcaggcctctcccgggcgtgggctgtttacccagctccccagtcggggctaatgcagctcgggcctttccccctggaaagatggagaccagtgatgtcttcttatcgccgcgcccagatgcggagagaaaaaatcaagatgtctcattttttttgcctcggagggctaccctttctaactgtcatcactagaacagttctcagcagcctggggacgaatgtccaaaacctgttccaggcccttgatgattagtaggttgggtttagtgtattgtttgtaacaaaaatgagcggaagcctgccagggcagattggacctcactgggaattcatcaggaccacgaagggaggtagcgtttgtaaataatctaacagttctcagatctagggtatgaagagtgttgtgttaaagtgtgtaacaaaggttgttgggtcagtttgccttgggtttagttgaaa

SEQ ID NO: 37324 - DNA, 785 bp, Homo sapiens
aatggagcaagaagtagcaattgggaattatgggctatacccagccttcaccctggtttttctagctcacgggcgcagctgttcccctacttatgaaaacaaaacttgcctgtaaacgtcttcatgtgcagtttcttaatgagccacaaggtgaggatgtggctccgtaagatctctgtctcagcaagatttgtcactcttctctttgtccctccaccagtcttctctctcttctgctttgtggcttaactgtttgatcacttattccccagttggctcataaacagcttgggctctggagttgggcagtcctggacttgtctcactcagaggcttcgtttccccatctgtgacgtgaggattaaagaccctggctcccgtgggaactggccctcacatgtgctggtggagtgtagagtgataccactcagcagagggccacttggcagtgtgtgcaaaagcacccttcgcctcagcagctctacttctgcaattcatgctgaggatgtgccagcacaaatgtgtgtgcatagtgactcatcatagcattgtttggactagcaaaaaagactagaaataacccaaatgtccactaataagggactggtgaaataaactagtgcgtccttacaccagaatacagtactggtcagtaatgaaaaagaggaagctgtctttgtacggtaagtcctcacttgatgtcgtcagtaagttcttggaaaccgtgactctgccacttgaaaggacatataacgaaaccaattttaccatagtctaattgatat

SEQ ID NO: 37325 - DNA, 1898 bp, Homo sapiens
accctggcggcccctctagagcccaccagccacaggccagtgatgccaacagagagcccgtagctgagaggtctgagcctgcactcagtggcctgcctcctgccaccatggggtctggagaccttctgctctccggggaaagccaggtaggtactaaggcaagactgtagatggacccattgctgtcctttgggagtttgttcaggatttcctcaccatcttgcatcctttccttgctactgtgcagggtgaggaattggaggggcctgagtatgatgatttctgttttgcgggttcagctagagagctgggcctcaggaccggccggggggactgtccacggttatctcctgttcctcaagagtgactggtgactttttaaggaccagggattataggccaagaggctgctgcccagaggtccaggccaggggaattctggcaaggagagccctgccgtgtttctgacttggtgattaaaggctttaggggtaccctgaagagacttgggaaaggagtgtccagggctttgggctcctgggggctctgaacctaaatcctcttcagacccaagggacatgtcagaaccttggagccctgtagtaggcagcactgtccctggttaaggagaattccttgggcttctctgactgccaggcagcttctcctagtgggagtcacatggggcagggaatcctaccaggttctgtgactgcaggcaaatcaccagatctttcaggccctcagtatcattgggaggtgaccggaatgatctgttctgcccagctcttacattcttttctgttctgcttgccaaggcctttcctgggaatggctttgatcttctcggtgtcattgtagccttggctgctgcagggtccccttgtggggctgcaccctgtgaggaggctctgagcgggactgggagagaacagaggctgggccccacctgcctgggagcaaggggcagtgggaggctctggcacctgtgagtcagagattcggtgaggcaggaagcgaatcataaacagacacagaaatggcctttcacggggatgagtccggtgcttattattagaattcctgttgttcgttaagctcttaccatgtgctttgcacacatgggtgtatttaatccttaccttctgaggagctggtgctatgaggggaggaaagtgaggctcgaagtcatacatctggaaggtggcaaagttaggggctggcctcaggtttgtctggctccaaaacccatgtccttcaacactgtgctgtcctgcttccctcgggggtgagttcttcatcaagcagataaaaaattcagtgaagaagctgagatgaaccagtcattctgctagtgttcagttaccactggcgtgtgaactgagcaggatggggtctggggcgacctcctgggtttggacgtgtcctgttagcgacagagtgattgagggtttcatctgccaggagacgcttctcagaggtaagggactgttttccagcttcagcatgacagagctgtctgagttctgcttgctcacaccctggatacctgtggaggaaggaagaaccttggagaggactggagatgggagtcatcttgcttcccagacaggcagggtctcagtgctgctgctggcagtgcatattgcctggttcttgcctcaggcagcagactttgcattttaaggtctttcctaaatactgtctagacccacaaggaaactcctgggttgtcatctaagaaagaaattgggtttgatttttacccaagtgctttttgtccctttgatcattgcaggtggagaagaccaagctttcttcctccgaggagttccctcagactctgagccttcccagaacaacaactatttgctcaggacatgatgctgataccgaag

SEQ ID NO: 37326 - DNA, 983 bp, Homo sapiens
gcaggagagtcgcttgaacccgggaggcagaggttgcagtgagccgagatcacgccactgtactccagcctgggcaacaagagtaagactccgtctcaaaataaatagataaataaaagttcaaaaacataaagttgtccctgaaccaatgtttctgtgacatcgcacaagaagactgggcaaaggtctaatgaaaccagaggggttagccagctgcggtggctcatgcctgtaatcccagcactttgggaggccaaggcgggtggatcacctgaggtcaggagttcgagaccagcctggccagcatgacgaaaccctgtctctactaaaaatacaaatattagccgggcgtggtggtgggcgccagtaattccaactactggggaggatgaggcaggagaatcgcttgaacctgggaggcggaggttttagtgagccgagatttgtgccgctgcactccagcctgggtgacagagtgagactccatctcaaaaaaaaaaaaaaagaaactggagggtagaacccagcccagccacccttacagccaagctttaccgtgcgcctgactgcaatcctctgccacactctgccaactctctttgtggacagcactttgccctgatgacaccgcactgatgtggcttccctaggagatctcaatacagccagcctgtgttccttctccttctactcatccagtcagcattgtctgcagataagcttcctctttcccttcctctactgacagatgttacagctgtggcaggaaactagggagagtataagcacagctgataaaggtgcaggaaactaagacagcctttgtgcttaacaaaaataaatttttgaaaaaagaaagaaaaaagcctgctgtgtgagatgcactctgaccctagcccatcccttcctcacatgaacaacaattctgacactgcgggagtgaatcttcccttagactgctttcgggtcatttttttgttttg

SEQ ID NO: 37327 - DNA, 3048 bp, Homo sapiens
cctcaagttcacctccgttcaactgtgcaaaaccaactttgtccttggagcccttgaaaaaaaattttttttaaactgtcaacacagcaaatgtcactacaagaacactaccctcaacttctaaaacatgaaattctaataaaatactacggtttctgtttagtgcaaaagatttcagcttcaagccacactattacaaaacttgtaagcattttgcaagagccatgtgacacacatatgacagtcagctaaactggtgggtggaccttttaggggaaaatgtctagcagtaattgaccaaaccagcaaataaactcaacttttacaacaaatactgatgttcccccatccctcaaaggcctttgacactgaaaaggaataccaattcggtctcttccaattattcattactttacatgcatgtaaactgtagaggaaatttttaaagggccattgaggagagcccaacaaactctacccaagggaagtgaacaccagttcccaggaaaggtgccaggtgtgtcacatctgctgtggtgacttcttgagtaagcaagaaaaagaaatgcattaacttttcatgacacgtcatggaacctcattccctatctgcaagcatccaagcaggtaatccaaaacctacatacagatctatcataggtcccgttcgtttctctttcaacttgacagcaagcttcctttaatctgcgagtatcaaaaagacatttcttggctttagttttttttttttcccttgacccacagaagacaaaatgacttaggtgtcctctttaaaaaaaaaaaaaacaaaattctcacaaatgcccaggtttttataggagggcaatggacccggcgagctcttaaacaactcctccaagacacaactcaaaaagagaactaataaatgttcagttgcttctcaccatctactcattcccctcaatcccacgcagtcccgaaaagcatccatattacctgaaacctggcggggaggatggaaggagagagagccaacaagctcaggatttacaagtaaagctggtttctaccccgaagatcctgacagctccgcagagtgcgggcgcagggtctgacagtgccctctagaagggctctcccaccccatcccctccccttagagacaagtcctccttcaaaagtcactgcctccgagagaagataccccttcacaccgccccaggcccctcggcaggcttcctcagcacccgccccgcagtcaggccctctaacctgacccggtccaggcccgggcggctcacccctccggcccgacccctcccccgcgcggccgcccctccgcgtcagacaatggggcccgactcccggccgccagcctctcctgacccatcaccctcgcctcaccccagccgatgccccgacttctgccccaaccctcctcgacccctttaagatcccccaagctggcccacggacccagccgaccggtgctctcctgaactcactattcgggattcatgctggacatgtcactgcagctgccgccgccgccaccgccgcccttgctgccgcagccgccgccctgactctccgcgccacgggtaatcgaaagaaaggaatgagataggctgttccgggagagcaaacgtcttcccctactccgtcccctagaacacaatcagcagccgccgccactcagctatcgcttccacccaaaatggccgccggcgaaccaggaaatagggaagccttagaccgaggggcctttacacggcccagagggcggccgcaccgcctggcatgccgggaaagggagtcgcgagcgcggctacgcgagctgaggacagacagtgcgacgcaaggccaggactcagcttcccgccaagcgccgcgcctctggggcatgcgtacctgaagggttgtcgcccgccccattccccactccctcacctccccaccctcggcccctccctgctcccctcccctctgactcgctggctaggacttcgctcggactccccctggcggattggctaaggccgagctgccctagtgatgtcatcagtgagacgtggcagccgggcgagtcagcgccccacgggggagggggcggagaggggcggagggtggtgccggcggccgacggaggctgggggtcgggggaggcaagggaccggggggagtggtcaaaccggagggactgccgggggtgcgggggcggggagggggccggggtacgagcgtgtcggctcctgcctccgttgcggctgttgctgacctgaccagcttgaggcttgcgccaccctggtggcgctggttgggggctggtaggaggacgtccgctctaagaacagaagggaagtcaaggggctccctggacggcacggagcggttcttctcgtcactcacccatccccacctgggttcggtcatcgtccattgttggccccgcgcactaccattttcttcttagatttcttcccattcttactgtgccccgctcttaactcgtcagcctggctattgcagtagtctccaaatggactctacctctctctctcctctccgccccagcccatttgcacacacagtcggatgtatctttctgagacagcacctgcatcgtgaccccacaaccttcaatggctccacatcccatggatgggagggacacagcccagagccagcctaaaatccaattcctaccttcgtcccggccttcaggttgaattgtaatgtattatcttttagttgctactaaccctgagccattctgcaagactggaaaataataagcaataaaaataggcaattcatcactatatagtgcctacaatttctgggagtaatattaactcatttttaaaaaacctatggccttaacagctctctttaatcagctcaggaatttaaatctccgctaaactttaacacattatcttgagttatttaattacaaagggcatagtgtaatacattgtccaaagtttatcttccaacttctaagaactaagaaaattgtctcctgagacttactgcagaatcactttaaattcctacaacgcc

SEQ ID NO: 37328 - DNA, 516 bp, Homo sapiens
agtgatgagaatcaagagctagacaggggacacttggtgtttggaattcttcaccaaatcatttcacttcctttgtttcctcagggaggaaggcaaccacagcctctgcatttgctccctgacttggtttacaaggttagtcaaataccctgtaccacagagtggctgggttaatgatttatctaaatgaggtaaaagccatatctattgcaacgctgcgtttcagtctattttcccaaactggttagctattgcacactaatgatgtagcttaatgctgtgtcactaggctgttctagaacatttgtgtatattatgttcacagtgctgaaagaagcaactttcctttttaatagttacagtctttctgaaagccctggaagaaaaaaaaaagtgaccctaagaaacaagatagcattcaggtaatgtttaaatcagactgtatctcagatcaaagggcacttcttttttttttaattgagatagagtttccctcttgttgcccaggctggagtg

SEQ ID NO: 37329 - DNA, 2477 bp, Homo sapiens
tgaaaactgacaggcagctatattataaaaagaatactggattgagggttcatgatgactgttttattctagttgttgaacatgtacagccatgtcgaaggaaaagttctatttctcacctctcataaaggatggcattttaaaggtgaattttaatgtcattcatctaataaatatttgttgcatgcaataagcacaatgttattcatatattcatagtaaagtaatagggagaaaggaagtacggaatatcctgaggatatcagctgtcatcagagatgtaacaagctgggtctcagagcacaagtttgccaattgattaaaaaggaaaaaaaatgaggcatcgtagatagaatcataggtccagaagaacagaattagaaatagctaccactgaatgaacatttcctccatgcatagacttttatcctcaccacacctatggagatagaagttattatccccatgcagacaggggtatgccaaaatcacaaaactcgtgagtggcagcgccacgtttgaaactggggttgtctgatttcaaagccaaggctctgggttcacagaagtacatgtacttaagaggtgtgaagcaacatgggactactggaaggaggcggtgagccacgaggctggaaatgcaggcacctgctctcgctcacttgaccatagagcaacttgggcaaagaaggggtgggctgacattggagtatggaacaaacgcatgatttcaaataagcatgtgtgtatccatcccagttctgtccgctgaaaaggcctagaagcaataacacaccaagccctgtcgaatggtggggtccgccaggacctccaggcttgctccccgccctacccgccagcttctccgccacattccactgccgcagcagaaccggtgtccttcacctgcctgcgtcttctgcagttcgttaagcagcgcccttagctcctgtgacactttagggagaaagccgcagcaccggcgatgttggccgccattaacgcccggcaaagcgcccggaactagaagcagcgaagaacccgggtgggcagcgaccgtgacagccgagccggaagcggagctgcgggaggggcctcgacgctcctccatcttttattggagctcaccgctgccagtcgcgctgcctgcccgtcccacccttttcgtgcaggcattcagctaaatgacgggcggagcccggcggcggcttccggtcgggggaaaaaagttgggccgaaggaggggccgggaagacgcaagaggaagaagagaaaacggccgggcggcggtggctgtaggttgtgcggctgcagcggctcttccctgggcggacgatggacagccagggcaggaaggtggtggtgtgcgacaacggcaccggggtaagggccgcgcgaggaggccttggcggccacagacgccggcggggacgagcagctggcgcacgggccctcggcccccagggctgcacctccgggccctcggggcgaaggggcgcggggcggtgcctcccacctccgcgggcgtgggagcgagccggccgttccctggtctcccttgagcctgccacccatttagcctgccaccccctcacccttccgggtgggggcggcgggcgagaccggcactggacatggagcctactgaccgcccggcagggacctgctccgcgctaatgcgggggcaattgggctaaagcggacggaagcgtaaaaggctcggtttgtgtgttccgagaagggctcttttccccagggccaccggtttgtaaaaaggagaaagacctagaggccttcctcttcctgtatagttgaagatacaccaaacgagaagcaggaagcgggtttacttaaaaaaaaaaaaaaaaaaagggaagtgctgtcatggagtgtggacctcagccctttcgctgtgtttgttgggctttttattagttttttcgagggaaggggtccagatcggcagcgcatcgttcactttttgttttacatactagtatttggcccaggagtaggcccacggagaccagcatgttccattgagtggttttgggtgacctaggatcccgcaagactcaagtgttaattccactagccttaggggaagttaattagtgttgattatcccacccccagcccccttttttcccttcgtttcagtatacaggtaatgttagcctttaagattcaaaaattgtaaaatctgactaaagcactgatttagaaactatttgaaaattgtttctgtaatcccagcactttgggaggcccaggcgggcagatcaccagaggttaggagttcgagaccagcccagccaacgtggtgaaaccccggtctctactaaaaatacaaaaattagccggccgtggtggtgcttgcctgtaatcccagctacttgggaggctgaggcaggagaatcccttgaagccaggaagcggaggttgcagtgagccgagattgcgccactgcactccag

SEQ ID NO: 37330 - DNA, 820 bp, Homo sapiens
cctctcacagtaaatgttaggttggaaggtggggttcctggggccggccagccagtggcctgggaagcagctgagagcctctccccattttccctaactgtggacttggtttctggatcatcctgcttcttaggccctggtgcttcaagagaaagttgaattggccccgagaggccaccacacccaccgtgtggtccctcctccaggccaagctgcagcctggaggtcagcctgaccctcggggactcccagctctgggcagaagcctcatcgtccctgccaaggtatgtgtcagcctcaaggcagcacacaatgttttggtaacttgcagaggctgaatcctagaaagaccgcgtgttcctggccgctggacgctggccttggtgatgctcgcccccgtcccggaagcccgatgcacctgctgggagtcagcaccgggccgggccttccagccagctctgccagcacatatttctaggctcaagtcagacttgggaaagcatggccctctcctggctccacatcctgctccccctgcacccatggagcagctgacccagtttttggtagaaaaatgaaaatctttaccagtcagatgagaggagaggaagcaaatgccacgctgccctaatttagcccagacacaaccctccttctgaggaagggatgaggagcttgggccttctcactctctcttttcagagcatttggaacaaactcccaaaataccagaggctgagtgcaaacctcctttgctgtcatcaagagggaggatgaatcatgcaaaacacgcaatttctatcatcccaaaatactgcac

SEQ ID NO: 37331 - DNA, 1235 bp, Homo sapiens
ggcatgagccactgcacctggccaataatgtgatttttaaataggacattttaatcccaaaatattaggaagcacaatctaaaataatttttttaaaaagagtcaaataaatctagttttatgtttaaaaacaaaacaaaacaactcactgcccttttttctcatttcaaagcagcctagtggccacagcaccccacacaggcaccagtccatgccccatgatttgggaacttgctctgcaaagcagccacttggtaaatatttgttgaactaccgaattctgagctccagctacatccgcctgagcaagactgggcctgtagcctgtaaggctgggggctcgagccaagtgtgcagcattccttagtcctgattgtggctctgggcttccacacaaagctgggaggccctttggacagaggaatgcaggacgcagtgtagccccctgggtgagaacaggcttggatttgaatctcgttccatcagatactccacctctctaagcctcagcttcctcatcgataacctggggaggctgaagacttgccttgtggggcagtttctgaggattaaaccacataaagcatataaagggtctggcaaggtgtctggcacacagaaaacactggatgaggctgaggtgccaccaccaatgccactttcaatatgaagtgggggtaaaggcaggagcaggagaggcctgtggtcatggaatttggctgaataggaggggaaagaggccattccagaatcagaggcaccaccctgatgccctcagaggaacagggctgctgctcacctgatcgaggtgatagtggtctgtggggtatgagtcgtggaggtggcccagggtataaatcctccggtgctcacaggatgtgggagaggagattgtccgagtaggttgctctctcttctgagaggaattagaagaactgtctgtagctgtctgtgtagagggaggtaaccaagagtcaatttaaaaacaacaacaaaaaccccacgcagcaaaccctgacatgcactattcaaatactagctattccctggttgtggcaatttgctgctcttcccaaaatcttgagtttgtcttggctacaacaggaggacccctgaatggccagattgtctaaacacaatgtggctggttcaacaggcagagaagcccagccaccagaccctggaaaggtaggtttttcttaaatgcgggaatagtgactgggtgcggggggaaa

SEQ ID NO: 37332 - DNA, 2584 bp, Homo sapiens
atcctcctgctttggcctcccaatatgctgggattactgccatgagccaccataccctgacttatctatcactttacatgtttttgttagctatcataaatcattttagggacaagggcaaaacaaatagacttacaaaagttctttttatcctcctctcatttataaagtagtacatacttagaaaaaaagcactacaagaatttaggaaaaacacacccatatttccattatgcaacataagcattgttagtttttacaccttggtccacatgtgcagcatccctctggagacccaaccctcctggatgtttctctacttgggtttggtctatgccatgcatggctgatgcctgcttctgatcccccaagccatggtgactaatttcaatatgaacacacggtgctctccgaagcaatatagagagacttttgacagagcggtcagaaaagcagctgtctccatttctgtaatcaagatctaagggtcctataagccttgaatcctggcacgggtgtggggaaaggacttgtctgaggatgggagcaagagaagccacccttagtccctttgagctgctggatccagccaagcctgaatcctgaccactcgaggatgtcccaatgatgacaccaattctcttttgtgacttaagccagaatacactgggtttgtcacttgggtgcactttcccttcactatggattccttccaaagcagtcccacaggcaccacactcctggcttctctctaccccttactcctccccaggttccctcctcttcctcacaaacaactcttcttggtgtcatatgtgtgagtgcttatggtgtgccaggccctgagctacttgtggacacggttcctcagcatggccagcaggtcacaggtaaaacactatctccatgtcacacactggcactaagggactctgagagatggtgaatccaggccatggcagcacagtcactggcagagctgggactgaaatgcagcctccctgaccacaaagcccagggagatttctaataggccccacacactgctgcctctcacagccaggtaagtccacttccagctcctatgctaagaggtattttgttgagattaacacaaaacacaacttctccaagtcacaaggtacaccctgctgtatacaaacccaggagatgaggagatgatgtctcacagtacaaaggttactacagatctcaataaatacctctcaaatgagtaatcagggcctttcagtgtgattcaaatctcaagagttaaattcttatccaacagccacgttacagtcatctattaggttagaagttagccttgtgttgaacattgtaataagctctcagtacttagttctcagaagcccatttaacacaccacggtcaccactgtgttagtcatctgttcaccctaactcagcctattttctgtgacccacttttgggttaacaatgtgtagaaagtccttctgagaaatgaggcacatccggcttttcctaggactcattagtcgatcagaaatgctaccttccgatattcccatcccacctccccagccctctctccctgcacagtccagtgcaaagctccccagacatttgtcagaggatgtgagactgagaaaggccttatctgatgacgaatttctacagtgaagcaagaaggccagaagacctcgagaggcatgtccacagtctactgcctcctgagggcagagctgaggttgcgtcctagccgagcctgcagtcttccaggcccagctgttcagggttgtctgaactcccagaagattccattggaagccaaggctatttcagatggatactaacagatgattcttacaaagcagctagtgtgacctacaaacaaaaggaatgtactaccagggcatctccaagaaaggcaaaggggaaaaaaaatctccttttaccctcatgcacctctgaactggctctcctataactctgccctggtttccgtgggctgcagaaaagcagcccacctgaggtatgcacatacctaatacacaagcaagattcttaaacatctctctgttatttctgtgcacaagctactgacacctaccaacctaccaatctgaaagctgtcaccttcaatgaaaaagttggcaatcacatgctcccaactgtatctacactccccttgctctccagtgggggtctaagaactgttagggctttgaagaacaaaagcagaggtcccctgtgactactctgtgctcggggacttcaggctcctagaaggcatgactgcagcatcctgagagagcaggtcagagtgggcgtttaatgtctcctgctgtggacactgaggctggcattgccatctggccccagctgacactgggaggtcttgtgcactatgatgcagggagcacagcccttgccacctgcaaatgtaccctctaaaaacactcttgcctttgggtttgactctgactcaatgtcaatgcctgttgctaaaaagatgtccagctgggtgcagctgctcatgcctgtaatcccagcgctttgggaggctgaggtaggaggatcgcttgaagtcaagagttcg

SEQ ID NO: 37333 - DNA, 1585 bp, Homo sapiens
tgtaatcccagctactcggaggctgaggcaggagaatcacttgaacttgggaggcgtaggttgcagtgagccgagattgtgccattgcactccaccctgggcaataagagcaaaactccgtctcaaaaaaaaaaaaaaaaaaaaaaattccaactgggaatgcgcacggtttccacaactatgccacatatagctcaagacaatccaggtgcagttgacgcaacaagctgtcagcaaacatgtacccggaagaatgttcagggttcacagaagtccatgctggtttgataagagggtgatcattcatcccatttgtacatttaggagtttatgtcgttagaaggctgatccacgcttgtctctggcttttctgagctacacaggaatgttgctatttctagataatgatataagatttacctacaagtgttattaatcccacccagtatggcagaatgaccataaactccagatgtggggaggacaatatcacagcagacagtgagcaatggacagcaggcgatagacaggccaagcctcctgaggcagtgatcatcatgaccacacatccataaaccacacatccggacagcaaggacagactgcagactctgtaacaaacaggtctccctccaaatacaaataaggatgtttaaatgttggtaggtgatctatactaattttacataaacctgtttttataaaatgtttattgaattcgtaatagctttgagtctttagaatataattttagtaagtgctaaaaatctgcaagccagcaaagattgggaaaaattgttccactaaaatatcttggacactcttaacctttcaggattcaaatgctctccctgactctcactctccccaagaaaaaggaaaaacaaaaatcttttttccaaggttatgtcactctacttggctcagaagacatggccaccaaaactatcaaatggatttttgagtagagcagttctttcttgatttccatccaagcagagttaggttttgaagaaccaaaaaggaatagctcaaagctgcttatacacaatagcaatgagtggctctggattgtagactccagtaaatctatgaataaaagaaaacccagggaggaatttatctccaataacaatgaatccccactagggcgggaattaagagaagaaccggactgggctcagatttgaaacacttttaaatgtaacactccccagcacattgctctgaacataggcagcgtctcactcaatatctattgattgcttccaagttgaatgatatgagacctttggaactggccatggctctgtattccttttccctcaaaagggaaagaaggcatctaaaaaccacgtggttcctttggactgatggctcacagtgcttaacagcaaaggggcctctgaggcgtggcagccacaaccctaggagtgattatcattgtccaatttcaatggtcagtataccctctgtgtactgtaaccaaagctaacagaatatggtgctctggaaagaatgtggacaggacctgagcgagtcccaactatacaaatcacagaaaaacaagacacagaaagtgtca

SEQ ID NO: 37334 - DNA, 1315 bp, Homo sapiens
gtcttaagcagagaaatctattactcaccttgatgctggccacaaaaaacttatccaagacagcttcctagctaagtaaacctttcacatggaagctatctgtttgtcagatgcctatacagctgtggacatggaaatgtcttctaagaactttcaacaatactttttaatcattctcctaggtaaacagcccataattaatggagttagaaatcttgcaaatttattctattgagaggcagtagctttggcctagctttgccactagttatacaacctgaggtagagtcacttaacttctttgtgcttcaaattccttgtctagaaaatgcagggtttaaactagtttagtacctgaagctccaacacagcgaaatgagaaaactgcctaacaataaaagtaccccataaagaagaggggagtggaaagaaagctgggcactgttggtggatcaagaccaatggattgggaggaaagctatgtccctgatgctggatctaagagaccacaccaaactcacacaccagtccaaaaggatgtggatcttaccccaaagctagaactcacttttccttacaaacaaacattagtcaacagcagcagctaatgtcaatattagctatggttatgtaatatgcaaacactgagttttagaattacactggacttttatcccaaacaaagacccaagatggggagacagagtctatagcacaatctcttctgtcttcatggcaattggtgccacaattacagcattttgctatgacttgcatgtcatctttgccactggacttgagattctctaggtcttttctttttcatttttccttttgtagctctgcatttggcacatggtaaacccacggtagactgggtttcttcattcattcaacaaacacagattatcttttattggcttctacagggggtagagataaggattacatgaggggaggaaatgacaacagcaaacttctgtgatgtgtatttttttcttcattacaaaaagtgataaattcactacagaaaatttagcaaatgcaaagaaaaacattcacctgaaatacatctaggcagacgaatgtaagagtcttacaggcatccacagtatgtgaggcacgtttgctaacttaacgtacttttcgccactgagatccatttaaaaaattactggaaaataacattcccgtttttctatttattcattcctgataaaaacaaaagagattgtgcacagggcttagcaagattttattttcttctgctttcgttcagcttcccagaggggcaaataaataatttatggggttc

SEQ ID NO: 37335 - DNA, 990 bp, Homo sapiens
agcctcatcacccattaaagctgcagcgtctgactctaagaaattctaacagtgttcggtctcatagagggggaacactgtggcaaagcaatgactgatgaggtggtaggtgttacctcagagggcagaaactcaccccctcctttcctggtcatcgtctgacctgaacccagatgcccagctggagataagactgcatagagccatctgcacaccaaggaaaggaaggctgtgtgggtgttggctggtccttccatcagaacacaagtcctgggcaactccctaggtaactgtcaaagcggcagtcctcagcagagaccaaagaggagcccgggggcagtcccagcacttctcagacacagcctccagcaaaggggcaggaaattctaagctgtccacggagctgactcatactctctttccacatgcatcctgaaggttctattctaagtttaccaaagggaacatgccttcaggcagaagcagagcacagaagtggttgtggctggggcttcaattagcatttcctctgtaacatgtcaagatcccaccagaagggctaaggaaggaaggaggagagagcccatccagtaaacatcagctgagccaaattccattgacacctcttttcagaagtgcatatgcatcgttacctgtgtacacaatgacagtttaattaccctggggttaaagtcaaactactaaaagtgagtaacacttgtttgggctttaattggaataaaccaaatgtataaaggtatttttcagacaaattggagaaaatagaacatggatttggtattagatgagattaaagaactactgttaattttcttaggtgtgatcatggtattgcggttcttgttttaaagtccttatctctcagaaatacatactgaagtatttatagatgaaattatatgtcagggatttgctttaaaatactgcagtccaccccctccatacaagaaaaagtgtgtgtgtggggcg

SEQ ID NO: 37336 - DNA, 1041 bp, Homo sapiens
acgagcaacgatgagcctctgcctactttcttgtggcaaaaagatagattctggtgtcattctcagagcctgggagaggtggaacacttgctctgttgagtcccctcatctgtgtaactcctatgaccttccctcctatgacaaccctgaagtgtaatcatgtttccattttatagatgagcgtaatgaggctcatgaaaccttagttactatgcttgagtcgacactgcaatagagagcagggctggaatctgacccagccaaactccaaggcactacactttctccacagcaaagtcctctaagagatactttaggatagaatgaacatggcacctctcatttccacctgtaggaaataatacaaaggttgcttggtcacacatcctcctagatgaacctattagtcatcatgagccttgaactttgctttatcgtgttccatggggacatgcattcttcctccacccaccccagctgggtgttgctttccagctgccctggctgctctgtccgtggcactatacaaggaggttgagtgcttcttacacacccaactctaaagtccttgctgaggataccaacctgagggtccttcccttgacctgcactcacatattcaggtttgaattctgtatatcataaggtatagagaaacctggtgtgcaagtcaacctaagtcaaaagtcacgttttggactctactccttggatgcagagaaccttctctgttactggtcccatttgtagctatgcaagccccaaagacaaggtcgactcaggtgccagtatcacttaataccgtaggtgtaaataagactaattttttctctctagactcaaccttatagatcttagtcaaggctgcgtactcatccccaaacccctgtcattaaagcttttgccccaggagactctactggcgttccagagacgctgtcagaagtcaaaagctgtctggaacctttcttatggaactgccttcgaggctagtcaatcatgaatgagtcagccattaaaaaaaattccatccttactgtt

SEQ ID NO: 37337 - DNA, 1398 bp, Homo sapiens
ctgagccacatacacagtttaaaattttctagtagtcacatttaaagagtaattaaaaagcaggtgtcattaattataacatagttgacacaaaccaagatatctaaaatatttgtttccacagtaaccaaaataaaataatcattaatgagatacttcacattcttttttttctttttgtaataaggcttcaaaatccaatgtgtattttgcacttttagtcagttcgtacaagcctcatttccaggttcaacagcccaggtggcaaggactacatacttgacagtgtgggtctagaagccacggtgtggcgcagtaattctcagtggagtcacctggatctctaagggggaggggtgctgccttgcggtggtgtgtttgaaaaatgtggcatcccagccccacctcggaaggcctcagtaaaaggcagctggcctttctccaagttccgctgcggcacaagccgccacccacgcagcccggtcaccaccgcctctctgcaagagtcatacaagaaggcttacgttttaaaaataccaccggcatgctagcttggcgtctgtaagcacaaaaagtaggagagcaaggaagggctccagaggcaggtggaccgggccgatgagtaaagcgcccacgcctgcttaaccatacttgtctatcaggtctgaactcggcccaagcttcaacagagcttttccctcttgctctgtgctgtcatgagcaccaagttcactctagttcccttgtctgtgaggccggggccctgtttctagttggaagatgctgtaagaacaagtgatggtccaatgaggggtattttgagctcttcaaaggagcagaatttctttagctaatatcccctgtggtattcaacagggaatttaaaatatcctcagatagggccctcttcagctattactttatgtccttagaactctggccagaaagaagctacctttcacatggaggagggaggctgagtgcccatcaaaacccaccaaaggccgctccccaccgttacgtgggttccctatgttctgagataaggctttctggtttggccctacttgctgtggtgcctaatcgaaatctccctaaggagaagtctgacacacgagtatggaaaagttctcttatcatttggagaatataatttagggctgggtagataaacatgtacaggaaatacttctatagaggtcttgatcctctgaagattaataacccatggaactggagcccagcctcaaactcagaggaaataggcaagttataaaaacaggaagaacgggaagtttatttttggatgaatatttgttctagtgaagctctcgatactgacaaaaaccttgatctgcaggtcatttgctgtagctgagcagctgcagtgcatgtttc

SEQ ID NO: 37338 - DNA, 529 bp, Homo sapiens
cctttcctatgtttggattcttcctgcaattcgcagagaccagaaccctcacggaagcttgtgacacctccagaaatgtttgatggtctgggcagaggagccaaaatcacctttctgagaggaaggtgactgatgagccagacctggcaaaataaaagaaaaggagaagtgtttccagaaataaccaaggctgcacctgcacccagtcctttgccacaagaccatgtagcaaaactgaaagaactctatcaccagagaacagtaactctgccatggaaatccccgccccggctccctcccgacaggtggaagatgtttcctctgtgtaaggtcaaaggcagtcctggcaatgactgtgggactggagtgagcctggccagcccagaggtttggcgtggggagtaacagcatcgttactgttgagagaggcagcaagaggagaggctggagtcggggatctacagagatgcaggaggtggtcaatggcccagactctggatccgaactgcctgagttcaaatccagattc

SEQ ID NO: 37339 - DNA, 1729 bp, Homo sapiens
gatagtgtccagcacacagtaatgaactcaaatatcaaatatttttgcagttactgctggaagtcctgctgtggccacgtcacactccattaaaaaccttcaattgctccctgctgcttacagagtaattagctcaggactcagggtccttttttccatctgcctcaagtcacttttttttcctaaactttatctcttcaaattactcctttttctcttcaaatatcttttgctctggctaaagcctgctcagttcaaatctggaattgaactgtcttgggttcaaatctccactctaaccacttatgagccttctcgggcaagttattttaatgctgcaggccttagttttcttatgaggaaaaaagttttcttatgaggaggattagatgggataatgtgggtgaggcctcagtcaagggcatggcaacgcagttaaaggttgattactcttcctctcttccacctgttttggttttgttttctaacttttgtgctatatctctgcctaaaacttccctctctgcacagataaacctgtccttcaaggctcaactcaaatgtcaccttctccatgtgggtttacttgaaacccacccactaatttccttcccccaccaaatacctacggcgcatcatgctattcttggacacaacagcaaaagctcccgtgtgcttgccctatgtcctacacttgactgacaacatttgtggacaggccccacgtctgattcatctttgagttctccacacggtcctgcatatagcagaaacttggtaaatatttgctgagtgaaagaacaaatttttggagcaaaggcaagagggagttccaagctttgaagactacggaaccagcactgtagtataactgagcaacaggacagagatgggtttgtcctgggacatactagagaagtaaagaatttttttattccaaaggagcagtgaagccaaactatacaaagtgaagtgaagccagcttcccctgtctcctccaagtgaagcatggccgcctccccagagccaagggtgttgccattttaaacaaataagtcaccctgctctgatgcaaacagccctcagtgcttcagtcctgaagggagggactcttgtataccatgcacttgaaaaattagatctttgtttccaagaggctattctaaacttctaaccaggcctgtctgcttagcaatctccttaaaagcatgtgctggtagcaagtacagctgcattcttaatcacttacaccccacaaccaactaaagatagcttgaggaggtctgccatatgccaaattcttcttttaaataagaacacaagaatcgttcatgaaaaaaaaaaattcagtcatagccatcagaaaagggaaaaggaaaaagatttgacttttctctccttgttttgaatgaaataccaaagtagaaaaattttgataaagaaacagatacacactacatcttggcaccaggcttatgcatctgcatggcctggcctctgagacccctatcacagtatttactcctgagtaccctgaaaatgactcaggcctgtcacaagttagccacagacagcgccaagtaataaacccagccctcaccgcccccatcctgaacaaatgagcagggttaacttttctcactggcaaccagaatgggttgtggcttatgacatgtctctctttttcctttttacctaaaccctactaatcactcaaagcaaagctcaa

SEQ ID NO: 37340 - DNA, 876 bp, Homo sapiens
aaaaaaaaaccaaaaacaaaataatgctattggggatctggatcactgagtgaagggtggtgccatctgtcaagtcaggaaaggccgggtaagcgggctgcccactgtaggggatgagaagttctcttttggatatttaagtttagatgcctgttagacaaccatatggagatactgatataactctggagttctgagaatggccaggctggagaaatcaatctgagagtcatctgcacacagatgggatgtgaagtcataggactagattccatccaggcaggcctgcagagggaaaggagaagggggtaggattgagcccctggggtgctctagagcctaaagcaggcatagtgaaggcataggaattcctatcagagctcatatggaatcacagcatctcaaaacaaactagaagttaaactcacacctatgtaattgcctgaattggattaatataattccataaagagctgtgtctgaagaaatcctctgataattcagaaatttttaaaatcaataggcatggtacagacatgcagaaaatcataattagggttttaatgttgcaagactacagaagatttgcttcattattaaccaaaaaagggttacacaatgatgagcacatttggttgaattgagaaatataaatgaatctatgtttggggcattttacacttctgccaaagaatttatcggcacaatctttcagccaacactgaactaataacatttgatttacatccaaaagccaaaatacattcccaaaagccagccaaatacaaagcttcagacttcactaaaggtccacagtgaatgctgaaacgtccaagctcaggaccggctataaactcggcagtactacattaacca

SEQ ID NO: 37341 - DNA, 576 bp, Homo sapiens
agccccactttattcggagttaacctatggtgcagtggccttagaaaaacttaagagtaaaaagctaccataaaaaatgctggttatatgtatgaccagacggtcaactcctccttcttctctctctttgctataacagcacctgttggcttctaagtgcacagagttctcacaacaatgtgccaaaaccgccacccttcccatcctggcacccacctccccccaccccaggagacctgcatatcagatattacttcctgctgtctatgaccacaccaccttggcagttaacatcaaaagcaaacacatggggagaacagaaggcactggagcagcgggggaagaacaagcataggtaatgtttcataaacatttttctggtgcccaggtgcaaaaaccttggaacttcacatgtatttcagctgatcatctaaggacccaccttctctctcccaggatagtgagctgaaggcccttccctgcctccactcccagtgctcctgtacctggaacacagacatgcggaaaccaaagcttaagacccctacctaccatgttcaggagagctacacaaga

SEQ ID NO: 37342 - DNA, 3544 bp, Homo sapiens
tctcaactggactcgtgacagcagtggaggctacggcttcatgctgaacttgctctgagagcctgaaatggagctattctttcctcgctggtgatcccactcgaaatccttctgctttggatagcagatggagaaagatgcaaggctgacaagctgccacaaaaagagccaggtcaggcctgtattcccaaggggtggagccaaggtagagtggtcaaacctctccaagaatctgcaaggccagagcacagcaaccagcctcactgctactactgctactctgtgtgcaggtacaatcgagggcccataaaaatattgatttattggtcacgttcaaaaggcagcaaggcccagcagcatattccttctctgtatttcagccctaaaagcgcaactttttttcattttaccattttaagatgctatatacgaagacaaagcaaaacgtctgaaatagaaacaccagcagatgcggtgggacgtctgcgacaggcacagcagcagggatcctctcctgtgacggctgtctggaagatcaggggttactgcagtcaaagttccctggggactcacaggaaggaaactgaaattccctttcccaaacaccagccccactcccgcccggactggcaacagcagacgccaaaggataaagggggtatatttaataaagtgagtagatttcctagagtagggcacagcactgtcacctgctgcaagagacaagcctcccagtcgcccagccctgagtcacttcccctcccagcactcttgaggctcaatgcctgcggggggcaaaagacctggggcctccggagcacgccttccgaagcccacactcccctgcaaagacgcgcgcggggcctccctccagggcgcgtccccgcggctgccaaccagctctttgcgcccaagcccgcgccgccgctaccttggctaatggcagcactgaatgaaaggaacggatgcaggctccggatttatgaatgtgcaggggaggaggggagggatatcatgtgacaataaaggagcgcgtcttattcacaaaaaaaaaaaagtggctggtggcgggcacagccactgagcagcagcggcggccgccgcgcggtgaccgctcaaaccccaggcataagacttgaggcgtcgggccccgcggccccgcccccgtcgcacccgagactgaaaacgcctcagaccagggagggaaaatgccaaactggacccctggaccgcgaggcaggaggcagctgcacctccgccccgggctggcgacagtcacgggtcccgcgcggggcggcccaggatccctccggcggagcgccccgagcattgttcccctcgggcccgcgggccaggcacaagcccgtgcacgcgcacccgcgaggacactcacatacacacacacacacgcgcgcccccagcgcgatgccccgcacgcccccgccgcacacgcctcggtccgccccgagccgcccgaccccgcaggacgcgtgtgccggccacaagcgcgtgcacaggcactcacgcgccgcggggcccctcgggcggctccagcacgccggcccgcgcggggaccctggcgcaccagacccccgcgcagcccgcgcctgtcctcctctcgctccgccgtgttttttatgaatgaaaatgtggtatgcaaatgagagcgattcaagaaaacgaaatggcggagcctaggccccagtgggctccggagcggactgcagggctcgcggggcggcgggagtcacaaagtcactgtgcaaaaacccaccagccccgggaagccggagtgggggtgtcaggtcttccgctctagccgccgaggatttcgggggcgggggagctgtaagtcctccgagagggagcggagaccgccgggaggtcacccgcacgcccttggcccccggagctgccaccagcccgccgaccctaggcgtgcgcccgccagcccgcagcagtttttgccctctcctcacttcaacaagcagggaagcctcgcgtcccaacgccgaaaggtcagcgagtcgctgcaccccacgccaagttcacccaataagcgtccccgcccgcatcctcagccccggcccccacgctgcccctgaggggcaccctcgtcccaccccgcgaccaaacttactcgtctgggtgtgtttcttcggtcattttcttgttcacctagacgcctgtcccgcggcgggcagctttgctcccttcatcttcctgtccgctcgccccccttcttcacatctccggagatcgcctgatttggggagggggggcggctagagatgaagagggcgccgcagcagaaggggaagcagggcgcgggatagggtttgggggaaggggtgcaaaggcaggctgcgcggggagtgaacgccgcagcgccgtggggagaggcgggcggaggctccgggggctcgggagcgggcagagggggcgagatttgggaaggggacggcggtgggggagagcaggagaaaaacaagcgcgcctcggagcggcagggactgctgcgaggaggaggagagcgccggccgcgggtgggggggctcagtccggggtcgcccccggggggccgggccaatcacggttccggggagcggtcggcggccgggggaggtgcgcctgggaggcggtgcagggcgccccgtccgagccccatctctcgactccaccgatttactccatattggattctcaccgccgccaacaggaggaggaagtagggcggaagcgatgacgtcttcccagcggccagaggtggtggagtgcaaaaagcttcctacttgcgaccgaaaaaaagggagaagaaaaaaaaaaaaactttgtcccgcctactgagcacgccccgcttcctctccccctccctcctggcttccactcccgggggagccgcggagccgagttgtttgcttgcgccgcgaccgtctggctccgaatcctccttgattagggctccgggttttaggaagcccgagaggagggaggaggcgggagcggaggactcgtacacatctggctcccgtttttgccccctccctccttccaaacaccaagattaaaaatcggggggttgggcgggggcagagatgggaaactcaagggaggggagggagtaaaacagctgaagaggtgctcaggctcagaggcacaactacccccaccgcggggtgggaaggtaggggcggcgcaggtgccaggggctggcttctccagcccaacccaaccagagaggggagggggttcgactttgccaaggttctgaaaggcagaggcttttccgtttcacgtgaatcttgtgattttttttcttttttgtctcaatagaggaatggatttttgttttgttttgttttgagatggagtctcgctctgtcctcaggctggagtgcagtggcgcgatctaggctcactgcaacctccacctcctgggttcaagtgattctcctgcctcagcctcccgagtagctgcgactacaggcgcgcgccaccacgcccagctaatttttgtatttttagtagggagggggtttcatca

SEQ ID NO: 37343 - DNA, 2743 bp, Homo sapiens
cccaaaaggggccttttgatggaaacattactagcaggtcacttcttggtcctccccatcaattactgtggttgaggcaagtctgactcctgcagctccatagaataaatgaggacattgggcgaataactcagatatgtctgttgatctgaacatcaaggtgttatcaaagtccattggattgttgctggaataggggatatcacagatttagggctttaattgatgtcactgctgaaagagctaaggacccacatccctgtctctccccacaaccggcagaacagggggctgcgggaatctctgaacacgatcaaatcaatagtgctcagtcagagtaggatcgtaaagcttcaaaagtaatatcgatctgctcacaacttcacgcaaacccagcggggcccccagcaggtcccccacctacaggcttctcagttccgagtcctgggcgagggagcacccccaccccggcccttcccgcgggctgcccggaaagtccggagcgcggagccggagcgaccctccgcggccggggacgggcatgctcagtagccccgcaggtcctgtttcactgggaagccgtccgcggcccccacccctcccgcctggctcgggcgccaggagaagcggacattttagcctcctctgcaatccgctctctcgttcgtgtccttctcccccctctcgtccggtagggccggcagtgtagatttccccaggggcgggggtgggatctgagcaatcactcgccctcccccctcccaggggcggggagggggtgatttagggaggactccacggggcccaaaggttcgcaccgccccgccgcggcccagcctgcagaagccccccgctgccgcggcgcccccgctccccgccccgcgaggcgcgcgcagctgcgcccgggcctgtcctcgcttcacccccactctgccccttcggtatttctcaatgaccggcgctccgaggacacttccgacgcggagggagggggtgtcattagcgctcggttatcagttccttccggtctccccgagctcaaccctgcgcgcggccgggccgcgcctcgggcgatctggtgcctttattatgatgtttaagtaagcagtcgtgtgtgccaagtgagtttgtagcccagctgtctcccccaagccccgctggcaggaatggaaacccaagctctctcgtaatgcaggggatgatgcaaacttagaaactgacccggcgcccgggaatgaggcccccccgccccgggcgtgcggcggcccagtcggggcatgaatggctggagcccgattgcataatccgcgcggtataaatagccggcgggcgggccgctgacgcgctcggttgtgccgttatcgtgcaatgcttcatccccggtgccgttcaatcccaggtcgttttccctttcagctgcaatgccgggattttaaatagcagagatgaaaggcccctgcccccgcctccctcctcccctgagttcatgtattatgaatgaaacggcagcctcgctgcttcctgaggtgctccacttcaggtaggagagagactcaatgtcaaggcagctggctactaaaagttgggtgtgtgcgcgcgttggggagggacggagaccaggaaataattgacaggctgggaaacattcttttcgagaaaatgtaaccgctcagggtttgcctctggagtttcagtttacaactgtacaagcctcagtcaatttaagaatggattatgcaaaggggctttcgactgcggcttgctcgccctcacaccctaggccgctgtctctgtggaaagtgctgtttcattcagaggagctggtttctgccctcccagggaggcagcacacatcccctctcccctctcatcccccactttaagatgagccctgagaacccttgagggtctcgagaaaagcgaatgctggtcactgtagccattctctagttccagaacctcttggaagcctcagcgaggtccaaagctgagtaagttttaaaacgtattttttttccaacagtttttcaacaataggtagtcattttaaaaattaaaggatgaagcaagttttcgtcttctcatgaataccagatttcaacttaatttcttaacataaaaatggccagttcttcacaaatgcatttctgacatgtgaagggcaatggtcaaggtcatgatttttttcactggatacccattgctccagtctgccttgaaagcaccagggctctatgaggcagtggggatacaggagtgaagaaacccaggctccttccctccagggattcggtcagctggggcaacaggcatgtaaaaaacacatgaggccgcgaggtaacagctctgaaaaatggagtaagcagaagagaaagcaggggtcagggaaaggatccttgaaagatgctgggagtgcccttagataactggaaggggagagatctcggggataaagagccgggttaccacaaaggccctaggtgcgaaataactttgggaggagggggaaggaggtgcgggaaagggtggagaagggtagaagccaggtcagggaggtcacacaggccttgctgaagaaggttaccctttattttgaaatcatggaaccttttgtagtcgattcacagctgatctttgtctagtcccagatcactgcagtggctcccaaagttatgcaaatgtggggcaagtgggcatccattgttctgggattagggcatcaaaccaaattcacaaactgaca

SEQ ID NO: 37344 - DNA, 1188 bp, Homo sapiens
gcttctaggtcatgcctttaaggggaggacacttctgctgaacttcccctatctcctactgccagtgacagaggtgtggatgtcagcatgagacatcctagaccatgcagataaggactatgcccatggatggcagatcaacaacatagcaagcacctgagtctcaatcctgggcactactgtgtcagccctagatatacccagactattacataaaagggaaattacattctctcttgtctaaactacagttgttttagatctcttttggagcagccaagcctgtgtctgacactgaagaattttattacattcttcagccctggagaatttcattaaagagacctccttgcaaagttggtaatctccacacattttgctttgcttatctaggcaggtcaagtccaaagtgcatttttccaaacgcttctgctcctctttctgcctaggagtactcttatcagtgcttggggtgggggtgctgaactgaaccatgaacttaggaagttaagctatctctgtgggagtcacgggtgctggatgagagcaggataagcaagctactagaaagagagacacaagagggctcccaagccaaaaggacttgaggccttgagccttcagggaaatggatgcatctgaagacagagtggccctcgaagcaggactggttggccgcaaaacaagagaaatggtggtggtgtcatccttgctttgcaggaagaatactctcactgagctctcttagagtacttctggcctcagtagcctgcaggaatggaaaggaaagggtttgtcaagacagctctgtgtgagcaatgtgcagcaggctcttctcaggctgaggccattaatctttcattcattgaatcacctttgctctgatgtctcattcaccaagccctcttctgctgcaatttggtttcacacctggatctcctacaatgaaagtgctgatcatagagactttgagcctttctggtctttgtgatgtggatggctcatggcaaataaataaagtcgctgcaggtcaggatttggcttcccaagttgcttgcataaagagtgaataatgcagatcttgctgcaggtgatttgggcccaggtggagttatgtttctctttgtaccataatgcatttgcattctggtgtctgcctaaggcttgggtccttttctgtagaatgag

SEQ ID NO: 37345 - DNA, 1359 bp, Homo sapiens
gcttaaagtaattgcagagactttctcttccatttttttgcttacggtttctcccaggtaaattctacctttcatgcgtctgccacagctatctttctaccatataaatgtcactgagtcctttctccattaaaaaaaaaaaaacctcttggtgactcctcatagttgaccaaggccttttttttttttttttgagatgggatttcaccatgttgcccaggctggagtgcagtggctattcacaggcatgatcccactactgatcagcatgggagttttgacctgcttagtttctgacctggcctggtacactctgcctaggcaacctggtggtcccctgctccagggaggtcaccatattgatgacaaacctactgtagatacctgatcggcgtggtgcaccgtagcctagaactcccgggcttgagcaatcctcttgcctcggcctcctaaagtgttggaattacaggtgtgagccactgcccagccaccaaggccttcagcatgtggctaccgccttcctattctggctcccatcctgtatctcctcctgccacacatggagcctgcacctcagccagctctcgtctctaatgagtttccctctggttcccattgacgctgtgtcctccatccacagtgcccttctggacttggagagatcttcttcttccttccctgacctcctgagaccttccctgagcctctgaggcctttcctctcctttccccagcattactcacttcctgctctctggcctttggcacctcagtcaaatcactggtaaagcagttaacacattgttattccagttaatcacatgtcttccccacctcccctgctaatgatgagtttgctgtggagaggaccttgccttaccacctctgcattgccagggcatagaacagtgccaggcatagggctaagtcactctctaaatgtctgtctaatgatcttacttaccaagcttgttcagtcactgttattttaaaatgcagttgttagactcctagttttttttaaatgtgactaaagctgagttgatgtcattattgatgatcaacttccacactgagctaagtttttgttttcattcatcacacacacatcttatctataagaggagatggaggcttccttgaaattagtgttctttttgtagttctattacaaattcagaaagagtaggcctccggaaaattctgtgcttgttttcatctctaaacaggaagtccaaaggcaaataaaaatgaagacaatcccagtttgcaaacagtcaaaatttttagcaactctctcaccaagtactctgggattttagcccagtcctactaatttagaggaaggcatttgctcggg

SEQ ID NO: 37346 - DNA, 2046 bp, Homo sapiens
aggtgatccacccacctcagcctcccaaagtgttgggattataggcgtgagccaccacgcctggactaatatgagttagaagtaaatgaactaattcagggatagacacttaatgtgaactcaagccaggaagtaaggagctttcccctgacaacagtgattgagataggaaaggggacaggtttaggttagcacaattagtacgaagtcaggcctttgctcagtgactgtgggagaagaaactctttgtctggtcagtatacatagctgtgaggtctggagctgtagcaaccacttggtatcttgaacaaagctagatttgagatgatgctgacacaggagagaaggcaattgatgaaagaaatgcagagccagagccctgatccagccactcctgaacccatcactacattaaacttcccaagtatagcagtggttcccactgggggcaatttagctcctgaagggatatttggcaatatctggagacatttttggttgctacaactggatgggtgctcctggcacccaatggatagagaccaaggatgctgctaaatcccctatagtatataagagagcactctttcctttgcaacatagaattatctggcccaaaatgtctgtattgctgaggttgagagactctgacctagagatttgattagatctaagttcttttttgggcaaggatgctttgtaggcactgtgtacttgcttttacgtcacaacaggcttgttctcttggcttttctggatttctgtacctgccattgctcccctctctcagtgcctggtgagcccctccctagcctctctcacaagcccagtgggctgccttctccttgtaaactctccacaccctggctcttctcactatggcatttgctgggcattttggggctcgttggtgtgtgtttggcccccactgggctggagatcctgggaaggcagggactcagtctatcttctctcgtgcattcaggacactgggactggtagatcctgatatgtaaataaatcaatgacaaacgaatgactcataactcggatatttgagttggtcagaggcaatgtctctttctctgtgggcaggaactgaatcaacacagtggaattttctttttctttctttcttttttttttttttagacagagtttcgctcttggagtgcgatggtgcgatctcagctcacggcaacctctgccttccgggttcaagagattctcctgcctcagcctcccaagtagctggcattacaggcatccaccaccatgcccagctaatttttgtatttttagaagagatggggtttcaccatgttggccaggctggtctcaaattcctgacctcaggtgatccacccacctcggcctcccagagtgctgggattgcaggtgtgaaccaccgtgcccggccaacacagtggtattttcacaagtccattcacctttcagcagtaaaatgatgtagcaagatcatccatcatatatacaatggaatattattcagccttaaggaaatcctgtcataggctacaaggatgtaggttcaagcgattctcctacctcagcctcctgagtagctgggattacaggcgcctgccacaatgcccagctaatttttgtaattttagtagagatggatgaatgtggaggacactatgctaagtggaaccagctagttgcagcaagacaaatgctgcataagtcctcttatatgaggtatccaaaacagtcagactcttagaaacagaaagtagaggtagagtggtggttgcctgaggctgaagggaggaggaaaagaagagatgttgttcagtgggtataaaatttcagttttgcgagataaaaaagttctagagatctgccgcgcagcaatgtacataattaacattaatgtactgcatacttaaaagtggttaaatgggctaggtgtggtggctcatgcctgtaatcccagcactttcagaggtcgagacaggcagattgcttgaggtcaggagttcgagaccagcctggccaacatggagaaaccccgtctct

SEQ ID NO: 37347 - DNA, 1307 bp, Homo sapiens
caatcgcttcctaaatcagtcagtagggaggtgaatgggctcacactgactacttagagctatagatgaatcaactcctgggtcaagtgggcaagaggtggatccctgaccaaaatctcacacacatgtacatacgtgcatgcctatccaataatagccaactgctgaagtgtgtgtactccacaggcagatgctgatgccaagtttggggtgcaaaatgttattagggttcaattcctttgaagggaagggagagaaagcggggttgggtagtggaaggagttgaactgcaaggtaggcctgaaaaagtctgggccatttcttggctttggagggttccggggcaagtattgcctgcttgtatcctgcattgggtcgaaatgaccaggactttatacctaggagatgactcatcagatgtgggctgctgggagaggcagctctctgcagctgaggcagatttggaaggctacattccccatagctgggcagaaggtcctgccctgctgggggatcagggtggtatacccccatgtatgtcatgccaaccgtgtctgtcacagcccagtgtgcataactacatgagtgtgaaaaatatataactgcatttatttaaaaggattttatagtctcttctggccactagtccaaactctctctttctctattcccagcctcaatttttccagagcagcagggttttactatattatgtttatgtatggattgtaggtggttagagctcaatcagctcttgaaactcacctgttcaatacgagcattagttaaggaagccagggtccatatgagttctggacctcaacttgaaatctttcatgtagtaggcattcaatgaatacttgttaaattgaattaatcaaggacacagactcaggattagaaccttgctctcccagcttctagtccagtgttctgtgaaccttgctgtctctctctctctctctctctctctgtgtgtgtgtgtgtgtgtgtgtgtgagagagagagagagagagagagagagagagagagggacagacagacaaagacagagagtaaactttggaatatcaaataattctagtagttttggtccagtggtctgggattttacattatcatgcatactagtaggaaaactcagacaaatcagaattatttcactggataaactagaggcagatgtatctggcattcacaatggttttattttatgggctacattgagggaaccacctcaaacttgggtggggcagtagctactcagcccagccaaatattgccatggggcaatgcaggcccaagat

SEQ ID NO: 37348 - DNA, 724 bp, Homo sapiens
gtctcactctgttgcccaggttggaatacctggtgcaatcatggctcactgtagcctgtgcttcctgggcataagcaatcctcccacctcagcctcccaagtagctggaattagaggtgcataccaccatgcctggataatttttgtagagatggggtttcactgtgttgcccaggctggtcttaaacccctggactcaagcgacctgccagccttggcctcctaaagtgttgggattacaggacaggagagagccactgtgcccagccaagtttctttacaaggcttgggtattgagcaacctggcataatgacaaaagttcatgacaaatagctgctacgagaattataggaagtcacggctgtaaaagcctgccgtactgttttatcaaggctagttcctctttcctttcctcacatttctgatcagggctgaccctactgatctttgtcttcagagaaccaactctgccaaagccccagatctaacaggccacatgaggctggacagaatttttcctcctctgtacaccaagacatttaatgacttttcttcttgttggatatgtcttcattctgttaagttttcccaactttcctttgctgtttgtagtgacaactactcctttagtctgttagattcttgagggcatagttagcatctattgcatcaatttcctaaaactgcttaggttatattctaacacatgctggctgctttttg

SEQ ID NO: 37349 - DNA, 3694 bp, Homo sapiens
tcagaaaaaagacagggagaaacagagagaaaaaggagagaggaagcaaatgataagggatcctggagatggtttaaacacacacacacacacacacacacacacacacacacacacacacacacacacacgagggagagctctttcaaggcaaagcgcttctgaaggttttgggagaacgtgtgtcagcccttcaggcacacagggtgccagtacggagttgggggcggggaagggtgcagtgcaggcggctgggaaggctcatctgctcggctttatggaaacgctccactgttgggggcaaccaaccccgcgttgactcctgcgaagtgctaaaggaagcgatagatgtcgcctaaggagactacggacgctcggtggaacctcattccagacctatgttctcatgctcgccctgtgtctcctgctcctcggaagcccactctatagaatcttcagtcctacctcgcagacggacgcaaattatcttttactttgcgcttaagagttggcttcaatacattttagagctcctaacctttcccaaacaatcttcggatgaagggatacccccaatcttgctcaaaactctttccctacctacacccccttgagggtgagggttcagtccgcagctggcgagtgggacgtgggtgggggcgatggaggcgcgggcgggctgcttggagggagtcagccttttggccaccttcagggcgggaatagggactggcagttcgcattccccgcagatcgaagctccctgctgatcgattatttgataattgattttccccgcagccaatgcgcggcggcctgggcgggggcgcctcctgattggccgagcactcctccacggctgcctaccgagatttgggtgagctcattttccagtcgaccgcagggggagttttctgcgaggtttcagctggagggagggggaaaaatcctctcggagccgagcgagctgcgagccctgcttgtggatgtgaggtttccagccactggtagagctgctgcggctgagccatctcggcagatcagagcccagcggacagaaatataaatacgaaaataacgccactaaatataatcacaagggagaagcttagagcgggagaataaagagaaggggtgagggggaattaaagcccaggcaataggtgttaaagttaaaaacaaaacaaaacaaaaaacagtggttggttggagcctccgagttgtaggtacaggcagcttttgtctgaaatctcagcttccgaagcggatttctttttctctggcactgggaggtttcgccgagccgggttggggacgggaaagaggagcgcggggaaggatgtctggggtggtgagggcagggcttcgctggagaaagagctagtggggcgcgaggttcttacaggcccgggagaggtcgaggctggagcccctcggcgcctctaagacaaaggcagcggtggctgcagccggagcctagcactccggcagcgtcgcgccgcgccgcgccgcgccctgggcgcacggccgcctcaccccgagcgggtcggagaaagagcctccctcccagcggctccccggccccggctccgcccgcgaggtctgggctgctgcgagcccgcgccgggtttcgctttccgacgatcataaatagcttggtgtttgtaaacaggcgctgggggcacattccccgcgctcagctcattgttccctcccttcctctctacttcgcgcaggacgcctgggctggggctgggagccgccggggctaggaggtgggggagtccagacccgaagtgacaaaatgctagcattttctttcccccggccgggcgtccacctctaacagcaaagaaacctctaagctgggtctgcagaaagcccgagccacctcaaccccatgttctcaggactccttagcagaggctttcccaacctggcttctccctccttttcctccacgatcccgctttgacttttctccttgcagtgtttagttctgagaattcagtactttgcgcatcaccccctgccccgaaaaacactggcagaccccaataatttcgaggaaagtcatgaagtctatgcgcggagccctgtgcaaaataactcccgctgctgcctgcccggcgttgattcccaatttatttcaagagagtcggctttggggagagagtctgcagggggagggagagaaaagaatactgaaaataaagctggcggccgcgggctactgcctgcgtttgtgtgcgtgtgccctgggtgtgtggtgtttgtgcctgggcgtgcgatttaatggagcgcctctctgcctctccagtgcggccagagctcgcttcgcgcacccacccctgccgaggagcctacttgctgcagcccaatgcattgtgtaagacgcgacctgttatggccaccactacttccgggttctagcattctggtcggaatccacctctccgcctgtgcaacacacactttacacacgcacggggactgcaagcgggcagcatcgatcgtggctcctttaagacaaactcagacagacattttttttaaccctccttctctaatctccttccagtgcagcacttgcaaagagggagagagagggagagaaagaaagagagagagagaagagagaaactgattaggaattaggactgattcaagggaagcgagcgctagggctttgtgcatttgaatattaacatttgaggtgttctgaccagaagaagacagagcggatgatcattcattcaccacgttgacaacctcgcctgtgattgacagctggagtggcagaaagccatgagatttggtagttgggtctgaggggcgctcttttttttccttttctttctttctttctttttttttttttaaactgatttttgggggagagaagatctgcttttttttgcccccgctgctgtcttggaaacggagcgcttttatgctcagtgactcgggcgctttgcttcaggtcccgtagaccgaagatctgggaccagtagctcacgttgctggagacgttaagggatttttcgtcgtgcttttttttttttttttttttttttccgggggagtttgaatatttgtttcttttcacactggccttaaagaggatatattagaagttgaagtaggaagggagccagagaggccgatggcgcaaagggtacgtattaaaaaacaattgtggaactcaaatgtgagattaaattgaaacgtggccgaaagacactgctaaaaagtttcctttttttctctctctcttttaaaaaatgaggctcctaaagccgtggcctaagcgagaggatttattcaatgcatttgtagacttatgtatgttacttggagttgttaattaaaggaatctatttatctatagattcctaaccagcagctatataaataaaaatgcaagctcaaacaatcatctgggtttttttttaaaaaagctagatacctaaagctgtaatttgaacattcagagatcagaagtttaaagttatgtttaaactaaaatatgcagctggaaacttctgatatgttattgattatgctcatctttaatatcactagaagtattcagctttttaaaggaaataactttgtcatagtatagccaattttttggtcagaaaacattcatctttttatagtaatttcaatttgtatagacttgtataca

SEQ ID NO: 37350 - DNA, 2446 bp, Homo sapiens
tgtattggaggatcccggaggaagttctcccatagtcagggaatgttttacagtacttcatgttttcccaagaactttcacatatatgatctcgcttgttcctcataacacccctttgaattagccagttccttatcaccatcacgtctttgtgggtagaagaaggaaggctcagcaaattgagtcacttcatgaagagtacccagaccgacctgagactgaggacccaggttctgaccttaaggttagtcatgaatgcatatgtttggggaagtaggggaacttggaaagacgagaaatagtggcccggtgttgcgaaattactgtttgaccatctggaaatttgcccctggttcacagccaggtttcagaagacatggaacaatcattccacattcacatagcctaagcacagattcagaatgcccactttccctcttctgaccttttttttttttttttttttttttttttaaactaaggaaaagaagcaagtctagaagacaggcaattagcatgatcactcaggccagtttttataattttggttttcatccaaactagtcacatttcatacttttaaagtttttaggcttttctgctggagatcatcttcctcacactgtgattcttaaaggttatgtattttttttaccctgatcatacttacgtcttttgacaagagagaagacggacatccagctttgggtctgcagtgatccatcattcaacttccggtctttttcatcatattagattgtgctagtacttgctctttccttaagctatctccattacaggagggggaacttattgccccaaatataacagagatgcctgacttatggagagttacttcagagatgtttctggaagaaagagttctttgggtataaatgagaaacaaggggacagttgtgtttcccacaccatattttggtatctagcatgtaaattatactctcatagaccacctggatctgaatggctgcgatctggggccctttcccagttttgcatggcagatgaggaaaatgcaggaaacgctgaggctttgaagatgtgctagaacctcagcaacacagagccactgagcagcaagaggaggctgagacagggcagaaacacccccactgttaagagtgatgagggtttggagcacctaatctggatctagaaattggccgctgtgcaggcagctgggtggttcaagatctagcacccaaagagtgtagcaagttcaggcctgggcatttcggcataaccagtctggtaggtggggccagcaagaaggaattctaggccacaggccaattcagaagtcaggcaggcctacgattggtattcggagatctgtttgggaagagatgatcatccctccagctggcagcacaggagagcagtattcagttctggggaaagaaagggctgggccaggggaggggaagagagattcccagccagctgatgttggagagaagactagatccagaagaggaccaagagcagagaaggaagtaattccttggtttctgtgacttctttctcacccaagatagatttcaggttagcacactgtgacgtcatcactgaaaacctctcccctcccctcgggcgtggggggcagtgtgtgactgttctttactccaggctggtgattcaggaggcagccttgtttgtgtttccgtatgcctcctgcaggggagacttgcttttctttgatacataaatggtgagtgaaaagtaactctcctgtgagcttggtctcttttttgctcttctctggtcgagcagcctgaccaggcctggtcagtgtgaattgcccaatttcatagtgtgcacgggggtctcaggagagggcaattgcctcataacttttctattagcagaatttcagattcctgacgtggagcgatacttgaaaaccatttgcgtgatgctgggaaatgtttgctttgtccttctttatgtcctaggcatgggcatttttgtcatttcactggggactacttgtaggctctgaaagcaggaaggggcttctctcaggccatgccctagctaagcgaggattcccctctgtatttggatagctggttgctcaagttccaacccttacatgaggtttttctgtatgattttctcctttatgttttggaggcacactcgggaacgttctcgtttttttttgtttgttttgcaatgtggctatttttgactttacaaagcattggaactggcatcctcccattcttgtgaactttctctggatctgtaaatacttggtatttgttttcttccttgtacatttcaggggtggtttttatatttaactttgactaagatacactcacatgctactctgagagtacatgcttcggtgtctcttttttctttgccttcagtaaaaaggataagattcagggaaggtttatgaactcactttatg

SEQ ID NO: 37351 - DNA, 510 bp, Homo sapiens
caggtgaacaatctcagatatgttctggtaaaccttcctctgctggaagccttatttttagcaatgggaaggagagatgactggcttgaacagactactttagcttcacaagttgaagttgaattgatcttgacactgctccagaagagtctactgttgtcattttggtttgatggtaaatgatatacaattggcttcatgaaataaaatggtaccctacacataatgaacactcatcaccatatacaaagaacagttagctcagtgtgatcatcaggtcacagatgactcatgtgaagtctctgtttaaataggaaggactactgacaagcaaacatgctcacagaaaaatagctaagtagcgaaataaataaagggctcagtagtccttcaaacatgtattagaaaacaaattaaaaattggtttcctattcagtactgtaaggcaatgtcatgacagtgttggaaaaccaactccctggtagctggtgtattgcggacatttctgcc

SEQ ID NO: 37352 - DNA, 1080 bp, Homo sapiens
ctagttaggaaccttctgaagtaattctatgtccaccactatcctgctgacagttcacttacgcctagttggcaagaaacacgacggggggtgaagcagagccatgtcattgtttggaggcaacaccattgtgattttctgtggtttaccaagttggctgtggcatgctaacataaccaaatgtgggcttcctttaattatcagggagtaagtagagtggtaaacactgaggaatagaactaattgagtaaaggtgaaaatgctatttctgaaagtgagcaagtaattttttttttttttttttttttttttttttttacttttatcagtattacagagagccatacaagggaggaaaagggcaaaggtatgtggaaaatgttgcctgtgaaactgggaaactaccttgtgttttggctcctaacagatgcccactgtgatctcctcacctctcctggttctcacagagggaaactaaacttagcaattcagttttgggggaagagaccagggaaaggagtggaggataaactaaaggacaaaggtcagtttcaaaaagctgttctgccagatcttgctcagaaaactattcaggtatccaaagactgagaataaaaggagatagatgaaattagtccagtggaaaaaaaaaaagcctaatgataaataaacatctggggacaaaaaagaaagaacaaagcaaaacttcctgtatttcttttttaaacatgagtcacagtcacttcccattctccttgtcagattcctataaaaaattcaaaataaaattcaatttttagatgatccaggtctcagatttttggagattttgctcccctgccaactttcctctttcgctttttaggacttgagtcttaaacaaacaactaagtaaaaaagaaatatatttctatttggacatgaaaaaaagctatagagcaaacccattatcttcctttcctttgtaaagctttttgttttgagactggagatagtttggtcagaagaagaaattctaactcatgattctatgaaaaaaaggaaatataaagattcttctcctaattcagtcttccacca

SEQ ID NO: 37353 - DNA, 580 bp, Homo sapiens
atatttgtgttcatacataaatgtagatatatatttgaacacacagacacacacacatacatataggattaagataactattttacttatgcctcttaaaatgacaggattttaaagtgacaatatgttcatttaagttcacatcatatgtacagttctttttttggttcggtgtttagagaattcttgataatttagactcttccacaatgaaaagtaaagcattctgtcacaaaagcagggaggatgagacacaaggtcaaagggcattttagaaacaaacagctggaccaatttatttaaacagatagagggatggggaactgacctcagtttgacttatagtgggaggagcaagaatgtcattttattactttgcccagaaggaaaatgtttttgtatctgaattcaccctgaagccatctaaacatggctctgctgtgtgtagcataattccaaagagagaggatgtataaaatagtctgggataatgataaaatacactaaagagaatcaaatgtggagattgtttaaggtcgaaaaggtgatgttgttttaaaaataaaatattttgctattt

SEQ ID NO: 37354 - DNA, 1482 bp, Homo sapiens
aatatgatttaaatttttttttcaaaaaattaaaaatattttaccctatcatatttaatcagctgtaattataacacattcaaaatgaataatatgccttgacagtatttttattgttattgttcattgcatgatgttcgactgctttagaagcacaggaaagagaagtaaacgcgctacaaatggggaattaccctcgtttagcattaaaattcatttagataaaattgccacaaacatttaaatgggaagattagttccccctcacgccttattgcactcgctcaatggttccgttaagaacattttacacgttggaaattccgtcttctcagacggcttgctgtttcctagttacccacattcaaagcaaaggcagcagcaaaggcagccgcagcagcagcagcagggaaaaaaaaaaagttttggcaactggtctgcaattcatccgctgctcgccccagtctcccctccgcccgctgcagtctgcccccaccccttccccttccccacccctacctctttcccctcattatgtaattcgcagagtccagtcctcgaggaaacacgttgcctagttgtgtagtatttatatacaatgttaaaatacaaagaaagaccctaaagtcagtcgagtcggttcctctctgggtctccctctccctctcctgttctaaaatgaagatttagcttgaatgtgctgagtttctcacatcccgtaccctgaggccacaaggcacgttttttggctttcatttctgccaggacttttccaggaaattcaccactgcttttcgcttgtattagaaacgtgtgaaagaattcgtctgaaaagtccatgcaccgtctagcttttctctcccccctttttttcttctccttctcctcctcctccttctctctctctgtctctctctctctctccgccccccactctcgcactcccccatcctcctctctccccctcccttcgcagagccacaggaaaagaggaaagtcggcttcgactgccatcttttggggatttcgaaaaacgactcggtaggaaacggagggaggcggaggcgcgggagtgggggaaacccccttattatccagtgtcggaactggctcccttaatctgatgcttaaatatttgatgtggaaaaattacccataaaattagttactaacaatttcaaattgaaatcacttatcgaattataaacgcattaaagctgtatggatggtattaggagttcctcgggaggcagcgggtgtctccttgaagtgagccaggcgggcgagtttcgccccggggaaaagagcccccagccgagcccgggggcaaggccgggagggcggcgctgcaacctgggcgcagggtccgggtcagggggatcgagcgggcggccgggtcctggtggaggctgcggctgcttcggctcgcgggggcggggagaaggggaggggaaggagccttggtgggaggctccgaccccg

SEQ ID NO: 37355 - DNA, 551 bp, Homo sapiens
tgctgtttgctgcccttgtacgacagcaggtaaagtaagtgcctccaaatagccagctgccaggatagcctgagaaaggggtgggaaacaggggctggagagaacagaagacttggggccttttacagcaagtgcaaactttcacacctgtcgctataaatcaagaggtttatggggcggcaatatttacactgtaattaaaaaatcataaagcaagcaccctttcaggttgtggaaaacaaaactctcaagttctacagcagcggctgttaatcagttactcctaacgatctgctgcccagattgggtgcttactcggccacaaacagcaaacaggacaatgggagaaagtgggatttgcacacgataacggctttcagaggtggctaggacttggccagaaacctttcagtttactgcatagtctctattggagcttgggaaaatattttctgtgaacctagttggcagcttaggtttccttctcccctgttcccatgtggaactgaagtccatttactaaggtgagtatggtggcagtattaggcact

SEQ ID NO: 37356 - DNA, 903 bp, Homo sapiens
ataaatcctgggaaaactaggttgcattacgcttcctgttaaacacagaaaagaaacagctgatgtctgaatttgctaatttctgctgattcagttagagggcaatgcactcagctaacgagggatctatccaggtatgtgaattaaggcttgaaaagaaagtgtaggttgtaatcagtgcatccagcactgagttggaatcattatttagtgagcattttccaaagaaattagaaaagatttccaagcttaacagagctttctggattcttccttctcatggacataatataacaaaaatacaatcccctgcccctccttcaatcctgggattttaagcaatgctcaagtgaccttgttttcatgttctgtggaaataaggtagatactgttatctcacctgtattaatacagaactctgtataacaaagaagttgtaatttatcaaaggtcacacagtgagtcattgctgtaatcacaaagcaaatgttcaggttctcatctccttggcagcaaatgttttgttctctaggttagactatcttctctaaactctcatcatatgccactgccttcccctgctggtctatctccaagaaagatacacacacacacacacacacacacacacacacacacacacacacgctttacctattcatcccatccctcccctatcctcccaactatccacccactagtcatcatccatcccatctaggattgtcagttttaagaaaatcaagacacccagtgaaatttcaattcagataaacaacaaataatactttagtataagtcccatgcaatacttaggacacattttttctgaaatatcattcaccatttattttacattcaaatttcactggatgcctgtattttatctggcaaacctaatcc

SEQ ID NO: 37357 - DNA, 1094 bp, Homo sapiens
aacaggcttataaaaatagttcagcagaataaatattcctgtgtttttcatacatatttgccaatggaataacccccagacccagtgttgcctcacactgtcatctacattattaatactagaccaaagccagggtccattactttcatgtgaaatgaaccaaccattttttccagtagtctaaaagacaggaaaagccttgctgaaatgaaaattttcttaggctgggaactgaattgaaatgagtagtgttagttttgtttacgggtcttgcaatttaactaatttcttccccatctattcttttatatcctaattgctcaaaaatgttattttaaactttaatatgttttaaatgctgtaatttcctttctaaacaatcaaaagccattttcagcttgggccagaatattctgcataaataaccattcaccaaaaaactatttgcatctaggacattcctagcattcctaggcctgcacttggctagggtaacctaaatactattaagaattgtaaaagttttgagattttacttttactgcaagataaagaaatttgtaatcgtctcagacacagtttaggagtgttttatgttaaaattatggtggcagagtgaatgatctggatcctgctgcttgaagaagagtcaaggacaagctttaaaatcaggccatctttctgggattcataaaagcaagaacacataaatgaggactaaattccattatggccagtggaaagaaagttattaaccctgaataagacattttgggactgctgagggttttttaaaatattcttgaggtttcacttaaagcagtagaggaaaatgtctttcaaattacctctatgacacccacagccattattcctgagtagatataggccagatgggggttggtatctgaaatgatcagtggggttggattcaattagtgctactaagtgctgcttgcagaaagcagtgtgcaatagtatgccccacatcagaactgggtaacctgcttcccttcatccttctactgacattcacagactgaactcccaagggtgacttacttagaaagggaccctttctatagtagagctgc

SEQ ID NO: 37358 - DNA, 1327 bp, Homo sapiens
tctcaataatctgaatttgactaacgtgcaattttcgttgtaaattcaataaaaagttgctagtgtattcaatctttccaactcacaagctcccactctcagtttacgcggacctgactactacccgaacaacccccaccagtctggaggattttgagcctagacactcctccagagcaggctcctgtcccggctgcggaagtgcgcgcgccctcggcaccttaacagttccgcccctctcccggacccagccaatcagcggccgcctcttgcgcgcgccccaccgaccaaaatggcggctgccgttggtgcggggtgcggtttgtagtgctgttgccctactcatccctttgcaaaatgtgaaagaagaagcggctggtggaggcgggccataggcaatgagtcggcgaaggaaacatgatgacagccctagcccgaagaaaacgccgcacaaaacagtggcggcggaggaatgcggctcggtggtcgagccagggaggaggcggctgagatcggcccgcggttcgtggccctgcggggctagagaggggcctcccgggccagtgcggcagcgagagcagcctccgaccgccgccctgtgcagtaaaagtaaccccgagggtgagacgtcggcagcgcggcctgccttggcttcggcgccgcatccccacatcccagcttgcaacagggaaatctggggtgggggtggagtctggagcgtgtattctgtctctgggattcacccctcgagagtccaaaaataatcctataccactccccgatgggcttttgtccccgaacttcagcactaccccgttaggtttgaccatccatttgcctccgccacaggaataggtaatgtggtttacctgtttgcgggagggcggctgctttccaggctgctcctccagtcagcagcagtggtggagtgagaagaaacagctgataggcccgctaacctcagtttttgcccggagaagttatttctctttaaaccctttttttccctgtgacctgctttagagaagagttcataggaaaagttaaagtttgtctcaaagcctggtagatgtctcacctcattgtgaataaaccggaagttcctgtgtgtaacatccctccaaataagatactaaggatctctttcgtctcgattagttttaggtgttactttttaaaagacttctagtaaatcttagttggaactgaaactcatacaaaagcctttattctggagcatgttcttgaaatagtgcttttttttttttttttttttttataccttacgtgtcttttttcttttgggaaagaatctcgccctgtcgcc

SEQ ID NO: 37359 - DNA, 1303 bp, Homo sapiens
gagtgaaatagaaatatgttcaagtcaatcatttgacacaaagcaatccagtaactctaatattataattactaagaagcaaaggctcaatacgtgaaactgttctgaacttctttactttttgttctctttttcttatttaacatttaaatccagagaacatttttgcttagtgtcttctctgaaggaagtatgccatttttccttaacctgcgcttgaatagttactatatgttgaccataaacaatagatggcactggcccaaaacatggtttgaagaattactgtcacccaggtggaagagacagaaaatgaagtttttcttagcagctataaaatatccaaaattacacctagcacagtcaaaacaactctgttgctactagctctacattccatttttagcatgtcatagaaattcattttacttacagttaattagttaaatagcatttatgccataatagtacttactctataagttaacaatagatcttcattaattgtgggtttcacatgaaagaagcataataaaatgtgtttgggtgggccagtctaaatagtgataaaaagatagttgtgaataaattattggactctttacctaagtgggctagaaataatagctcatataaagaaatgacaacagtacgcaagtggtaacttgtataaaagaaaaaaatatagtgaaattagtagctttaaaatgttaccctcttaaactgagtacttttaaagcatataaatctttagcagtttcaaggtctgtttgaaagcttgtcatgttctcagaatgacaaatacttatattgtttatttttaggtgagtcattctcaaatcatttagttttaacattttcagagatagcatttttttaaatatgcgcttttattttggttggacagtcagttcactttttgcagggatacttttatacaatgttgtttatttgaagatggtatgtatcttcatttatacagctttgcacagtatactttttataatgaaatgaagtaatgcatttagataccttatacagcacctggattatggttgaaaatcaataaattatgtaattattcatgaagaaatatgtaataacatgtataaatagtatacaaacatacataggacccatgtatatgtaaagttgggtacataaagtcataatttagttctctgaaaattgaatgaatttaaaattacttttgtaaatggcagagttcataattaagactatgattgtctttaaattcaagattgttgaaataaaagggaaaatatattgagtctgaaagtga

SEQ ID NO: 37360 - DNA, 1663 bp, Homo sapiens
tgtgattcttacatattgcatgcctgtatcaaaacatctcgtgtaccccataaatatatacacctatgtacccacaaaatttttaaatttaattttttaaaaaatcacggttaagtcttggttcagtccaccatcagacagtcctaataggttaataagtggatagcaaacatctcattgcgacaaatacatctttatcaagccaaaactgaactgtagtcagcaaacattgaggacattaaagctattttgaaacaagtttgagttacactgaacttatccgggtcatcaagaaaaactgctctcttggattacccactacagatttcagctaaaggtcgaaattagcccactatctcagatgagctaatactgcagcagcaggcagtctgtgaatgtgaatgataaacggagctaacacagtaaagttactcccctagacgttccactttagcctctctccctaagcaagattgaaaacagctgaaaattgtgaagacttcaatgttttttgatttttgtttttaatttcttcgtcttccaagatttgagaagggggtggttaacaaacgaagaaaaagagagagaccggagcaaaagagagaaatgaggggccggggtaagccaaagcctgcaagcagccccaaaacaagcggaagtgggggacctgccaacaatgctgccccaacgaagagctgtgagagactgcattcctggaaggctacgcagccaaactccgattttctcagtctgcccagaggatgacaggggaatcccaggagaggaaaagcggagttaaacaggagcaggagaaaaactgaaactacaccttagaaaaatacctcacggccttcgactccagtctcccggaaagcggtcgggcaacgatgacgacaatgacgcgccggctctgcccccgccacgagcggcgcttcccgatgatctcacgctgctcgccacgccccctgctccttaactcttctccaaaggcaaatctcattttgagtagctcagacccatgttgtgggagacgattgcggcggcactcggaacttttgtctacctttgtacccggctaacactcaccccaaatacaggttgagtgtatttaaccaggaaaaaaatcttagttatcgaaactttgttcgggtttttactttcccagaagcttttttcagggccctcattctttctacccttttattgtctgcctctagatgagcctcttagagcagcttcccagattatccgtggggaagaacaggttctttattagattatccgtggggaagaatgggttctttatttttccaatctgtcagtaaaaggtacttctataaaatacagtaaaaatgaattagtagaaaaatggggaaaatatgtgcaaaatacaagcccaaattttttattagtttcaaataaatgtaaaattgcatttcaatgtatgcaatcagaacaaacataatagaaaataaaggcattaacagaaactgtacatactgttcattgaaagtgtagtataagcgattgagcattgtcttaacatttgtaacttgtcattccacggctgtaatttgataaaaagttatgcatgaaacagttgtccgtatattaaatgcatgtaaaagcattttgaacaagcaccatgtatgtaatatttaaa

SEQ ID NO: 37361 - DNA, 850 bp, Homo sapiens
ggggctgctttgctatcttcaccctaaacttcagtcctttgttatgattaggtatggggaaaagtatgagaaagatgttgtctccactctccaaaagtttgacctcagagtaaggctagaagctgacatgagcagcaaacaaattggttttcaatgcctcctgcctccttattctgtagcattcatggggcagtgagcattcaccacgtctgcctgcccagcatccacttccctcactctcatgacagtgctttgatttccatttgggggaccaccactcccccattgcatgcaacaatattggacagtcaaccaactgtccaccctcctctggccaaagagtaagtacatgacccacatgagccagctggactctgccctgggaatttgagcaatacaaggaggaaattcagttggaggcaattcaaagacttagagcatgagtgcccatctgccacaccaaacccctgagctcctttgctttctttcctgtccgaaacctgattcttgagctttcccctcagttccacatgctacctgagttggctttataaatgccaacctggcgaggctgaattacatttcccagaattcgctttcctgtatgtttccagttagggtgggccatgtagaagctcctggagtgagatttgcagggtggaagtgaagcagcaccagtttttgtagcttgcacacattgtcactttccgctggctcaccgcgtcagcaggaggcaggggctgggcctgtagctgctctacccttcccaggatcctccttcagctttcccgacttctgagccagacaggtctgcttagcactgtgatgaagtatcctgacttctgcagga

SEQ ID NO: 37362 - DNA, 574 bp, Homo sapiens
ggaagaccctctctttccccctgggtggtaacaaaatttcccctggtccatcattcctgagccctagttcagtctgtgtgcggccaggtcagcgctcaatagggttccaaacctgttggctgcaagcacagactccctctgagtgtgaatgttatctctcaccagatgagggatgtgctcagcccagatcaaacacttgtttatctacagggtggtgagagccaaaactctgcttctgtttctccctggtggtttatttgcttacccttatcacctctgagcagtggtgttgtttgcatagagttctcggtttctggcatgttaaatttagaggtaccccaggcttctcggagggatcagagtgttgagcaactcctcagggaggtgcaggagaatatcactggatgaggggtcaggagatgagggcctgggtctgtcttcaaatgcagaaattgagtgcagaggtctcaaaggcctcttctggcactgacgttctgactggccatgaaagccttgggtgtcataaagaagaaaagttgaagacttaaaaggaggaagtgtgagtgtcttcagc

SEQ ID NO: 37363 - DNA, 2188 bp, Homo sapiens
tcctacagatcttgcaatgtctggttcctgcttatccctctagtttcttaaggagataaacttcttcccatcactgagcttctgcatgtgcagaagccctggaaaccttgtcctttactcctagtttgacctagttagcttctgcacataccaaaatctgttttcattcatcccaaatctgttttcactctcattgaaccgtaaccgtgttcctttgtgtgagacaactcatctcggtttgtatttatgtatcgttgctttgattattgaactgagtatctctcccactagaaaataaactccatgagatgggggacattaccattcacatccctgggaataccaggcactcagctgatgcctgtcgaatgtgttaggttgcctcttccaaccacactgcaggcatcctggtgcccgctttggctggactgcactgggggtggcaggacggttgggcgcggaggaactaccccgcggatgagaagaaaggttttaaataggaaacattcctcagtcggcggtcagcttctctggtctcgcgcggctcaagccatgctttgggggacgctgggcgaaggctctggcaaagaggaatgcagaccccaggatccgcactcgcccccaacggcagtccggatcctcgacccggcacccacctcccgaagcagcttcaggtccccgtgctggatctcgtacagctgaatgacgccggtgccccgtgcgaagttgcccatggtcacaaatttggcgctgcagggcacccacttacagtcaaacaccgtgtagttgaagcccttctggatatgggcgatgatctgaggcttctcgaaggccgacatggtgcagccaatttcagctacggcaaccgccacacccagagcccccaaaaacggcaacctggaaaccagactccaaacattggcaatttgtccctcccgctttccgtattctgccccagatgccctggcatgttggctgtagttatccccggataatgccagatgcgctcctgcgatcgcacagaatgttccttcacaacagcacgaatttgtttatcgcctttacccactgcctttcgcacacatacatactagagattacaaaatacttgggctgggagttgcgcggctggagtgagcccaagaccatcaggcatatcttaggacagcctaaccccgttttcccccccaccggccccaaatcctgcaggtccccggcctgtgacgttttaggaaaggggcggagctgcaggggtggttggctgaggctggcttctgcgtggtgcagctgcgcacgtgtttcagccggcagcgctttaagatttccggggatggaatccgaaatggaaacgcagagcgccagggcagaggagggctttacccaggtcacccgcaagggtggccgacgggcgaagaaacgacaggctgaacagctgtccgcagcaggagagggcggggatgcgggccgcatggacacagaggaggccaggccggcgaagaggcccgtcttcccacccctctgtggggacgggctcctggtatgtggctgggaccctaggacagcaacgaggcaagggccagacgcggatcaagccgatggcctctggagaatgttgaagctgcggtggggctgttctgccgtgatgctcagagagaagtgattctttgaagtgtaactagttcagttaaaggaggccctttgtggatcagatgtcattttaaactccatcaccgtccctccatagccttctgagttgtgtgttcttttatttacagagtgggaaagaagaaacaaggaaaattccagtcccagctaacagatacacaccattgaaagaaaactggatgaagatatttactcctattgtggaacatttgggacttcagatacgctttaacttgaaatcaaggaatgtagaaatcagggtaaggaaaatctcaatcatttcccaatacaccaggctttctctcctacagagatgaaaaggcatgaataggctttacttaatgggacttttctgttgtatggtttttgtccagtttaaaaatttaccatattgagtttgaacttcccaaatgccttaaaaatctgcattcgatacaaatattaattgaatttgtaaattagttctgagatcacaccaaaatactggctcttcttctgtgtatcttttataatgttctatgtc

SEQ ID NO: 37364 - DNA, 3231 bp, Homo sapiens
tcttcacttcaaaagactatgccaacaaaaagattatatgatgaatggctatgatcttcctaaattgttttgtgactttcaggtgccaaagttgcctctctgagctgcctcgcaagttggcaaggaaaaactttctctacacatcaaaatcggcaatcatttaagtctgctcttaatctgggttttaagtgcaccagtaagcacttactcatttgccctatattttaaataaaagctgacttacctgaatattctaatttcacgttcttcccttaaaatcgatttcaccaaatcgattttaagttgtaagcaacagcattcctcccttcagtaatccaccacgtacactgaagcacttaaattctacatacagggtgggataccatacagtggaaaagatgcgagaaattacccaccgtcaaccagtttaagtcttctgacaactgttcaaagacttttagagaaagcctaataactgaatcgcatgatggagtatctgatatacgcggaatagcactctgaactttctctactgtgtatacaactcttgattacaaagaggaaactaacgactagggcttccccgagcgagagaaccggtaaggtaacaggctaaaagggcgtcgttgatttcttggctgcagcgacagaggcgggagacacacccctagcgtcggtctgaaacactacagcagcgaattctacctagggattaatgtgagggtaaggaaagacaaattaaaatcgccatgattcaaaaacaaccactccaagagagagacacaagaaggtaccaaagaaaatgaaaaaacccttggtagtaacggaagcatgaaaaattaagcgcccccatttctcccaaaccaagttcgcgtatgttttcgtgaacaaacaccttggatctttccggttcgccagggcagcgagcaaagcagcagcgaacggaaaccccgcagggctgcgcaccgcagctaaaccgacgctcgcaggagaggggaagtgagtggcagggttccctgccaagactcactgctgggaaacaggcagtgagtggaagcagcagcagctctggagagtaagtgggtcttatgtaaagtgccatttgccacatattgttatttccaaaggatttcagaataccctcgaactcgaaaaacagagtgagtgtggaggggaggggggtgctccacgtggaggagggtcgcgagaaggagagtgcgccgggctgatggtcagcggtgcccgcgggggtcgatgccgggcgggaccggcggcgcgggggtggggcgacggcggggcggcggccgagcagcagaggggcgccccgcagaggccgggggcgggcgcgggggccccgccgccgtcctgtcagcagccgccccgccgccctctccggctcgcccgcaaccgccgcgggacccgccgggcccgggtctctggaattttccacgggggacagccgaccgggggcgtcggggctcgcccccgcacccgacccggacggcggcagtagggggagggatggtgcatcgaggaagccaaggtctcaccattttgctcggcgggtcggcggctcgctggctcgctggctcggagaagtgttgcgctcaggctggctcgcaggaaacggcggcggcggcccagctgcggccctcgggtcgccggcggggagggggcgcgcgtgggggaggggaggcggcgccgcggggcccgcgccggccgggcgattgggcacgcgagggagcgggcagggtagggggaaataaattaaggtcgagattcagagccggagagcgcgggaggagcagcggcgagaggcaggagaggcagagaagaagaaaggagggggagagggggcgaagacggccgggaaactcgggggctgcagcctcgcgctcgcgccggagccgtgacggactcactgcagcggctcgcgctgacccgcaacctcaaggcacgaaaaaaggggagggcggagagggaggggaaagcggagtgctgcagcgcgcggggcgggggcggggcttccgcgagcgccgcacatccgggaacctgcgcgccccgctgggcggcgagtgccgcggcgctctggcgagctctggttggggaacgctgagcgcgcggaccacgttcgcccctcagccggccgccccttgcgtgcagggtggggggaggccaggggcgggggcgcggacgtcggtgacgtcgcgtggcggagcccttccggtcatgtggctggaggcgggcggggaagaaggcaaggctgggaggggaaggaggaaatgcgagggttccccggcgggaggaagcgcgaggggtgcgcgagtgctagcgaaagggggacaggggccctggagtggaagccttgcgggagaggaggagcagaggagcagtcttagggtgtcagaaccacccggatgccgcaccaaaaaacaggaaaaatccaagtcctgcgagaggcagtcaaaggtatctgtgcatccgtgtaccgacttggatccactacagaattgcacggcccatcaggactgctgtcaccccggtgcagcacccgcaggcccatctgtaatatgaattggcagagtcaggaaccaggttgcaaagacagagaagcgagccaaagctggccgcagcccgaggcgtggggagaacctgggcaaacgaggagaagggatacttcccactcgcagaaagactttccacccagctctgcattcccataaaccgtccagactcccctttggcggagtccatcagtttttgtttaaaaaaagaaaaaaactcgaatgtagattgcccgcttatccttttagtagagctatatccactcctgtggcaattatcttcccagaaaattcagattacaataggaaattacatccagaaaagcataaggaggaaatttatgttcgagagaagaaataaagctgtcaggagaggtgtgatgaggataacgaagaaaacattttgcaactattttaaccagttattcctttacaagccttgataatcgcccgcactcgtgtgtgtttgagagtgtgtgtgtgtgtgtgtgtgtgtgtgagagagagagagaggatgttttctgagtgatcggaaactccttattgataaagcctttgagtcattttataaaaagccattgtgttgtttttttttaaaaaagtcttaatgatccttacatgagaactttattctttttatgtgctaattatttttccatatgatgag

SEQ ID NO: 37365 - DNA, 2371 bp, Homo sapiens
ttaaaaaaccttgcacacttgttttagaagtagaaactaagaacatgtataaaaaagagactaacgttcagtcccattcttagggtctgttatgatactagaaggagcagaataatggctgtgggtgtctcccagaggtctcatctcttccagggagttatcactgagaggcagtttaatagcagagcagctccttcctggttaggtgaccttcagccagttacttaacacagccttcattttttatcagtaaaatgggcatgtgaataatagtacatagggttaatataaggattacattacattcaatccttatgaaaatttacatattcaaaatcctatgagaaaatttacatatttcaattatgtaaataccttagggcagttcctggttcataatgaaagctcaaaaaatgttaaaattgcatattaggactgtaccagggtgagaaatcactaagttaagcaaacttttaacacagtgtaaggattgctcccgcttggaggtctttgggccgcttcaggtatagactattgtcttcagggtctcaccattcacgacagttcgggaggagaaccctggaggactgaggaaacaagatgcacccctcatctgaagttgctcatcaggaaaggaagctgaggcctaggcaaagggtgacaagatgtggagactgtgatttgagatgagaagcaacagagttaaagccggggtactggaatggaatgcagggttctccgaggggcgtctcatacattttacttggtgttataccttttctctctgttacataagttcacagcaccaatatgattgctgttgcaataacacagctgcaaataaaaaccataaaaacccagaaaaaacatctgagcttcccccaactgtccttgaataggggttaaccaatttggaaatccccgcttctggttgcagcatatccgcaagtttaaataaacattgatgaaacactatgttaagagttcagcataaccatgagtaaggttatataaaatgtttaataggtcacgtggcacctgtagggtagaaattgtacattatttctaatgcatttagtaactaagtcctttttgaaagttcttgtaactacaggctctgcttgaacaatagcaatactatatctatgtgtgagagaataataacattccctggtctggtcttgtttctttaatatcatctgccttccctggcagatgtttcctagaatttaataagaaaacaaccgtttacagaatatgtagtctaggtcaggaactcggttaagtacttttcaagaattgttttatttcaccctcaccctatccctttgagatagttccttttgttatcaccattttacagatgatgacactgaggctcaaaaaggtgaagtaaattggccagggtgacacaactaggtaggatagcagagatgggattcaaacccagagtttgcacttttaatcagtgctgttttctgtccttcctactcatactcttcccaggagtatcattctaacctattgctgcatttagcatgcacggtaccaggaattctccagccttctgggttgccctttgctttggcatccaaataaagtaactccagtcttgtacaactttctgtgggaaagctgatgacctcaccaattttcccccaaattctcgagagtagaggagagaacttatattattttatctgttctcattctaaattcttcctcttgtattagttctcatcacctacccgatgacataaagcagttactgtaattctctgcatacagcctcaccctgcacttgcacatagctcttcttccgttcttctaaacatcactcctccaaaggtatgaagtggtcagctggtttctctggaaagcagctgagacagaagtaagtggaggaggtttgatgagaaggggaaggagtaatcccatgagagataaaaaaggaaggaagcagaatttgggcaggaaaatccttcggactgcaatgcaaatctgacaccagggttggccttgaaagcaaagggcagtctttcctacagacagaatttgagtgggacacctggtgataatatgtgtatggactcatacacagtgatgaatggcctgtgcagttgttcaggggcctttaaggaaaaaactgtaagttcagagacaggaagtctagttaacttttaaaacgaattctatgctaaattccagggatatccaatcttttggcttccctgggccataatggaagatcaagaattgtcctggaccacacataaaatacaagaacactaacaatagctgatgagctaaaaaaaaatcacaaaaaactctcagtgttctaagaaagcttatgaatttgtgttgggtcaca

SEQ ID NO: 37366 - DNA, 1119 bp, Homo sapiens
ttagagagaatgttctaatcattctctctctataaaggtgttttctcagggcccactgtatggttagaaattggaaaagaccttccagtttccttcacagatgattctcctcacattctctccatttgcttttttaatatattttttgagacagggtcttacaatgttacccagtctggaattcagtggcgtgatcaagtctcactgcagcctcaaccttctgggttcaaacaattctctcatctcagcctcccaaatatctggaattacaggcctctcgatatattgtccaggctggtcttgaactcctgggctcaagtgattctcccatttcgtcctcccaaagtcttgagattacaggtgtgagccactgtgcctggccttcattcaaatttgcctgtgtatttttttattcttgacaaatgagtcagcaaagttgcaaatgtccccttatttgacttggttcagtgtttcaatgtcattccaaaacaaagatgccagggatgctgttccaaagtctgtggtctctatgtgtatggaagcactagtgagggcacgctatttctctttctactcaatccacacactgggatgatggctacaaatgctcattgtgttacgggatccttgtggtgtcgcttcgcctgctggaaacctctgtggccagtggtgcctttgcccaagttttgttctggcctgctgggcttgttccacccagttggcccagcaggctgcactcagctcatgctactggcctggatcccatgcctgccaagggcaagccaggcgtggagtaatgaagggtatgtgagtgagcgtggggtctagccaccgcacatagctgggcatgccagctgctgctgtggggcaagcaactccaggtgctggtgtgggtgctggctccctgcaaggctgcatctggactaggtgcaccacaagcagcttccatagctggcactggcaaatgctctggggcctggaagcttgcagactccagaagctgcagggctccaaagagggagtcacagccctggctcagggaacacccaggcctgggatccccaaagggccgcagctcttctctccctctttttgcctgcaatgtggcgagcaggggca

SEQ ID NO: 37367 - DNA, 1655 bp, Homo sapiens
cattttaaaaactatcagctctcgtaaggcctgttcactattatgagaacagcatgggaaagacctgcccccataattcaatcatctgtcactgtgtccctccgacaacatgtgggaattatgggagctacaagatgagattcaggtggggatacagagccaaaccagatcagcgcgtgacctctcatgtatctgtttaatgccaacagcaagcctgctggtcaacagcaagcagagctcatatctgctatgtcaacagcaattccaaggaagggaattcctccaaaggttgttggcaggatagcttctgtatagtaagcactcaactattattgttatctatggacattaatcttgagtgttgacttttgaatcaaaaatacattgtactttgggcagggtcaggaaagtagaatccaaaagtaagtcatattgagataaaattatacaccatacttgggtacattttactttccattttgaggtgtggatactgtgtgtgtgtgtgtgtgtgtgtgtgtgtgtgtgtgtgtgtgtactaaagcacataatccaggagatgaatttcaaaatttccatgtgataggtttatttttaaatgaaatgaaattttggatgtgaattttggttactttgctcaactccccaaggcctctggctcattctttctgcctatgcgagttttcagagggaaagaataaaaacataatcttagaaatgttctcatccccaggtgaactccttttacagtcttttcacacaagagactagaatttattcacaatgttagtaaaagggtgagaaatttctttacacttaacccaacctcagagctcatatctgctatgtcaacagaatatactcacacctacagcttggtttcacagagctacagagtcagtggaaatgccaggctgaagttttggagaacaaatccgtatgaaataatatccctgtggcaaaatacagaataatgacttgggcctttgtggataaaatacgcaaaagctgaatttaagtgttcttaattggatctttgaaggttcagatagaaacctagggggtggcctgttggccaggccaggtctgaagggtggagtgggaagagaagtctcttcattggagtattatgttccctgatatcttatatttctagcagaagaggctttttgtcattttggggctatactctatgttctctctggggaaacaccctactccattttcagtccaaccctcccacctggtttgggcaggactagtttcagttctgtcatttgcaactaaaagggtacagacaaattctgacttttgaggttttgcaatcagccaacagggctgcaatggggaactagctgctcccactcaagcgctttgactgggctttaatagaagtattgcgccctctgctggcagaggattagcattgaccagatctcaaggacgatgtgacagaaagcattttagagccagtcctggagtcaaggtctttctcctccatatgcaagctgttttgctttgcttaagtaatgttacttctataagtctgcatttttgtatcttaaaaatattaatgtcagaaactacctttcaagactctttgatgagtacataaatggccatgtgaaaagtacttaatcgttgaaagatactat

SEQ ID NO: 37368 - DNA, 1506 bp, Homo sapiens
taaaagctcgtccccctttcaactatcattcggagggatagatcggcggcagcgcagtcggaggggcggggagccccactccgtccaaatcccgcgggtcagggctaatcaccccacgtcccgtctgagccaccctccttgtgtcccgcgcgggttgcagctgctggaacccaagaacacagggcactgacaagtgacaacaaccgtcagcgttgactgtcactgcggctccaggccgcggagggaaggctgagcttgcgtccaggccgcgtccccgggagcgtagacacctaagccaacgggaacggaagacccttctacctactaggccgcggtagcttctcctcccgcgatttaaatccaccggaattcgaatccttccccatagctcttcgcatcccgcccacctgagtcccgccctgctcagaactcgcgcaggcgccgagaggggcgcgcagtgcctttggggattggtagttttttccagggcgtctccgctcgggaaaggaagtgaagaaagccaccaggactacaaggcccggcgtcctccaagatgggagggaggtgaaaagggtgttggggaataagccggggtttttaaacagtagttttgaggcggcgagactggggaatccccggttgcgtcattagtaggcgtggaggggcgggactcgtgaagctgcgctggggccgggctctgagaggaccggcgcagccgcggggagcctttgaggccctccctcggtgttttttcccagggcgtgggcttgccccgcgcgtgtctgtggagggcggaaacagcggaggggccagtctcctggcgaaggggcctaatccttgcccgccatgtccgggggcttcgagctgcagccgcgggacggcggtccccgggtggccctggcgcccggggagacggtgatcggccgcgggccgctgctgggagtaagtgtgggcgggggcttagcggaccccgagagccgtggagttccgcgccggctcctgaagaccggccctagtcctggccggtttccccaccgcactggtccgccggtccggattttagaagtttggggccgcacgtttttcagttacctttaagccaattcacaaacatttctttatgttgcttttaaaacactgactgtattaccattattatcttatccagggattggcaaactagtgcctgggggccaaatccagcctatgtttgtatggccccatgaactaagaatgattcttaaattctgaaatgtaaaatgtaaacaaaaaatctactaatttttcagggggaatagttgctccaagggttgagggtattgcggcttgtcttgtaaagcctaaaatatttacagtagtgtctggtcctttacagaaaagtttgccaaactgtgatattacgtcttctaggctaatttcttttaacctttggtctcctttgcagagctgtgtggaccttatttatttatattatttattatttccagtaaaatgagtagctaaccc

SEQ ID NO: 37369 - DNA, 1577 bp, Homo sapiens
tcttaaggaaactttgatgtataaaaatcatagaatatttaaattttataacatgctttaaattctattttggaaaaaccagagaaaacagacaagcagaaagaacaatataaaaatcactcataaccactcatagccaccaccaccttcagaccattattagtaacttcctttttgagtatcctattcctgtttcgcaactggtaaattaaagattcaagagtttatgtgaattcaccaaagttacagaggaaaaattagttgcagtggttgttctagaggcaatggcagatgtttgaggcctcttcctcattcactctgtatcaatccaagtactcccttccttcccatctaccaatcttggtttctacccacacacccctataatttttgaagccactgctagttggtagtggcggattcaggggatagaaccagttcttctgtctggaccagtcactctcatgcctaaacttataagcaaaatgaattgccattggtatctcatgtttcgatcttgcttcagggcactactttagaatatggacagttaatgcaaattaatacagttatcagccctactgaaatccatcgaatcttagtaaactaaggtcttgtttgctagatttgctatttaaaaaagaaaaaagatacagtaagggaataaaatagatgccaacttggcattattctttcagtgataaataaaatattctgacagaggagttcctgattaaagatgcaaggaccctgtcatgctaactgcagctgatttcctgccttgaaatgtcttcctgcttgtgtcactgccagtgactgacagctggcttaataattaaattcaagcaatgtttgcttttcttgacctttactgggaaacaaattttcaagctctggacatgagtagagtgttttaatttggggagaataatgtgtttgcatcatttccagcaacctgtgtctgtgattacctgtgttattttacattccacttcacagcggacttctagagggtggctggtagttgaagtcactcggtaattaatatccagctttggctccctgcacatgtttcacccaaaagagggcatttttgtttctggtagacttaataagggctctggcagcccactgttctcaagtgtatccaaagccaatttattttgaacatctaggtttttcatagtctgttaaggtctttagtcattcttgcttataagaacaaatcgttttctccagttgtaaccttgatttacttgcctttctttacttacatgctttttgttttgttttctttttgtttttgtatatgctctccatcgccctctaccggggcagacagggtggtgtagcagcaaagagctcccagacctgggtgagcttcagatttttatctggaaaatggggataacacacccatcttgtagaagtgttgaaaggatgaggagaaaatatgtatgtaatgtgtccatcaagtgcttagcacatggtgtggtggcactagatacatgtaactgcagctgttattttctttttctctttttttccaagttatcagcatttatttatttttattt

SEQ ID NO: 37370 - DNA, 478 bp, Homo sapiens
gaccatgtgtggcattcctagtgcatagacagctgcaaaggatgtaaactataaacattttgttgttgttgttgttttgaccaacttcctaaaactctgctcaaaggcctgtcccctcagaaaagcacgaagccggagattcccaggctgcccaaggccgctgagagggggaggccagagaacacagtggcacagcaactgctggctggattccacgggctctgggccagaagatgcgtgtacacgaacgccctgtaaacttccacattccaccacttcctttccagatagcagcagtggtcaggtcacgtgcttgccggagagcagagaaaacacttggaggctgcttctgcaattaaaatgggctgcatttacaagaattacacaaaacctttcatcctgccagagaatgatgggagggaggccctgagggtggagctccagctgccactcagaagctcagggtggcatctggcca

SEQ ID NO: 37371 - DNA, 2470 bp, Homo sapiens
cttaagttctgagttttctaatccaataatataatttcataatactaactttgataatacaactgtatagaatgactcagcatcaattattgaatcagaatttgagtaagctgcaaaatttatctaagtttcctcacacttaaattaataaccataataatgataattcaatgagataagataagaggctagcatggggttagattcataggaaacggtcaataaattgtgactcatgattatttggtttgaaaggaggcacagaaacaatagctatgtggccttcaataaactatataacctctctgattctcttttttaatgcacaactcatatttaatattctatccaaggtcattctcctctcctgctggaggctaacttgatcaccttaatagcttggggttgagggtgcgacagaatggtctatctcatcatcgccttcccctctgttgtcctgggttagctgctcataaggagggcagtgttagacatgagggaggcaggtgactcagatgcatgccttcaatgaatggagctaggcaacaaggtatggaccagacactgaatcaagccagacagagtcaaagggagtatttgagatgaaaggtgtcaagtacgtgttgtgcagggcctcggagtgattcctacattaagaaagtagctgtggaaactttacccatcccaattccagctcctgaaggtggggctggcaggggacttagagaagcagccatgggtagataccatgggtggctgctgaggggaggcacagagctttccccagcggaagtaggctttgataaactctggagtgcttctaaggagctggtaattttatctctggaggtccaggacctcttcagtcatacacctgagtccgttttggatcattgaggtggttttctgagggatggtgtggagagtcggatggggtgacctctgagcttcagtgcatcacaagcagcggccttctaacctcagatctgaggtcttcttcttcaaggcacaatttatgcagagctgcttcctgaagggtggaaataaacatccctccagcgaccccacgccaccatactggtacaggtgaatccaggttctgtgtgtttaaaaggaaaagaattcacaaaagacaaaagagcgtgtacaagtatgtggaatgggtgaaggaagcttctcccctgctcatctgtgagcctgtgtgtgtgtatatgcaaacctctgatctgtgtgcagccacttctccctcccctccgcaggtgtccctgagtcacagcccttccttctcaaagaattgccccaatttgccttataaggcaacactgaggcttctaatttctcttcaagctaacggaagtaaaatagcaggtgccaagaggcgtggcccagggtcacattgccagagtgactcagcaagaatcattttggaaagcaagccccagtgtggctgctcattcttcagcagcctttccttgatagataccggaggtttgccctgtgctgcctgctgctccctggagctgcctggcaattgtccccaacttgcttgcctgctctgcccatgccctggagtcaacagacaataataccctgccccttggagaaccttcaggaggctccttgtgggtgtcccagtaggagccaggagaggtgtggtgggcatgcccttgacatctcatccatcaacccaccaaactattcccagaaggcccagcctgcttcggaagacccatcagctagctcaaccccaggcacctcattctggaaacaataaccttgtttgcctccatttccccacctctgactaatgaaaattattaccccagcgaaggggatggactggaggggaaaactggggtcctggataccagtcagaagtgagatggagatgatattgggaggagaggaaagatagatgtgagatacaccatgaaggacaatgacaaggcttgatgactaactacacagagatgacaggcacatggaggctgaggccaggattctgaacatggggataatggtcctgcacccattttccagccattgctttggatttcatttccacttgttttttattccttttggatagcgtagaaaagagtaaccttgatacaagaggacatgggctctgtgtcctccttgtagagaagtcgtcccacttccaagggcttcactttgtcatctataaaatggggagagaggccaggtgcggtggctcatgcctgtaatcccaacactttgggaggccgagatgggtggatcacctgaggtcaggatttttgagaccagcctggccaacatggtgaaaccctgtctctatttaaaaatacaaaaattagccgggcatggttgtgagcccctgtaatcccagctacttgggaggctgagtggggagaattgcttgaacccagaaggcagaggttgcagtgagctaagatttcaccactgcactccagcctgggtgacagag

SEQ ID NO: 37372 - DNA, 1062 bp, Homo sapiens
gaataagttttaaataacttattccttcattaggaaaatgcaaatcaaaaccacaatggggtaccatcttacccccactgggatggatataatgaaaaaagtaagtgttgatgaggatggcttgatgggtcctcaaaaagctaaacataaaattaccataggacccagaaattccactctcctgggtgtgtgtatacccaaaagaattgaaagcaagaacccaaacacatacatgtacacacatgtccatagcagcactattcacaatagccaaaaagtagaagcaacccaaatgttcatcaacagatcgatgggtaaacaaactatgactcatgcatacaaagcaatagtgttcagcgataaaatggaatgaagtactgatattgtcatgtgaatgaaccttgaaaacacactatgttaagtaaaaaattccagacacaaaaggatatatattgtatgatttcacttgtataaaatatacagaataggtaaatccatgcagacagaaagcagattggtgcatgccaaagtctgagggaagggagaatgaaagtaactcctcaatggttatcaagtttcctttcagggtgatgaaaatgttccagagctagacagacatgatggttgcacaactttttggctgtgctaaacgccaatgaattgtcacttcaaaatagttaatttcattttatatgaatttaacctcaatttttaaaaaattacctctcttatggcataataaattatccaaaacatgaacacaattaacatgtattacattacacagtttgagagtcaggaatccaggaaggcttagctgggtggttctcactagagtagctcattgggttttagtcaagatgttgcccagggctgcagtcctctgaaggcttgactggggctggcagatctgcttccaagatggctcctcacattgctcttatcagaaggcctcagtttcttgctacatagacctctccatgagcctacttgagcatcttaaaacatggcaactggttcctccagagtgaatgatccatgagtgtacaaggcagaagtcat

SEQ ID NO: 37373 - DNA, 1232 bp, Homo sapiens
aggaactgtgatgattccaacttctttaataacttctttaataattcaataactattgagtttgtggtctgtgcatggtgtttttgaagtactgagagcaatagagatatgagtatgatattatctgagccctgggtgacctatagccccctaaatgcaactgcttgatgttcctgtggccaatttttattaggcactgtaaggactgagctgtctgtctttcctccttgggtcattccagtgcccaggcttgcccatacagagcacatgttctcagaagaagtgtctgtttggttctggccttctggaatttgatccaggtagctgggccaccgctagtcagagcttgaggaaaaaaaaaaaagataatgtatgaaaaggcctaaattcatgcttgacttattatataaaggcaatattttcctatgtctcaggacttccagggctagtcaaaatattctttatggaaaaacgtgccctgaaatgaaaggtcagaggagagaaacaagccatgtagcaggagcaaaatatcaggacatcaggaaagtccaccagggtggatgtttgaagaagtgaaatgaggtcagcttggtgggtagacagagggcagcgcagggacaaccacatgatttttggtttggatgaagagcgggaccagattgcttttcaatcagtctaattgtgtagttcagcctgtctcttttggtttcatgaggtttgtctcaatcactcacactgttagtaaaaacacttttagggaattgagaagtagaaacagtgagctcattgatttttatatcagaaccattttgtgagatcaatgtttgcaatgttcaccttagttgctaaggtcatgggcataccagcccacaaagatttgctcatatgccatgtttatcttggaaccaatgtttaccttggtatcagggtaaagagaaatactcagatgtagttaaagaaaagcaataactgtgattacataaacttgcgttttttcctccctgaatggtatccggatcataggaaactacccagaacgccttatcatggcaatagttgaaaggcataggactatataaaacagatttagaaaataaatgggacatagaaaattcttctatgcatgctgttgtgtggggtatgagacaccatgaaacaccttgtaagtatattttctaatttcaaatgtaggtgattatgttctcagagccaaaatagccagggagaagttc

SEQ ID NO: 37374 - DNA, 721 bp, Homo sapiens
cttgggagcttacaggacccagagagaaaatggtgccagggaatgcccacaagtccacatctgaagcagcgagacccgctgggccatccgagggctagctctggctgagaattaaggaagtatcaataagctggtcactggactcagttgtggaatgggagtgtgaaggtgggtggtgtggtctaggggcccacatggaagacctggaggggtactgggatccaggagactgagacaacatggagctggggagagaaccaaggaaacaacccagagagaacagtgaagccagacagtattctccttctggaatcttctccaactgtagatgagaagcagtctacctccccccgccccaccccactgaaagcctggttccctgtaaccctcaaagccctggaattggtaccataataaaaccaaaaggagagctggccctgcagaaagtattaatagttcatccctggatttgaggagcctgcccaggcaggaaacaggctgggaaattcccttcattctgcccaggagatggctaattgcagaaaaatcctgccaaaggcagagtctgcaagcctttctccagaactgggacaccactgcttcccttcccaccacagcctgccccagcctgcaccccgggtggtgctatctacaaggtgcaggtagggaagccagcagggaagaaattagccttctcctttttaaaaatcattttaaaagt

SEQ ID NO: 37375 - DNA, 827 bp, Homo sapiens
aggaaaagtcagctgagtcttacataaacatgtgtgccagaaggaggctttagaatctgaaatgaaaaagaaatatctcagcctaagttatcccccctcacccacatttctgcatttttccaagaaagcagcagtggaggaattgcctgcagagtagagataaatcacataattaggtggattctcattgtgcttggattctggagtcctaccagagtgaaatacaaaggtcaagcaaaaatatctgaagctgcacctagccatctaccaattcaaatactgagaagatcacaaaggcagggcagggcaaaagtccaggagttggcctaataacagggaacatgaatctaacaaaaggtgcagcccagcccaagctcaccctgactcaaggaggaatctaatgatcagcccctcgccctagctcacaaagaataaaagccttatgctctgcagtgagtaaacaacacaaatcaatattataccgaagtctccactgctttttttatactcagtgactgaaatgtaaactgttatgaaaaatgggaagaagcagaggaatattactcacaataaagaaaaacatagttaatagaaacaaaccacagatgactcagttatttgaattaatggacagggacttttaagcaactattataaataggttaaataatttacaggaaaaggtgaatacaatgggggggaagatatgggtgatcagaaattaaaaaaagaaaactcaaagaaagaaccaagtgaaaactgtggaactgaaagatacattatttgaaataaaaaatttatcagataggtttaaaaccagattgaac

SEQ ID NO: 37376 - DNA, 904 bp, Homo sapiens
cagcccacaacccctgacggaatattaaagggactcttatttaccaccggccacccccaccactcggggggattgggggtcgtagctgttcactggtagctctgccccactctgttctgctcatcttctcattccccacaagcccctgatttctcattcacagcaattgggctcatccagccccatcctccaataaccatagaggacagcaaggtttttgttttgttttgtttactaaaggaaagccagctcacactgaggatttctatactggtgttttctccctccctgctaccatccttgaagggcagtgtaggaggaagatctcaagagcctttatgatttaatgagatgtaaaaatccaccctccagtgctgccgagtttcttagtggccttgctgaggggctgggattctactccgtccatttttggccaaatggaaagacacatcaaagattcccttctcttcctggggattgcaaaacccttctgtctccagaatgtgtaaacagacccatgctaactgcaggggaaactctgactctcccgtccgtcagcccctgggcctttgtgctgcctggtgctgttgtctgagcttggcaggccagctccggtcaggggattaagcgacgggctcggtggcgcggcagcgtgtggagattgcccaagccctaggcatttcctgttgcgagaaggccaggccctgcccttgagcacgagggcggcgcctccttccccaggccagggacaagagggaggagccagggactagagggaggggccagcggcaagagggaggggccaggggcaagagggaggggccagggactagagggagaactgcccccgtgtgcaagtggaacctggaaagcggggaaaccggcttcatgcatcttactatat

SEQ ID NO: 37377 - DNA, 648 bp, Homo sapiens
caccccaggtctgctgtggagctgctcaccacttccagctatgtttttccattccctcttcagtcccagcaattggactaatttggtttcccttcatcctgcatttctgtgtgtttggagtaggagggttccacattagtctgctcctctccagccccattttcctcctcagaggccctcaaaaccaaccaggccttaaaacctctgatagaagccagaatcagatgcctgtggggtctagggtaaaccctgcctgcagaaagtatctccagaatttggctgaaatctttctgggaagaagagactgagcttgtttgattattaactggacaatttctgcttaacaactacctttctgttcttgtgctggaacagaaccagaatgcttcttccctgccaatttcaggggatgagatcatctttgcaaggcccttggagagacattaagtcagggatcttttcaaaagaaatgcatgtggcatgtgagatttgaaagaactatgggtgctttccttgaaaaacaaacccaatggggttttgttgttgttgttgttttgggtaggaagcttcccagttttttgtttctgcttttaaataaaagtagcaataagccagggagattggccctttgtggagggaacacatatc

SEQ ID NO: 37378 - DNA, 1882 bp, Homo sapiens
gattctcaaagtctctttcactaacacttaggtcataataaacgactctcaaaacatggaataaaagggcctaaccttaattttttaaggctctaggaaagatatttgctcaactttccatagctagtatttttaatggatgcacatgcaagggataaatgatatttttcatagttggtattctaaaggggtatacatccaaggtataactgatatttttcagagctggcatttttaatgggtgcacacgcaaatgataaattatgtataacctatcgccacagacatttgaaggcctcttccaccagaggatcaggtctaagcccatgaaccaagttattgattagcaatggtttctgttgagacaagggatggcaggaagtatcacgtttaatggcactaccgtggctctagctagggtctgttttctattgggcctccccagaaacaagtaaaatatttttttaaagatttttagaaaaatgcaaggtaagttcaagagacctcgcccgaggttccacaggtttcctcactcacctggtgggcccttttgaaggcaaccccctccacacctcaattccctcagctctctcctcctttttcaataaaggcgtttctctcccctttcggttccttctccgcgccaaggcgcccgctagcccccggcaaagggggcccgccttcctctcaggtgcctttctcccggccgccaccccctctcccgcccgtggatgccggcccccgcccccgcagccaccactgggcgccccttgcccatcacccagacttcgcaccctccacactcccgcttccgcccgtcgccttgggccttagcggcacccgcaccgcaccccagcgccacccggcaacacgccccccgctcccggcccccttaccacacatgatgccggagacacggcccgcgaggccaggggcgagtggctggcgggatcgggggtgcacacacgagcttcggtgggcaatctgcgggctcgggggccggggtggcgccgacacgactccctcggggatgcgacggccaaggcaacgacagccttctccgcctcccgggctccgccagcaaccgccgccgggccccgcccctcggcgcgcagcgcgccgccgcccgtaggctccattgaaccgctcacgcgccgctcacgcgcaagtcccgcctcccagcgctgccccgccccccgagcccacgcaggcgctggactgctggcggcggcgacgtggcagtggctcgtggccgcgtccgcctggagttcctggagacgcccgccccggggcgagccgcgggagggaccgagccgagagggagggagaaactcagcacctggcagggaatgacggaaagagaaggatggaattgttagcaaagcaatagcccgggtgcgtgccccgtgcagccccaggccccaggcgccagcactgcacgaagcgaggaaagaggaggaaaaaagcaggaagtatgaaaagggaatcctggggaacataaggctgaaaaaaattgcaaagaattaggttgaggtgggaggagagagataacaaaattcttgactgtaaagccccaaaggtcagcctctctggtaataagcaattcaattccttgtgtaatatgcttggcccctaaaagccctccgcatccgttgcctccataaccctcagtttattgtggaggggtagaggaggaatgtaaggctcaactatccgactatgagcctggacgtaagaaactgctggcccacctcctcccatgacccacctgagacggctaggaattccctagctttaacagccgcgcgtttgacttacgaacgattcattctatgaattaatgcgccatgtctgacaagagagacttgattagagagggatg

SEQ ID NO: 37379 - DNA, 2056 bp, Homo sapiens
gcagctgctaccattatttaattggtgcccaataattactaattgagtgcagttcaaggtttggggtaaaaatgcctttttctatagctcagtatctaaatctgtgaatactctggaatttggaaatgcactagaagaataatattctcgtcccttcagcccagggaaaaggcagcagaatgaataaagaggaagcacattccaacatacaggtttaaagtcttgtttttttaaagtaagagtggattacattattcaaggaagacatctactcaaacacaggaggtaactaacaaaaaattctaccaacttaaatctttttaggatatacatttaaacttcaagagcaccattaacactacaatgtctaatactctagagggcaaactctccgtaggccattttctccagacgtaaaattaaggtacacctacataaatgtcctcttagcaatgttcacagaagtctttgaaaggtgaaactcaaaggtagggctcagggaggcggaaaaaacaagggaacagagtgggcttaatggtggtgggtgcagggaatctaggggtcctggttctcgtcggaattccatcacttagaaactgtgtaaccttggacatgtcacctcctctttcagggccttactgggaaaatgaggaaacgagacaaggtattttcttcccttctgtgtgacattctgattctgcgtttagaagaggagggaatgcacccggtagagggcctgggggcgggagaggcacacgattttaaaacagctcctccgttctggctctacagccagtctctacaagcttccgtaccgcagagactcaagaactgggtctctgagcctgagaggaagctccagagagtccgcccggattaggccacagaagcgccgagctcccgcacagacagcctcagggctcacccccaactacggcgacagggcggacccgccggctccatcagatgcactacccacccgcctcgagagagggtctgcaaggcggcgaccgctccgctggctaagcccagcggcacacctattcggagctccaggctcgtcacctaccgcctgcgcagcccggcggcaacagccgcagctccccagccccgcctggccgtcgccgccatcttagtccggagtgcctaagggtctccctgacagaaccacgaaagatctgcgcagccgcaggctggccggtagctgggcgggcactgggaagagcccaccctaccggctgcgggcggtcctgctgcggataagtgcggtggcctacgcgccgaggtttgcaggctactgcgtcaccctgaccaagagaggccggggaacctttcccgtttgcgccaacgcttggttaattcacgcagcactgtgaacgcatgcgtgtttccgtactttgttttccctgttggctaggtttttagctggtgctggtgctgccttgcgaatgctgtttccagcccctaaacctgacccattccctcctctaggaccctactcagcctccaggcccagctcagtgactgcccccaaagactccctggagcattccttctaaaaggttctcgcatttctcctgcccttttcccatgggtctgatgtggaactgtgtctaacccttcctcatagctgtgcttgtcagctgccacttggtcatcttggaccaacccgcacagaggatgtatctggtacagtgctgcccttctccgattaacatgagacttgactagtttccagggcagagtgccaaagcccattacctattcttccagaaccttcctggagtattccgttttctctaggacaacggttctcaaagtgcggactaggggccaaaaaaaagcaggagaacacgttagaaatgcacgttagaacatgttagaaatcctgggccccactttatacttactgaggcacaatctctgtaggtggggactagaaatctttgttacttgctttttttttttttctttttccagagacagggtctatctctgttgcccaggctggagagcaggagtgcgatcatagctcaccaaaaccaactcctgggct

SEQ ID NO: 37380 - DNA, 444 bp, Homo sapiens
tgtttgcctgtttctcctccaatgtatagacacagtctgtcatttttgcagcttttaccatacaaatgtttaatatagccccgtgccatcctcccgaacccattatgacatttcctgcttagtttctcctttgatcaatcagaaggtttaaaatctgtaaacagtctgagttcagttagaaaatttatagaaaatgatgtcatcttgccctttgtacaaacgagagcaaatgagttcctgggatctagatgtaattttctttcatttgtaaagaatgaaggtgtcacagaaaagaaacatttacactgcaaacaagagagaggggaaaatatcaaatgttgatagaaaaagaccagataaactgaggaaactatgaagacactttttaatgtttgtaaaagcttagtgttgctggtttatgagattcctgagatgtggttataa

SEQ ID NO: 37381 - DNA, 1153 bp, Homo sapiens
tactaaaaatacaaaaattagccacgcgtggtggcgggcaccagtaatcccagctactcgggaggctgaggcatgagaatcgtttgaacccaggaagtgacagctgtagtgagctgagattgtgccactgcactacagcctgggcaagagagcaagacttcatctcaaaaaaaaacaaaaaacaaagttaatataaaggaagactctgagaacatgggaatattactttctaaaaggatcctctgtgtccctctgctctttcccttgtcctcacctctgagccctttcaggcatttaccatgccagggatgtgcgcctagagattgacaagcactccctcattcaacctcaccaccaccctaacagagcaggcactgttagctccactttacagatgatgaaactcaggctcggagaggctagtgatttgagaagaaagccaaggagcctggaaaggaggagctggggagaagacaccatcatagaggtcaagggagagacagtcacaaaggagccagaagccacagggggaataagacagggactggaaaatgttctctgcatttggcaatacggaggaagctgcctatgctcacctctcacagcacttgtaattccgtcagtatgagtcacacggtggtgcagagtcagagttcacaggatgaactctaaccccatttgacatggaaggggtgcagaacgggggctacagagaggcaaaaggtcacatggatcataagagcggtgcccaccagccacatttctcccctatttctatgcctctcacactcttctccaaggcaggcagcaaggccaggggtcaggtccttaagttttggtaccactgcctgttctgaaatacatgctaacaggatttaaacaaaaattttactcattgttaaaggcaactaggagtagtgtcaatacatattcagagcaatgcctgtggtcactctagcctggtctgcaactggccacacactggagctctgacccaccttctcatccccacacaccttgctgttcccttctgcagggagccctctggctctactctctacccagaatgttcttcatcctctctgtgaccacttacttcctatcaggccttcaaaatcccacttttccagaaaattccaatcatcactgcctg

SEQ ID NO: 37382 - DNA, 784 bp, Homo sapiens
aatacgtttgaaaatggcccatttgaaaatggactggcccacctgccgagtgtcaaatgagattgctaaattgcagagcaacgttttaattcagggcttcaaaaaagggagtaatttaaaaatgtacatttatgataacaggttgaaaattgacgcaaaacactttctttaggttaaaaatagatcttttttgggctgggcatggtggttcatgcctataatcccagcactttgggaggctgaagtgggaagatcacttgagcccaggaatttgagaccggcctgggcaacacagcgagacccagtctctacaaaataattttttaaaaacttagccaggcatggtggtgcgcatctgtggtcctagctactcaagaggctgtggtgggagaattgcttgagcccaggtggttgaagctgcagtgagccatgattgcgtcactgcattccagcctgggtgacagagtgccctgtctttaaaaaaaaaaaagtgcatttttgaagataaatcagtgtcgtgtgaaaaatatttttttaaagacaaattttggcttttgcattttgtaaaattcataagctacttattaagtacctaatttacaaaatatgtattacatcactgataaagtacttagtaaataaatagctaaatgctgatagagtctgattcagcaagcctgagtggggccctggatctattttttacaaaagcctcacagacaacacagatcatctgccagtttggggaaccactgtcccaggatcaggacatatttcagatctc

SEQ ID NO: 37383 - DNA, 802 bp, Homo sapiens
catctgagtgtatctgaaaccatctgtgggtgctaagctaattgcatcattttgttactcctcagttcttacatttgttttatacttgctaccacagctacatgattttttttttctttttttaatggaggtttttatgatgtctcctttaaacaggctggtcttattgagttcctctgcattatttatttttatccaatggcacatgtgatctgtggatcaaggtttactattgttaggactatcccagtacattatgtaggagaatattttataaagagctcaatctggatcctctacagaataaatgaaagaactgctaccaaaaaggcagcctctgattttcaaaagaacttccgttgctttttagatgccttttagaaaagaaggaatccaccttgagggatatatgaacaatatgctcacatggttcacatgaagtcagtcttctttcagagcctgatcacaaaggccattactagtgtcagctggggttaaagatcaaagttcaggtgagaaaccagagttttcactgaatcccttggtcagagatgtggccgactggagaggagttgcacagtccttagatcaggaaacaaggtggcactacgtggagatagttcaaagtcaggaaataaactgaacagagttccagccaagaagtggagcatatacaggacaaagttgaaaatataattattggactctgaagccgggtagcggtcaagcaacgaggcagagagtcaagacctagaaagatcagcaggaaaaggagtcctaggggctgtgaacagaatagatg

SEQ ID NO: 37384 - DNA, 3174 bp, Homo sapiens
tgctgcttttattaaaaataaaagcacactaggcaggcgaagggctgtgaaaagtatgagtctggcataattatgaaggtcgaggttaaggttaccaaaagagacatgcaaagatttcccgaaagcctgggggaatcaagatgtatatctacgtgagtatagacacacagatgaaacacagagggaatttatgcagcagatctaaataacatcctctctgatagcgaaaaaacaaaatcagagccactctcaagtaatttttcttttgattaaaaaaacaaaaaacaaaacctaaagcgagaaggaagaggggcctactagactgagttcaaaataaccacatttgttttatgtaatttctgttatctttgctataacctggggacctgattacagttgggtcaggaaacaaatctactagtgaaatccaccaagagccttggcccttggaaaaacacgttcacgttctccgaaaatcctctcttccttccaatgcctgctcatggaagtgggaaagttgggtaggagaaggagaaacccctctcttcttaaaagtccccccacccttcagccttcacatcaagattttaagttttaggaggatgacaagcccatcaccctgcctttggcataaagctttacactttcacacatacgttttcttgtgtgatcctcaaaatttggcttctcaatattaaaaaaataaaaataaaaggccactaacgtaaacaatttcggcaacctccccacacccccataagcccagtcactttcaaatctcaattttaaatctctcaaggacaatgactcacagggcaagtgaagggggaagggagggtcaactggtcaaagcccattcatacatgcaacaactagaaaccacagtattgccgcatcagcacaagattttaatttacggcgcattgagccccaccgtaccttccgccaacacctcgtccactgtgacctgctgtcgcccgatgccgaagactcttccgatgtagccactgcccaggcccgaggtgctgccccctcctccgctggagccggagcccaggccagagccgccctgctctcgccgggagtcgaaaaacttcttcatcttgcgaatagggagcagcaaagcaaaataccgatggtttctagattttttttttttttttttttttttaagaaaagagatccaaggatttcttctcagatttcacctcggagaggagccacccgaatccggccgtgggggtgggggctgagggaggatgcctataggaatatgcgtgtcaatcgcgcagcgggtcccctcctcctccagaaagcgattcgtgtaagtttaaacctgtgatgacagaggaagaaagagaggatgaatcagtaacacgcttaaaaattcaaccgctgagtcctagggggagcaaaagccatcatcctggggaaacgcttcatgtattttcccggcgagaaaaaccgtggggctgaaaacgcgaccccggccccagaacccgggacccccgagccgggagctcggagaaaggagggatccgagctgctccggcagcgccgaccctcccgggcactgcctcccgctcctcccgggtctccccgccgcccctcgaggcggcatcctggcagcacccacttgagacggctcggcggccggcgccctgctaccagccccgcgacattgtcacggccgccgggccggcctgcgacgcagagaagaggcggcgctgcagcgagagccggggccgcgctcggctcccgcccgcccgccagctgatcccgggagcgccgggcggagactgacccgccgcccctcccccgcgcgcgctcccgcccggctccatccacccaaccaggaagtgaaccgccgccggaagtgcccctcggggcggcgcggcgagggaccggggcctctcctgcaaccgccgttctgtcgccacggatgggaaggagtcgaccgcgagaagaggactgggggaagagggtctcagtgcagacagagttctggaaaagactgttgatatcacccgagccgcagggcaagctgggaaaggtagctcggcacagtccggctgctggactacaaatcccagcatactcctggaggagagggcgaggcggcagccgtgtggcctccacggcctcgaaggagatttgtggggtggcgcgtatgtggggactcggcaatttaaacacatcccgtgaagaaactgccaacaactaagttcccccccccccccccccgctgtatgttccacccttctggagccatcttatttgcggcctggcctcctggcacaagggattctggaggttgtggtttccgaacggatcgagactgacacctgaaggacgcggcttaaccgcttagcccctagcgggtcctgtgggtttcccgacgtctcctgggctgaaatggaagcgagaagtgatcgggaacattgtgctggcagttggatccggctgcaccgagcgccagccttgaaataagtaaaaccgatgcccttccgcccctaacctcaaaagctgcttttgcgtctcgatgttattgagagccggctctgcggtcagctctgagctaggcgctgtgagaacgctcagtaagacagtgtctcgtctggaaatgtacaggcgagattcaaaccgagaaactgccaaaggttgtgtgcagggcagatcctaggataccggagacccagcccgttggcttgacctcaaaactcgggggcttttcggcccatgctgtcccttaattcctcctcctttgctgacgctgtgggtgcgcatcaaagcctaaacttcactagctcccttgcacacaagaacactaaccctaacctgaccagttatttatttttcacttcaagattcttccattgatacttacgtttccctgataccgtccaagtgctgagggcggggatggactgtgtgatttgcatctgccaaatgcagaaaatttggaaggtcagttggtacacttttccgacctagatttcctgatggatgatgctgaagagtggcaagttgctgccaaaaacaaacaaaaaaacctaccatgatttattaatattatttttctaacccctgaatatgggttattgttcatctctgcccgctttccccactccctagtgcttgtctcagaatttttttttcagcgggtatttgagt

SEQ ID NO: 37385 - DNA, 913 bp, Homo sapiens
gtggccctagcccagtgccaaacaggactgtgggctgggagaatccccctgggattctgcctccctgcagactaaggcacctggggagatatgaggctggactgaatctgtcccattttgatgttccttaccctacacgaggctttggggtgaaggggatagggagagtgggtcccgtcacacattcccccagctggctgcccactgtgcttcttacctgcggccaccctgcgtgcctcggtgaacactgtctggtgcaaaggaggtatacgaaatgtgtttgttgaattgatccaagccattatcagcacttcagtgggctgggaggacatgaaaatagctgcatggtgaagtggtgtttgctggtgcctgtcctgtcccctgcctctgccagctctctcatgacattccttaggcaacctggcccgtttgcaggaagctgacagcaggtattcagaaattttaggatttgggcttaatttcagataagcaggacaacctgggctctcccacaatgaaaaatagattctgctgtttttttcctgcctttttaacatttcaagccaagttcctatgcccatccacccatataaaacttccttgttcagaaagtcatctgcgcaactggcaaaggcaccagctcagagttttctatttttattcctgtgtgtaatcaatgggaacacactgtgacggaaataaagaattatgaattgataagagcaaaccattgatatttgcttttgttcctgggcaagctagtgaaggaacatgtacctaatgtatagaaatacaatggtcattttatgcttctgtctttttacagaagcactcagcaatttctgtgtctatttttagggaggaaaaagaaacacttttaagattcaaattgggtaagcttgggaaaagtttc

SEQ ID NO: 37386 - DNA, 455 bp, Homo sapiens
atatgacttcaaaataaaatggcatgtgagtctcatgaccttatagtcatgttgacaatactctatcacatatgtatttacataaatatagattaaaattttattttaaaaggatctgtgtgcatttttattgtatgtacatgtcatctcaatgttaaaaccattcagaattttaaaagttacctctttcacactgtcaggcttctcaactaagatagagaaaagacttgtttagagcctaaagctgagcaaaagtgagatacctggaagagtgagtcataggggcagaaagcagaatgacagtttccaggggctgcggggagggaggaatgcagagttgttgtttaacaggagagttgtggggatagatgatgattcacagcaacgtgaacgtatctaatgccactgatctgtatgcttaaaaatggttaaaatgaatcccagcactttgggag

SEQ ID NO: 37387 - DNA, 952 bp, Homo sapiens
ctctgtctcaaaaaagaaaaaaaaaaagtacacattaaattccaggaacatatttaatgcagaaatccaggcacattcaagctatttccatatatagtactcacaccataaacagcatccattctcctcacgctgagaatcaaggcagatttgcagctgcattgcagacgagtataacctttgactttgtcctggggttcataccagtattcatttggtgctgaggcagcactcagcacccgtgctgatttccctcaaaaatgaaaaacaaactcaggtggaaaatctgggcatgcaatgtcatttgctatttttggagatgagggagaaaaaagaagttgtggaaagtgttgtaataagcagcatagaacagcagcccatgagtgtgaaataaaacaacacccgcatgctcttcttgacagtgattgaatggaagcaacgaagtggaggagaaaccacgctggggagagctggcatccccttgggagaagcctttccaacagtggactgaaagcatgagttaccttaccctgtaagattaatctccaaccaaacagcaatcttacctctgagatacaggcatacctcagagtttatgtgggtttcaatcccaaccactgcaataaagcaaatatttggaataagtgagtcacacagattttttggttcccagtgcatagaaaggttatgtttatactatactgcagtctatgaagtgtgcaatagcattacgtcttaaaaaagtatataccttaatttaaaaatacttttttgctaaaaaaaaatgttaacagtcatctgagcctttagtgagttgaaatctttttgctagtggaggatctcatctcaacactggtgactgctgactgatcagggtggtggttgctgaaggttgggtggctgtggcaatttcttaaaataatacaatgaaatttgccgcatttattgactc

SEQ ID NO: 37388 - DNA, 2445 bp, Homo sapiens
tcttttctttttttctttctttttcttttctttcttcctctttttttttttttttttttttagacaatgtctcactctgtcgcccaggctggcgtgcagtggcgcaatctcagcttactgagcctctgcctcccgggcttgggtgtttatcccacctcatccgactgaatagctgggactacaggcgcatgccaccacacccggctatatatatgttttttttttttttttttttgagatgggatttcaccacattggccaggcttatctcgaactcctgggctaaagtgatccacttgccctggcctcccaaagtgctgggattacaggcatgagccactgtgcccagccttaattttttaagttatcatatgcagataaaagaggcagaaccagttttagtatccaaatcagtctgatcctaaaacccgtgctctaaaccatattaaaccaccttttaaaattacatcttaatgaaataatttaatgttacctctccagctttaagggtgccattaaccacttagattttgatgtgtcggatggaaaacactccccaaacgggctattctctgttttttaaaaaaactgaatttgcctatagactcaacggattcattctgcaagcattcactacgtggcgaaatcggtgctgggcatgggtgcaaagacgacctagccctagttggtgtcttcaagaggctgcgtccagcaggggaagcagatatgaaaacacagaactattacaagggatgagcgccgcgccaagccgaacctgggagctacggacagtgtctaaactttagtcactcacaggagtacaaagatccggggctgctcctaactcctactccaaagctttcctggcctgctgggcgcacagggaagagggaagtgctggaaacttttgggaatgtgtgttttcatgtgaaagaggggaatgaaatgtatccttcagatttcactttctacttttccggccacgggctcggcacgacctgccgttgggagacgaacggtttcccgaggtggggggaagcgcggatttgccgcgggactccggcttggcgcggagctgggcgcggcaggcgcagggaggaactggcgaggtggcccgggctcggccctccgagggtgtggagcgcccgggaaacgggaccccaagaatccaactgctcccaccctgcgcggccaggagcggggctggcgatactggggacactgtccaatccgggcagggggcgaggccgggggaccgggcgggcctggggagcaggcacgtgtggagggcggacccgccgggggtcgaggcctgcctctccgagagctcctggcgcggccgtcccggcccggggccccaggtgcgcttcccctagagagggattttccggtctcgtgggcagaggaacaaccaggaacttgggctcagtctccaccccacagtggggcggatccgtcccggataagacccgctgtctggccctgagtagggtgtgacctccgcagccgcagaggaggagcgcagcccggcctcggtacgaggggtaaaggggctccgggccgggggtcctgggctcagggaacggggagcgtggcccgggagcgtctcgcggggatgcccggctccgcgctgcaccccagagtgggtgctcgccgccggcttgcgggcaagcccgggcggccacagggtggagggggccagcgggccctggactcgctccgggtgggcgagagggaggcgagcgcggtgcttaaccgctggcaccatccaggacatccagggccgcttacacggctcaggacgcgggtcagagaccacggcagttatttattcagtccatgtgctaggctttgcatcaaaaagaaaggaccgagataatcttgcctgtagctaactcctcctaacacctcttacagtttactttttaattctttactccatttaagaaacttactcctttctcctagatccttaccactttcttaccttctcgtgtgtctaatgccctcggcacagtgcccggcacatcggagtctgattattatagggtccatgacttgagttggctggtggcgcagtctcagcattttgtcatgactttgaccagctggagactttggtgccaaggaggaaggcttctcaaccatttaccggcagaagtgacccccggggcaatgcaagtcttctgagctgacagagcagagtgggtcctgcataactcgtgctttacatggaactgggcatctgctctctcctgctgacagtgggaaggatagataaggtgtccctctccaagttatccattctcctgcccaccagtccatgacaccccaccacccccttccactccctactgtttgccctttaattttttgttttgttttgttttgagacgaggtctcactcctgtagcccaggctggagtgcagtggctggatacagtt

SEQ ID NO: 37389 - DNA, 770 bp, Homo sapiens
atgtgtaatggggtgctactgaccatctactcccaactccaagttgagtgacatcacattagtaacttgaaattggtcagggtgcaaagatttacaccaaaaaagtggctacacatcagggtgtcctttccttggagagctggctattagctttatcagcatatccctggccttaccttgtgggttagggttggtgtaagtttgtaggaataaaacaccagtcacttggaagctaccagcccagctttctttaattgaatcctaaccctttccaaatagccctgccttggggcgtttttgctgtgcctaaaaaaaaagggtggtggctgagtttagtagcaggggaagatgagtcacatagtcagctagttactttttaacctcatgggtgcctttcctcaactgtaaaatgaaaggggtgggagaaaaactagtagaaataaagtaagatcatttttctagcaatgagaaagagatactttttaaaaaaagtttttattactgatcacagccagttacagagatttctttgttccttctctacttgtactgtttcccttgactagctttaaaaaaagcttttattatgaacattttccaatatacacccaagtgagagaatagcaaaatgaaccagacttttctaactattgaaatattataatgaggaatacaaaggaaaagatggacaggtataatttaaattttttcttccaaattttgactatacaaaactaaaagaagaatattaaattggaaacatacttaga

SEQ ID NO: 37390 - DNA, 2280 bp, Homo sapiens
gaggtggaggcaggctgaccacttgagcccaagagttcaggcccagcctgagcaacatagtgagaccccatctcaaaagaaaagttaaaaaacaaaaaacaaaaaaaaacctccaccaacaaaaaaccagccaactgaaattccaaaggtctctagtccacaggtggcactaggggtcactcagaaaataaaaattaaaaagaaaattacttaggaaagtctaaagcactatattgggtacttcattatatctgaagcaagttgatgatggtgcccagaaaaacaaggtagggaagctgcacatttataaagcgtattagaatattctttgatttatgcactattcgaagcttgagcctgggaactaaggccatacaacaaagcaaggattaaactatcaacatgtgggacccagtcagctttcccagcaatcattgaggccactgtgactttccttattgttataaaatgtagatatttagccctacctcttaagacaagatagaactcaccacaaccagttttcactactgtagtatctagtggctttcaaatcaggtaaactaggtgttttatcccagtctggcctcatgctaacttcaggcaaattacacaacttttctcagtttttaacttgttaagtggaaataatagtcattgtcccagaggttattgagtagataagataacatggaggagtgtttaataagtgttccctccctccttcccctgccttttagacaaagcaatcattggagtaaaaactggctttggcatgatgtgggaagagcagagaaggcgtgggatgttttaaattatatgtaaaatacatttttttatttttttgagacggagtctccctctgtcacccaggctggagtgcagtggcgtgatctcggctcactgcagcctctgcctccaggttccagcgattctcctgcctcagactcccgggtagctgggattacaggcacgtgccaccacacccagctaatttttgtatttttagtagagatggggtttcctcatgttggccaggctggtctcaaactcctgacctcaggtgatctgcccacctcagcctcccaaagtgctgggtttacaggtgtgagccactgcaccaggcctaagatacatgttttttaattacttgtggattgaaaggattattattgccctcaacagtgctgtgaataactggccaaaatatggacaaaagaccgtccgtaagttactagctgggtgctaggctggaatcgattcttatttaagatggcctagtaggcaggcctccaaatttgttttcattcctttaccttctacatcttgcctttgaatacacgtttaaaatgttatttctcccaactcaaaccccgtcactgcaataaaacttcctttacttttagaaggatctaagttccaagaaaaaaagaaggaaaaaaagagagttactctcattttcctatttcatagacagttttgaaagcctttagtgtttgggtggggcccagtcacaccctttgcaatctgcagaccagtggtttaaatttgtcatccttgtgggctgtaaaatgaaaccatgtaccaaagaaaaatagtgaatgactcactcacatgtgatcttccagcgaagggaaggattcagtaggaatgtgccacaaggctggcaggtcccttcataataggctcaggtggcctgttctgggatgtgggtcaatgttaggaacctgaatggaggccgccaagttgtggtggggtctgaaggagagcttcagttaccggggtgaattcaccacaatgcaacatccagcagacccagagaaactctctctcagcacgacaagaaagggaggattcctattcaccaggctcattaaacctgtacgcacacacacatgcaaacacacacgtgcagacacacacacgtgcagacacacacatattgctaatttatttatattaagaaatacagtgccaggcatggtggttcacacctgtaatcccagcacgttgggagggtgaggcagacgatcgcttgagcctaggcattcaaggccagcctaggcaatgcagcgaggccttgtctagaaaatttaaaaaaaaaaaaaattagctgggcgtggtggcacgtacctgtagttccagctactcgggaggctgaggcggcaggatctcttgagctaagtagttcgaggctgaagtgagctatgactgtaccactgcactccagcctgggcaacagggcaagaccctgtctccaaaaaaaaaaaaaagaaaaaa

SEQ ID NO: 37391 - DNA, 4007 bp, Homo sapiens
tgccattgcactccagcctgggcaacgagagtgaaactctgtctcaaaaaaaaaaaaaaaaaaaaaaaaaaaagagaaatcagagggccaggtgtgatggctcatgcctgtagtcccagcactttgggaggctgaggtgggcagatcacttgaggtcagaagttcaagaccagcctggccaatatggtgaaatcctgtctgtactaaaaatacaaaaattagccgggtatggtgatacatgcctgtaatccatctgtaatccatctaccagggaggctgagacagaagactcgcttgaacctgggaggcagaggttgcagtgagccaagattgcaccgctgcactctagcctgggcaacagagcaacactctgcctcaaaaaaaaaaaaaaaaaaaaaaaaaaggaaagagaagtcagaatgaatccttttttttttaatgaaataaggggagccaagtaatgatttatattgtggaaagagcttgaaaattatgtttgtaaaagctatttgtcaaaagataaagatgtctagttatgtaaaaaataaaataaaataaataaatgtgtcgtctatctctcctggtagactataaatgccttgacagcaggttcattgtcttatccactgcattatctctatcagtgcctggagaggtgctgtgagaggtcatgtaggaacatttggtgattgaatgagtaaatctacacagtccatgagtcactacttctgataaagtcttccttccagacatcccccatatatcatattccagtgccacaccctgcccaagcttttgcctctacccatctgttcctgtagctgtctctcaagccttcttaactccttctctctcactccagtctctctctttccagtttaccctatagtaaagtacagtaccttgttaaagcttttcttttattatggcatttgtctgcaaataacaaaaaactttccacagtattcccatgacctatggtattctgtagccagactcctcagccggccgtgcaaggcccataccattcagttcactttggcttttccaaccttgtttctgagccttccctggaatgagccctctgctgtcactcccgcatttcctcattattcctgaaactgcagctcattcccacctctgtacctttgctcagggtgtgtcccaggactagttggttctccccttagttgaacccccaggtaatagggggtaagtcggcaatgaatgatgggaaacaggaagaatgaaactggaaggtaaaaagcaaatgtgatcaaacaaggcctaaatggtaatcaggtgggttaagaaggacttagttatcatcaaaaggcacactgcttggtcagattatctagaccagtgcttttcaaactactgtgcaggcaaatgtttggggaatcttgtaaaaatgcagattctgggagtaggtgtggggtagggacctgagattctgctttttttctatctctctcttttgagacagtgtctcactctgtcacccagactggagtgcagtggcatgatcttggctcgctgcaacctccacctcccaggctcaagtgattctcctgcctcagcctcccaagtatctggaattacaggcgtgtgccactaccccccagctaatttttatatttttagtagagatggggtttcaccatgtgggccaggctggtctcaaactcctgacctcaaatgatccacctgcctcagcctcctaaagtgctgggattacaggcgtgagccaccacgcccagccaggttctgcatttttaacaagttcccaggaatgcatgtactcctggttctaggatgactctttgagtatcaaggatctaactaaactctgagaagaggagccttatccaggtggttcgcacctgtagtcccagtgactcgggaggctgaggcaggaggatcgcttgagtccaggagttcgaggctgcagagggctatgattgcaccactgcactccagcctggacaatggagggagaccctgactcaaaaaaacaagaaaagagaaggtgccttgtttatatgacttagatatgggaataggaggtggtgggctgccattaggggactgtttatgtgtcatgagaactccacaagagtcctagactacagtgaagacatttcttgcattctgaacaactgaaaaaaatgtgtgatgatgatgaaagagggggtgctgaaaaccgaggacaaagttgagtgtataagcctgcagcttaaagggaagaaaatctttaatcctagaatggtggcggtgaaaatcgccactgggaaacgaaaagattctaatgttggttgggctgccggcctgtcattacacacacacaaacacactcacacagatgcacacacagaggggaggctggtatgctgtactttcctctgatgcagttggattatctcttttctcaaagggggaacctcttctgatctgctgtaacattcagttcagaatctgtgtccagcttgagtacaagtattggtacttaacctaacaaaacaataggaatcctttctgtagtgtgtatctccaaacagaagaacaggtgggaaaatattttaccagtgtgataaagttgactttttttaacagtttctctaattagcccattccttgtatctttggctaatcagtaactggccttttgattaagttgggtgtcatttcctcatggcttagcttcatgcaaactgcaagttatcctgattaatgattttaatgccatttccttcatcacagtaatttcccctctgcttttatcacagaagaacttctgcttgggtggctgaactctgatcttgacctagagtcatggccatggtaagttgtgaaatacctcaaccctatctggtgccagctgccaacaggtacagaatgtgggctcagcaactgttagcttaaacaaagcattgtttactcaacagaggggaaggaggaggacatgaaaaggcaggtctatttctaaacatcatttaaatttcttttaggggtggtaagcaacttgaccttgaaaactgattcaaagagagaattctttgaattcttttaacatcctgagaatatagaaacaagttgtaattttctgtctgcagaagcgctacatgtttattttagaacatttaaaaaggaaaaactaaaaattctttaggttctaccacctgaagaggactgctatcgatactctgaggtagccacatcatttcaggctcatcaagaggggtgtttcttaacaatatgggtgtgttggctgcctcctgctttagacagtaatcagacaccttggaccttggttatttgctctttggaacaagcatcgaattgaatccctttgagagttctgtaaagttcagctctgaggtggaagctgagcctcttagctgaaaacatggctgtacctaaggctggacatctgctctccttctcttgcccaaatacggtttctgaatagacaagtaattctgatccgtggtcttctggaggaagcaataatagaagtagaaatcttatacctagagaggaactggagagcctgacagcttgagatgccttcctttaggaagatgggtgtgtaaagtaaactatcctgaacaaagagtaatatactcttaatttcttttgcattagatattccagaattttcttcatgatctctgacagtcaaaggcttattcatgtgtgccccaaatctctcatgctttagtttaaaatcattttcttgctgattgattctccctggccatggagaatttttttaaaaatatttacgtatttttattttttatagagatgaggggctcgctatgttgcccaagctggtctcaaactcctggcctcaagcgatcctcccaccttggcctcccaaagttctgggattacaggcatgagccactgtgcctagccaacgtggagaatatttattcagaaatgcttatggtgcccctactttgtggcagatgtgggactaggactcagaattaatgaga

SEQ ID NO: 37392 - DNA, 1296 bp, Homo sapiens
acctactctcatatcaaggtaggacattttatcattcctagaagctcctccatgcccgtttcatattaactccccttcccaccctccactccacacaagaaatgcaactgctgttctgagtgttatcataagttagttttgcctgttctagaacatcctatatattgaatcatagagtaggtactcttttgtgtctgacttctttttctgggcattatattcttttgcaattcatccgtattgttgcatcagtagttttgttcctccattcctttttattgttcattagtattccattgtattgtactctgatctttttggcatgtatcttcttcattattaatgtaataacaatatttcatcaattgtgatatggcacctatttctatctattcatttttgtcattccttcctatatcctctctgtttcctttgcctgctatcacaatgggccctcttgggacagaattccctgtcttcccagaatggataatggcctattatactctgaaattcaatcaatatggatatttatcatgctaacagggaacacatttcttgatctctttcttggagaaaaagagtcattaagaatgctaactgataaacggaaccacccttgccaattcctctatcgattcaccttgttatatattaatcctaatccatagtagtgtcccacagcaacgcagtttgcttaaaagttgaatgcagtgtttgagtgccatccaaaaatttttcaatacggaatttccaaaagaaccttgtgaaacattcaactcagaaagctgtctcatgctggggccaacagccatgttggaattctgacagcaagtcaccaatttgcgtattactactgatatataatagaagaaaagaagtaaagtgcctctgttagtttcttgaggctgccaaaataaagtatttgcaaaagtaattgcaccaacctaatagcacaaactggatggcttagaatagtagaaatgtattgcctcacagttctggaggccagaaatccaaagcaaggtgtcagcagagccatgctccctttgacacctgtgcagaagccttctgggcctcttcctagcttctgggggtttgctggcaatcctagctattccttggcttgctgctgcataacttccatctctgcctttgtcatacggtgctcaccccttgtatgtctctgtcttctcatatccacatcttcttataaggacaccagtcgtattggattaggggcccaccctacaccagtatcacctcatcttaactgattaatctgcagtggcccta

SEQ ID NO: 37393 - DNA, 535 bp, Homo sapiens
tttagaaatgtatttgttttccaattagtgctggtgtgtatatggtgccacagatttacaaagcagtttcacagacattatctcattggatatatgcaacaacctgtgatttagtgaaagcagctattcctattgttattttagccccattttacagatgtgaaactgagacccagagaggccgagtaactctcaccaagtcgcacagtgagtgaaactgagccatggctcacactaggcagatcccatctcaagctcggggtcatcagcactaagtccacattcttgccttgagtccgtctgcttgttgctgtggtgatagacacagctgtgacagcaccgacatgcaatgtgtggaatttaatgtgagaaggctggtgaagcagccttgttgtctggggtaaatactaaggtttttggtgtcatggccaaggagattgaggttgcagacagacacacacacagtgagtttggagcaggagtttaataggcaaaagaaaagaacagctctccatcacagagaggggtcccgagc

SEQ ID NO: 37394 - DNA, 650 bp, Homo sapiens
aggagaactgaaaagccagagacttttagcaaagggcagacaagattcctcatggagaggattcccattttactaggtggtgctagtggaataccaggcagtaactttgcctccatatgctctttaaacaaaggatggagagagaagtctgacctgtggcatgctgtccccacagcatacctcctaacaggagaaagttagtttgcctcatagaggggctatccggtccgactggacagtgctggttcctcacatgggaaaagaaacagcctaagtggacagaggggcatttactggggggaaaataacctcccacccaaccccaggaagtattatcattaggagttaaatagtctttgagatctggatcatggaattcccctgtctgtaaaaagtcagaaaaacagcaatcccttaacctgcattcctggttactacggtggttgctaaacctgcctaattgaattatttcctgggctataaaaattcctgcagcattgcatacagagaggagatgggagacatggtgactgcagaaaggaaaggaggaaaataagatttgcaataggaaaacttggagatcctatggctgacacccagtcaggcaatcagaggctggggtcagtccaggagccttttgaataacacca

SEQ ID NO: 37395 - DNA, 1940 bp, Homo sapiens
cagatcattctagagcagggctatccaatagaactccccgcagtgatgagaacattccacatctgcactgtcctgtatgggtgactaccggctacctgtagccgctgggtacttgaaatgaggccaatgtgattgaagagctgaattttaaattgtatttaatttcaattaacatttaaacagccacatgtggttagtggcaactgtaggggacagcccaaatctagggcatttcttttagctcttaagatagaaccatgtagtctccagctagggaactgctagtgtttgccctgactcccaggggggtatgacagggtcccaacagccttatgcctgaggaaggatcctgagtcatttccactcaccactaccatttccaaccccatcaccaacaaaataaaactaagccagctcagctctttgagcttctggaaatatttgcctgtgtcctggcacatcgtttttggaattttagacctgtgctttgtttggcttcaggacctgtatgaggctggagagaagaaatgggggacagatgaggtgaaatttctaactgttctctgttcccggaaccgaaatcacctgttgcatggtaaggcacttacttcatttcccaaagaaaaggagtgaaagatagcaaaaactatattgcccataagtagttgataaccttcctccttcagttggtacaaagaactgattgtacccaagtgtcttagattctcaccctggaaatgtattagtccaatgatgtatatgaaagctaatttctgaaagattaattatgaataattagaaaaagtgcatgtagtcatagaagtttggcattcttgtttctaggaaactgaccttcacagtcagtcctttttctaaagtagccccagtattttcattctaatgtagttacatatgaaagtaatctgtagtagatcaggtagcaataaaatagcaatgttggttgatatttattcctgtgtaatatccaagctgtaaagctaatacaagtgatttctttaggggttatgttgtataagatgaatagtggataatttcaaatttgatatgtttctaatttgtttctgataaatataaactttgtaatgtgattttaacttatttgggggaaagatactagacaattttagaatatttgctgtcaggttcatattcttttaaacaagcaagtaaggatataataagatatttcatcttttatacgagttctttagatctttaagtacattataattttataaacccacccaccatacccttttaatcacacacactgatttgcaaagcttgtgggaaatttgagaatgagtttgctaaattgaaaacataaagcaattgagaagtacaacacattctgaagttgtaattatttcaggtttttcacagtgacaaaaaaacaggtgattactcctgttaatcaatatcccgggctaccatcaggtacacaaacttctgactcagcttctttcttcacttccttcccttgcctggttacaaataacaggaatctccccctggtggtgttttccaagaactgcaggtcctcagaagccgatttagtgcataaatgcatttgcaagaattttcacttctgggtacaagtcaatagttaggcagttatgaaatatctgtttgtaagccactgggagaaaatattttaagcactgtttggactaggaaaacttcataattgtcttaccaaccaacaataatggtgagatttcataataactaccgttttgttaataatgttctattttctaggtgcagtgttaagcattttataagcattgtttcttgcaacactcaatggagcagtaattattttccccattttacagtggagaaaactgaggcttagaaaatgtgtcaattaagttctttgattccaagccacacacactgacttcaatttaagtaag

SEQ ID NO: 37396 - DNA, 2185 bp, Homo sapiens
caaatggataaatcttgagagtataattttgagagaggagaaaggtgcacaatgagaggtacaactatgattccattccatgatatgtctaaacatgcaaaagaaaatattatttatgggtatgcatataaggacatgcatggacatgatatacaacattctcagcacagtgattgccactggggagggagacagaatgagatggaggaggtacgcaggggcttctgcctatatgtattgttctatttaaaaaagaatgaatcattgattacacctcaataaagctgggaggaaaaaagaatgaaagcaagtctgataaaatttcaagctagtggtcggtccacaggaatctgtattactctatttgaaatattttcattattttacttaaaaagtaacagaagggagtcagggaatgaacgctggctgtccggagtccatcacaagagctgctactactccaagcagacactagtaaattttgctagggcctcctgaaggcacttttgagtccagacagtcatggtgccagaccctattcggacatcccactggcacttgagaggaaaggaaaggagtgccgggaacgttcccataacttaacgggttccattcacgtctacagcaggggagggctcatgttaaggaagcccaggaatccagcatatcgcctcatcctagggccccctctcacaggaggccacgcccaagcaagcagagcgtggccccagcaagcgccgagctcccgcaaggagaccaaatagcttcggggttttgccactagcttagcacaggcccataagcaccggggactcaaggcacctttgtagaaacaatgagtgactggagtcccaggtcttgccactacagaggcgcgtatgaaccacggtttaacactacgtctacgccgaagttcgggttagtcagaggccacgcccaccgcaggcccgaaaacaccagcctgcactggcgcgccggattgtgcgcaggctccacctgccacgcacgcacgccttgccccgccccttccggaggctcgccgtacgcatgcgccctccgtcccgcgctttgttgcgaaagcgagggggcgaggtgctgcggtgctagagcgcggcgcgaccggacgctgcgggcggggaagaggatggagactgtggcgtccgctgcaacggttggggctgcgcgtgagaaggtggcggtgtaggcacctgcgctcggggaaggctggcggcggcggccgagccatggcgggagacccccttctctgggctccctgaagtctcggggagccgtgacccatgggatcgttgagcagccgggtgctgcgccagccaagaccagcccttgcccagcaggcgcagggtgccagggcggggggctcggcccggaggccggacactggagacgatgcggcgggccacggattctgttactgtgcgggcagccacaagcgcaagcggagcagcgggtccttctgctactgtcaccctgactcggagacggacgaggatgaggaggagggggacgagcagcagcggctcctcaacacccctcgaaggtacgtgggggcacgcacccgcgcggacccggacccgcacctgttgggcctggggccgagccggcgcctcgtgcgcttgcggggtgcagcgctccccagcctatggagaggggacgtgcccttgacagggtgaatgtggaagccggcccgatgcggggcggactggggagcgccttgggagacgccaggtgttccgcattttcaaccacagacgcttccagggtgttgttacagccccaagatgaggatgagaaacgccaagcccgagctcgcgtctcgttaaaccttagagacgcccggctggctggccttcccagtccacctttgccctctcaagtgggtagccgcagagtaagttgttttgcatccggttgccttagtacagacactaaatgtaatctctgaaataggcactcttattgtcgcccactcagtggagggtaagtaattgcacacaggagttcttgttaattgtaaaggtgaagtttatcaatagtgtacatttgttcctaactaggaacagagtctgtgcaagtttctagtagttgatgaagtcgttgaccgtggatgtactgtatgtagggcggtgctgctgcagcttgtttaacccctttttttttttttttt

SEQ ID NO: 37397 - DNA, 1915 bp, Homo sapiens
ggggaggagctggggagagggagagcattgggaagaatagcttaatagatgcaaggcttaatgggttgataggtgtagcgaaccaccatggcacacatttacctatgtaacaaaactgcacatcctgcaaatgtaccctggaacaaaataaaataaaataagaaatagaggtttgagtctttcctggtaagcatatttatgctctaccacagacggttcagccttggggcaagacagtctttctcctaatttttgtagttttgaacattctaaagtttttgttgttgttgttgttgttttccctgaggacagaggcaactttggggaagtactttgtcgggtaggatggaatctggggcctttagttttccttccaagagcccataggaggttttgggtgccttctcaatgctggcatgagaaaatataaagcagatggacagtgaactttggtatattcactccttatgaatgttatgtggaaaagtggaagaacataagctgtttgtctatgctatgtttacaattggtttgctctattttgtgcatgtggacaaaaatgggggaaaaatgaaagctgtgttaggataatgggtatacggctgaattttccaggaatttctataataacaccaaatcgcatgttttaatgcccaccgtgaacaaagaagaccggaaccctcgcaactcgttttgacgttttctggtcggcggtaaaagctcggttcccggccctcccggaagttgttgcacagttgtttccgggaagcgggactccaaatgggtcgcagtcgcagccgctctccacggaggggtgagtcctgtagcaattcggaggatatggggctctgttggaggcctgtcccttttgttttattttgttttgtttttggtagccgcgtagcagagaggcgggcccttttcccaggcggagagcgaggggtggataaaggaacgtagacctgggccctgccctcttcagcccgccctctccggtttgaaggcagttgtttgtctctgaattagtttcattaagtctttgtcaccttcatacaataacttttattacactgtggccggtgggtttagaattagacctcagttcctttgctgaatttctgggcgacggtgggcaagtcactactcagcctttctgaatcgaattcccagaatgagtcattgagggtagtattgccaacttttaaaaactgatgtgagaattaatgtcacatcccataacatacagtatgtgattctgcctggttcttaaatacttaataaatgttagattcctgcccaggtcattacagggaaatcgatattaagaattttgagtcctgggagctcacttcgtaatgttttctggctaccagccccataaatgaggcagcgcgacgtaaagaaccctggacttccattaggagatctaacttagaccctcggttctgcccctgattcgttttttttttaaatcaatttatttatttttaatgagacagagtctcgctctgtcgcccgcccaggctggagtgcagtggccgatctcagctcactgcaacctccacctcctgggttcaagcgattctcatgcctcagccttccgagtagctgggattacccgtccgtgccaccacgcctggctaatttttgtatttttattagagacggggtttcgccgcgttggccaggctggtctcgaactcctgaccttgtgatccgcccgccagcctcacaaagtgctgggattacaggcgtgagccaccgctcccagcctctttttacctttttaatgtgactagtaatggtttgcattatttttctactggacggcgcagctctagatatttgaggtaattatcagttctgcaatttgtgtgcgtttgcattagaacgtaggcgttcccggtccacatcc

SEQ ID NO: 37398 - DNA, 2640 bp, Homo sapiens
ccagatagctttcatttcaaaaattttaataggtttagggaccgatctttaacctttttagttctgtatacgtaacattctattaagcatttatattggtaccaccccatgcggaaacacacaatttgcagacgtcttaaagagtattcttggccgggtgcggtggctcacgcctgtaatcccagcactttgggaggctgaggtgggtggatcacctgaggtcaagagttcgagaccagcctggccaacatggtgaaaccccgtctctactaaaaatacaaaaattagccgggcgtggtggtgggcacctgtaatcccagctactcagaaggttgaggcaggagaatcgcttgaacccgggagaaggaggttgcagtgagccgagatcgcgccattgcactccagcctgggcgacaagagcaaaactccctttcaaaacaaacaaacaaaaacaataatcttgtgagtgttttcatctagaattaaaagggaggggaaaaccccaaaagagatttaagcaaagaatcttagggtttaatgccattctgtaggttcaggaagtctctgagctttaaaaagccgctcgcgtgaaagtaattaattattccatcacttcccgggggtggaggggggtgcggaaaaggcgcatgagctcaatgctgtatactgcagcccgattccagctctttcttgagggcagaaaaaacgccgagcggcgagcatttaacaacggccggcttttcttctcaagccccgcagcagccacgtggcgcctgccctagctcccggctcaccggccactagcctgcaccgctcttcgggaggattcgaggctgggccctcgccagcccgagttccgcgaagcccagaacctccagggccgcggccaccagaccgagggctccggccccgaacccaagcggggcagagcgcccaggcgacacgaggtgccagccttccattcgatggacgcctggcaggtccccggaagttttccccggggacaggtcttggcaacaggtccgaggcaaggccgggtggagcagagctccgcagcggctggtgaatcagcgccgcccagcgccggaccggccctcccagccaatgccagacccggtgaggagcagccaggctgctgaccatcagccacttagggctcgcctggcctggagaaaggtgacatcatcgtagctgggaggtttccgaaggcttcaccaatgggagaccggcgaggtgcttgccttctgcagctcttggccaatactaacaaagcaaaagggggcccgggttgttggtatagaaccaatgggaaacaaggaaggagcacgaggcggagttgcgaatcctgtcaccagttggaaagagggggtggagcccgggccttgtcaagtgtgaccaaccagcgagaggagcggactttgcggggtggagccctgaagccctctcccaatcgcacaagtgtaggggcggggcattctttggggggcccaatgaggaacgcggccgaagctggcctgtcaagagaaggggctgggggcggggagatggtgagtcggggataaacactccgcggcggtggcggctgctgctctgctccgggttctgtcactgtgtcggcggtgcccagctcactggccccctccctctcttgtcgagcgtggttgccagagaggctccctcagccctgctccgcggggtccacagcgggctccacagcgggctccatagcgggctccacagcggtccggcggcggcagcgagcccgtgggcagtgggggttggtcccgtggctccggcccccggtgcagaatggcggcggcggttcggatgaacatccagatgctgctggaggcggccgactatctggagcggcgggagagaggtgcacggggacggggaggggtccactcgaaacgaggccgggggtcctgtggggccggcctcaggtccgggcgcccagccgctccgggggtggttggaggcggggagaccgcgagcgctcccaacccctctggctctccccacgcgcggtccgaagggaagccgccgctgccccaaagcaatgaatggggtggagaaggggctgccgcccgccggggtcccgaacgccgccccttccccagcccttcacgagtgggtggccggggccccctccgatagcctccctggtttacctcacccgggctggtcccggccggcccccaggtgggcccggcgccccagtctcctgggcagaggagcagcgcctcccggtccccggctcacggtgcttgccccgcaccttcgcctgagctggttccacttaacccgcaccaacctgctggatgtagccagtgggaaacccaggctgcgtgagcctagccactactgtgtctttctcaacaatgagcagctggaatcctccttacacctgctccgaattgacgatattcacacaatttttttttaaatcattgttctcagaattccaccttactccatttaattatttccacaatattcttttaaagataaataaaggaaaaaggaaatactgtagagaggagagagcattaaatattctgggcccattcattaactggatcctcctgttttctagaagctgaacatggttatgcctccatgttaccatacaataac

SEQ ID NO: 37399 - DNA, 878 bp, Homo sapiens
tttgctttccatggttagagacgggattatcacagttgtccatacacctgactgatagtgagttagtgtaatatattcagtggtgtaaggatttctgagagaccatgattaaacctagaggtagcaccagccaaacgtgtgaggcaagagcaggcagttttctttcagtgtgatcatttccttcatgactcatttggaatagctccttttctgaggaacaagcaatcataatggagaaagcagcttgaccccatggtttgaatcggctttatatcctcagccatgtatggtcagaattttgaactgaggtaaaggatagggagagattactgctggtttacataacccttggataacagtttattcttgttcttacaggttgaaatgctgtgctttttgcttgtagagtctagggaagtacttttccttggacaataaaagataagattttgccacataggaaacttcttgggaactgaaaatgcagatcttattcacgtttctctagttgcttattaaaacaacaaaaatgaaaatgaaattgtgaatatcaattgtttttgaaattatccatagaactgctggaatatgggaagatggaagtttctttcctactgatttttgaagtcaattactaattatttagaattgaaatctagaacttcttaaaagtgtgttttgttcaatgagtaaagcaagctttggcactcacgtgaaagaggaagttcaggacttgccacccagttgttttataagacagtggctagagtgacctgacatgaggagtgtttttgaacccaagaatttttcctggttatctcagatacgccgtaatttggcttagtttttttttattagagtgtatttttaaatggtga

SEQ ID NO: 37400 - DNA, 611 bp, Homo sapiens
aaatgaaaacgacaggcccagcccatcaagcagttatgcggattaaaggagataacgcataacagccttaggccaaacccagagctacctcccgttcaccctgatgattacgcagagctacaaaagccctcacagattacaccaacgacaagccacagcaaggcatgacaaggttaagaaagccctttcccagcctgacacgggtgagggtgtcctggtgaggcagtgactgggaaaggccccgaacaccggaagcaaacctcgcgccctccaaggtggtagcagcccgtggacaggagagccgggctgcctcagaggtcatggaaccctccccttcattgcacaactgaggaaactcccagacgatgggtgacttgtcagaggccacacggcaggtctgtgccatttggacaagaggccatatcttcatatttcttctctgtgtggccagattatttccttagatactcatgtgtgtttcaatggttgcatttttcctcctcctcccattccaagaaggtcttggacctgtcctcttttgggtgtccctgttgcaggggacgtgttttttgtttgtttttgtttttttgagacaaagtctcattctgtca

SEQ ID NO: 37401 - DNA, 450 bp, Homo sapiens
ccaccaaacagatgaaaaaatccgtaaactcattagcaatgaattaatgcccactaaagccacattgttattattgctatttctcttttaagttggcaaagtctttttctcattccctgcaatgctatttgtgggaatataaatttatatgattttcaagtgtacatgcacacacatacatacaaatgtgtatgtatgtgtatatttatctaagaagtctcacaaatattcacaccctaaatacaacatgctatcctggaatgtatcccagaacagtaaaggacattcatggaaaaaatgatgaaatcccaaaatatctggagtttacttaacagtatcataccaatgttagtttattagttttggcaaatgtaccctggttaggtaagataggaacgttagaggaagctggataaaagatatatgggaattctctctactatcttttca

SEQ ID NO: 37402 - DNA, 2498 bp, Homo sapiens
ataatactttaaattttttctgggttcatacatgtgtaaataaacacacaggaagaagtatggcaggtacattccaaatcaccaatacattacctctagtgaatacagaaataactgaaatggggagacaggaatagccaaaatatgatctacaatgttttggtattttaaaaatatcatttattatattctctgtaaattaaataatttttcaaaaagattgggcaggaggagaagcttacaaaggtcatcttttgcttcagatactaaattctctctgtccttcccatcctccactggccttgaggttcacgtattctggcttctcatctgtctacctctgaaatgttaacaccaagccccctaagtccacactctatcccaaatccttggctccaggcaagccctggtcaccaatctctgagcctgggctatagccccaggaggagagatcagacaccaaaatcgcaacacacacaggggaaatgggtatagatgccagcttcaaggacagtgatcaagtggccttgctggcctcctggccagcagaaatttcaaagagcaaaaggtatctgaaagtatctggccatttggaggcagctctggagtgctgaggaatggggctgaagtacagtcaggcaaagtcaggggtgaagtggtaaggagtgggttgaagaaagagctagtttcacttgtaaagattccaaatgaagtgctgcaatcttatggaaaccaggtttacagaaaaaggaggcggcaagctgcattctgtgagtctggctggagaacgggggtttctaggggtatctagaggagtcacttccaaagcaccaattccaaaaggcacattatgtaaaggtttagtagctagagcagcagcaggaagctagagatgtgaatagaaaggaggtaaggaagatctacaaatgaggaaagatgaaggcaagttaaagcctttccttcagccaggcacagtggctcatgcctgtaatcccaacactttgggaggccaaggcgggcggatcacctgactcaggtcgggagttcgagaccagcctgaccaacatggagaaaacgcgtctctactaaaaaaaaaaaaaaaataacaaaattagccagtcgtggtggcacatgcctataatcccagctactcaggaggttgaggcaggagaatcacttgaacccaggaggcggaggttgcagtgagcagagattgtgccattgcactccagcctgggcaacaagagcaaaactcttgtctcaaaaaaaaaaaaaaaaaaaaaaagcctttccttcgtcagtaaaccaaaggcagagatcatgggcagctttctggtgattgtacccttaagtttcaactttctatagatgaaagacaatgtatttggtcatgttttcctggttacccaaaaaatgacacagcccaggccttacccaacagctgattcaccatcaattaatctgtatcacagcctgctgagcctcacacctcacacagtcacacactagacagctctgggggaaaaaaacaacccaaggtgagctgtcaaagtcctcttcgtaacctgacctcgccctctggggtaggtttcatttcaaaactgaaagggactgaagggctggggaaatccaaagatcaacagagccaggaacaggtggttcccacagaagcatcccaggttggaactcaaaacagaaaccagaccactgataagacatggtttatgatgtctgtctccaagccttcggatgccatttatatgtttttgatatttacaatagggcatgaccacatttatccaactcctgactactaaaaatctaattctccaagtgctcaagcaacttcctggttttattacattttagagcttcggggtagctcaataactgagataccagggaacttgcgaattctttagcccttcaaatgggccacaaataatgaattttatctcttcttccttcttcatctccccacaaaggcttggcaaaattcctgtctcactaaaaagtttctaagttgttcataatggccctctcaatggagcaatattcaatacacaaaagtctagttcatcaaaggagtcaggttatttgcttgaggttcatctgtaactagctatatgagcttggacaagtcacttcacctttctgagttctataaagtaaggaggttggaaaaaaaaagaaagggaagcaataaaacaaccttgaacagaaaaaagactttaagtttttaagtctaaaaggctcatcaagtgccaacaagtgttatttttaaaaggcatacacctcagcctggccaacacggcgaaacctcatctctactaaaaatacaaaaatgagccaggcgtggtggcacgcatctgtaatcccagctactcgggaggctgaagcagaagaatcgcttgaacccaggaggcagaagttgcagtgagctgggatcgtgccattgcactccagactgggtaacatgagcaagactccatctcaaa

SEQ ID NO: 37403 - DNA, 7266 bp, Homo sapiens
ccggcatggtgggcacacacctgcagtcccagttactgaggaggctgaggtgggaggattgcttgagcctgggggatagaggtggcagtgagctacgatggagccactacactccagcatgggtgacagagcaagaccttctctcaaaaaataaataaaaattaaaaataaaaaaattaaacaaccatagtatgcttgctgaaccaggtaggttacagaaaataaatgtggtccctgcccccagagaacataagagtcttattgaggaatccttcccaccccttccaaacccataaatgtaaacatcagggaaaagagggaagagattttctaaaacaagagttaggaacttaaggtaaatgcattggctgtttggggacagaaaaatagtaactggctagaaagccttttgagtttaaggtaaagctatcccacacatcaaagtccatatcaaaagcatcagaagccatggaaaggtgtaatccataactaagagtcaagaggttcagctcaaattctaacaggctgtgtaacgttgggcaagtcacttcactcctctaatccaaaaatggctcttctgtaaaatgggcataagaccctactggcaaagttgtctgtgatgattaaacaagtaacgtgaaagcactctgaaaggttttacgtgacataccaacttaacataagaggaagcaacaatcattcctctgtatgtagcataaatcctgtggttcaacttccaaagtctaaacctgactcaccttcttagccttgttaaacccctcaaccaacctgtggtcactgagaggaggcgagtcatgtgtgaggctccaggcaggggtggggcagtgactactcagtcaattgctccatgtctcagtggtttcatctataaaatgggtggtgtggaattcactcaggtatccacaagataatgcaggtctgaggaagggagtggagattttaccaaaagtgcagaaaacatttacataaacctcccaccccgccaaagaaaaataaccaaagtcatcaaatatcatcagtccctggacataagtagaaggacccttagagatcatttaatctcttgctttataaaagggagaactgaaaccctgacagatgagttgtagaagtctcagagctagacaggggcagagctaggactagggcccagagcctcagattccaaggtccaatgacctctttgccagaccacagcatcacccaaggtgtctgtatgacatgttaccaaccccaagacacattacaatttaaccaacgtccaaacgtgggctaccgaagggagaaactgttaagactctcggggaaggagggaggctaagagctggggaagctgggaaagggaaggcttcactgaggaggtgcactaagtcccaggagtacataacaggaaattatggaaatatttcagtaggtagtcttggaaagaaagacctgacagataaaattttctctagagaaaagaaataagttagatttaaaagaccagaagaaggctttgtttgaacattccttgattatatgcaatttagtccttttgttgtcacctgagtttctaacacttggtaatatttttaattccctcatctattctgtctccctatgagacaggactctctgcagagaccacatccagtttagtggttaagaatggagtctctggactcagattgcctaaattcaaatccttgctttaccacttaatagctgtgtgaccttggataaattccttcactaatctgtacctctgtaaaactgacctaatatcaccacccatttcaggaggttttgtgaggattaaatgtgtataagcggtcacaacttattaatgggtttttaatcactttataatgtgtcctttttatatataaagaatagaaattacccaagtacatatactgcatgtagtaacaaatattgttttgcaaaaattttgttacatatgtgtgcataaatgtcttaaatcataatgtaaaatttgtttcttagtggtttttttaaaaatgtgagacactgaatacataaaataaggcttagaacaatgcccagcacacagtaagcacctagtgctgtaactgtcatcgttgctgttatgtacctattaaatgttcgtagagttatataaactaacatgaaaccactttggaaaatatatctgatagtaacataagttaaaggcaaaaagcccttctctttgtctctcatatccacacacaatcagagccctgctcaggcaccagtttgttgcttggcccactagctacgtgttgcattgaactgaagagtccacagactgacctaacactctgtcatgctctgtcaatctctgcagagaaatggaggcttggtgccagagcgaatttatttttacctggttggggtgctggggtgggggaggcaagagtcaagcccatggggagctgacggaagcaagtcagtcatacaaaaaaccatttgctcccccagaggcaggtaggctcaaatgtgccacagacagggccagaccgacagacacctgagcctctgggcaggctgaatcacttccccctccctatcctcaccagacactgcataagacagcatttcagcccgcccgcccgttacaggtgtagctcttatcaggaaaagctgggagctgcctgatacaaaaaggggctgactgcacaacaaaagattacctgaagggctcatttaaatgacaagctcacctaaacgttttaaatagtatttaaattccaaaaccctgatttacagaaaaacctggaaaatgtgctcaccagtaaggaaatctggaggtccatccccgacattgtgtgaccttgaattaagcacttcatctttatgtttgtcttcctctgtttaaaagagagagagagagagagagataagaacacctacctcagaggaccatggtaaaaattaaagatagaatacggtgaactgccttgcatcggatgtgctggcactggccaatgcacaataaacgcctgtcccttctagactaaaaatgaacacttaattgtggtaaactattaataagattcaccggccaactgtcctatgaaaaagtcagaggcactgtagtctcttcgtagctctcgttctctccagcacaacagcccatgctaggaagtctagaaaagcagtaacttatctcattccttaaattaaacagaggtttctaaatgctttggtactgtggggacccaaattatcccttgatactgcccccctattatccactattaagctttaaaaaggcgagagattaaatattgtgcccacattttacagtcattcgcgttcccgtttcaaattaaagggaggaaaacgcgttaaaattaggcctccgaccttcagaccagcctgtgggcttttttaagtcataaaactcgcggaggtggaaggccccggggaggaagaggggtgcattctagagctttcgggccgaccccaatttctcgttggcgacgaatgctaaccacgtgtcgccattttgtgttcaggaaacatggcggccgccccaagggtaaggaacaggggaggcggagtagcgccacgttagccgctttccctgagagattgtgaagcacgttgcgcacggggccctttctggtctggcttagcccaaggaggaaggggaaaaggcagaaatcacaactcataggccagcgtcttgagcgacacttcctcagcgggaagaaccggcaaaaaaggccttccaagatggcgggccctgacggggccgccccccttgagcctggcgcagtggctgcgcccatgggcccgaaaagcagccgcgggagcccaggccgcgcggggaaagccgcagaaacgtcctgaagccctggccggcagcccctgaacaaacgaggcctccacaggcgtacactattgtttctaatgtcggaaaagggtgccgcggtggaaacgacacaagggcaggaggtggggtttctgtggctttaaccgaaagaaacttgcgaaacgcaaacaaagcattatgtaaatggacgccattctttttaggaccacgtttctagcacgccccacaaacagcagagccgcgattcggcaggcggccgtgagtgggtttcggtctttctgcccaccggccgccgccggggagcaggagctggggtgggggatccatgcagggcgcccggacgccggggacgaaagggccccacgtgcccgcccgcgcgcacccgctccgcaggcctcgcctcgccgcccctcccccccggaagagggctgctgcccctcccatccccccacaccctcgcgcacgcgctctggtcacctcacgcgcatgttttaaacccgcggcgtcccggcttgtgcctgcagtttccgccggggctgcccatgtcgttccgcgcacgagcccctcatgtagggcaggaaaataatgtctatcccgcatacacagcactagtattttcagtcacccgccagtgccgttagagttaataaaatacgtcatcattttaaaactttgccggactcacagcttccgcccatcgtgcgcttcattttcactactgcagtgtcagaaggttttttttttaaggaccatgtaagggttggcgcaatcttgtgacctaaaaaagacgggtcctcattttttttcaaggggtcctgcgcagcaagcacttccggggtcagagggtacgcggggttgaaagcgggcttcccgccccgcccagaccgccgaggctgccgccggagtcgccaccgccgcgccctcgcccacccgcccgcccgccgctcccggccccgctcgccccctccgccgccgccgcccgcccctgcgactacgctgcggcctcccgcccgctcccgctcgctcccgcggccctcgctcgcctcgcgccggcagttttgggcctacacctcccctccccccgccagccgccaaagacttgaccacgtaacgagcccaactcccccgaacgccgcccgccgctcgccatggatgccggtgtgactgaaagtggactaaatgtgactctcaccattcggcttcttatgcacggaaaggaagtaggaagcatcattgggaagaaaggggagtcggttaagaggatccgcgaggagagtggcgcgcggatcaacatctcggaggggaattgtccggagagaatcatcactctgaccggccccaccaatgccatctttaaggctttcgctatgatcatcgacaagctggaggaagatatcaacagctccatgaccaacagtaccgcggccagcaggcccccggtcaccctgaggctggtggtgccggccacccagtgcggctccctgattgggaaaggcgggtgtaagatcaaagagatccgcgagagtacgggggcgcaggtccaggtggcgggggatatgctgcccaactccaccgagcgggccatcaccatcgctggcgtgccgcagtctgtcaccgagtgtgtcaagcagatttgcctggtcatgctggagacgctctcccagtctccgcaagggagagtcatgaccattccgtaccagcccatgccggccagctccccagtcatctgcgcgggcggccaagatcggtgcagcgacgctgcgggctacccccatgccacccatgacctggagggaccacctctagatgcctactcgattcaaggacaacacaccatttctccgctcgatctggccaagctgaaccaggtggcaagacaacagtctcactttgccatgatgcacggcgggaccggattcgccggaattgactccagctctccagaggtgaaaggctattgggcaagtttggatgcatctactcaaaccacccatgaactcaccattccaaataacttaattggctgcataatcgggcgccaaggcgccaacattaatgagatccgccagatgtccggggcccagatcaaaattgccaacccagtggaaggctcctctggtaggcaggttactatcactggctctgctgccagtattagtctggcccagtatctaatcaatgccaggctttcctctgagaagggcatggggtgcagctagaacagtgtaggttccctcaataacccctttctgctgttctcccatgatccaactgtgtaatttctggtcagtgattccaggttttaaataatttgtaagtgttcagtttctacacaactttatcatccgctaagaatttaaaaatcacattctctgttcagctgttaatgctgggatccatatttagttttataagcttttccctgtttttagttttgttttgggttttttggctcatgaattttatttctgtttgtcgataagaaatgtaagagtggaatgttaataaatttcagtttagttctgtaatgtcaagaatttaagaattaaaaaacggattggttaaaaaatgcttcatatttgaaaaagctgggaattgctgtcttaaactctttgttggtgccttttttttccctccccttttagcctgaggtgtttggagggaggagggagaagggtgggcccgtccttggtattctctcaagctcttctcaccttatcggtaagattccattccctctgtgccccaacaaaggaacatggcaggctgggcctgctttgggatgtttccagggacagagaggttcaagttccagagagaggcctctgcccatttctctggtagaaacaaggttttctcgaggggaaaaggtgtgcccactcagtaggacctctaaatggcagagcgtcctctccatctaaccagttcccccacccccacctcacaggataaacttaggaacaaaaaaatattctggggtgggaggagcctggggaaggggtgtgggggcagggaaaggaaaggaagggagggcagtgggccggggaggattgggggcttggaggagggcaacagctgccgggtggtggtgggactagaggggtcttggttgggcagcaggggtgggaaggggggaggggacggtaccaacgagacgcacgtgtcaagcatgcacctgtggcaagcagcctgtcagaggatgttattacacctgccaagtggtgtatccagaaacaaaagaggcccagtttccaattcttcagctgtgtgcaatgtttagagaatccctataccaggaaataatcctgcctaaatgggtcagtcttcacaaggcgggaatgtagactgatgcactgactataacctaagaatgatctgagtgttaaagatgcagattcctctgtcccaccccaaaacta

SEQ ID NO: 37404 - DNA, 1053 bp, Homo sapiens
tattgctattaacatcctctattctttgttgtatgcatatataaatataatacttttcaatatatagagatgcagtatatatatatatatatatgcgcatatatgtatagagagagagagaaagtgtgtgtgtgtgtatataaatatccccctttttttttaagacagagtctcgctccatcacccaggctggagtgtagtggtgccatctcggctcactccaatctccatctcctgggttcaggtgattctcctgcctcagcctcctgagtagctgggattacaggtgcccaccacaccgcctggctaatttttgtatttttagaagagatagggtttcaccatgttggtcaggctggtctcaaactcctgacctcaagtgatctgcccacctcgacctcccaaagtgctggggttacaggcgtgagccactgcgcccagccaaattcaccattttaaagtgtacaatttaatggtttttagtatattcacaagattgtgtaatcatcatcactctctcatgccagtcattttcatcaccccaaaaagtaacctttgcacctattaccagtcatttccatcctccctcacctccagtccccacccccgagtccctggcaagcactaatctactttctggctctatggatttgtttattctgcacatttcatataaatagaattatataatatgtggccttttgcatctgactgctttcatttaatataagttttcaaggtttgtccatgttgtagcatgtatcagtacctattttcttcttttttttttttgagacggagtctcgctctgtcaccaaggctggagtgcagtggcacgatctcagctcactgcaacctctgcctcccaggttcacaccattctcctgcctcagcctcctgagtagctgggactacaggtgccagccaccatggctggcctaatgttttgtatttatttatttttttagtagagatggggtttcaccgtgttaaccaggatcgtctcgatctcctgacctcgtgatccgcccgcctcggcctcccaaagtgctg

SEQ ID NO: 37405 - DNA, 1554 bp, Homo sapiens
atcctgggtgaaagagtgagactccatctcaaaaaaaaaaaaagaaaagaaaagaaaagaaatgaaattagctcagtgtggtggctggcgcctgtagtcccagctactccaggggctgaggtggaaggattgctttagcctgggagttcgaggctgcagtgaaccgtgattgcgccactgccctccagcctgggcgacagagcgagaccttgtctcaaaaaaaaaaaaaaagaagaagaagaagccactaagctaagaggtaggtactaagttgaaggggagacagaatggagataaggatttgggttttttaggtggtagtgacacaaggatgttcataagctgaagaagaaaagaccaacaaacagactaaacatttgagaatgagacagaggaaaaagcatacggagcaaagcacagaggtcacagggtgtgtggccagcagtggtggggacgctgctagctttctctgaagtgggagaaaaggagtgttcctttccctgcactttctcaaccacactgactgaggaaggacagagggggcccagagagcagtgggggtgtccaatcactgttcttgggcctggaaactgttggggctgtggaccccagagtactgaaggactgctggacggagcgtatggctccatctgagcctgtaaatcataaatctacctggtcaaagagtaaaggcctcaaaggttctgagttaattggtctggtttttgacctgagcatcagaaattttttaagctccctgagtgagtctaacatgcagccatggttgagaaccactggggttaagaagtgaattgagacgtatggagacttaaatctccaaccctgggtgggaggacaaggagaggctctgccgccctggctggaatagtggggccctgtttgggttgtggacgtcccttcagtcacaggaggatgaattcctgccttgttcctttggtcggatctgaattcttccccaacctcccgccctaactgatagcatacagggcttcccagacagagaccatcagcccctagggtggcagagaaaggccaggttcaggaatgtgacattaattatgacaaacaatatgttctcccacttaagaactaagcctggttggctgcgcatgtgcgcgcgcgtgcttgtgtgtgggtgtgtggtggggtatgtgtgtgtccggggctgccgattcaactgaaaaacaaaagcggctctgagtctgaagctaaggtttaacaagtgaccaagatgactcatgctgcttggctgcaaaggccacagggctgccacccccagcggggcggggcctgggtgggaagagtcacaggtacagaggctcctgtgacattcacactctgcccctgcatcggctgcctttggggccaaatacttttgtgaaaattaagacagaaggccgggtgcggtggttcacgcgtgtaatcccagcacttttggaggccgaggcaggcggatcacgaggtcaagagatggagaccatcctggcccacatggtgaaaccctgtttctactaaaaatacaaaaataggcag

SEQ ID NO: 37406 - DNA, 2156 bp, Homo sapiens
aggatcccttgagcctaggggttcgagaccagcctgggcaacatagcgagaccctgtggttaaaaaaaaattaaaattagccaatagtggtggcacgcgcctgtagtaccagcttcttgggaagctgaggcaggaggatcacctgtgcccagagagggcgaggctgcagtgagccatcatcgtgccactgtactccagcctgggcgacagttcgagaccttttctcaaaaaaagaaaaaaaaaagttgttcaagttgtgtagtgcacgggaggaaagaagtatgacaataacataggacagcagccggctctttttttcatcaggatgtggagagtgggcgccttgggaagacgaaattgagtatgtgcgggggaggggtcatatgaaacaaggtcgggaagggggcggggagagctggggctctggaggagcttggggctcgcgctgcgggggaggaagcgccttccgcggtcgctggggggaagtggttaggaggaagcacgggcagtggaggggactgctggagggtcccatctgggaaagcaggcacggatgcggggacatttccgcccgtcaccctggcaaagcgctcgcagggctggagggacagagttctcagatccaagtagagaaaaccgggaacggttccggctctggggactgacattcatcgcggcagtttctggtggcaaaacagaggaaacaaaggaatgatgaaatgaactgagctgccttcatgccccggatgaatgttcagccattagaaaagagtgaatcccagctgggatttggggttccacggtgtactagaaaagcaaaacaaagagaagcgcctactagatgccatcttggaaaacaaaagcaaacgtgtgtgtgtgtgtgtgtgtgtgtgtgtgtgatgttacatgggcatggggaaattacggaagtaaatactaatgcttgtggccgggcgcgtggctgacgcctgtaatcccagcactttgggaggccgaggcggacggatcacgaggtcaggagatcgagaccacggtgaaaccccgtctctactaaaaatacaaaaagttagccgggcgtagtgacgggcgcctgtagtcccagctacacgggaggctaaggcaggagaatggcgtgaacccgggaggcggagcttgcagtgagccgagatcgcgccactgcactccagcctgggtgacagagcgagacgccgtctcaaaaaaaaaaaaaaaaatactaatgcttgtgtaaattgggatggtggaaaatgaggaagagggcggcaggggaatccttagtacttacagagaaaacggagcaagtgtacaagcacgccaacccccccggtgcccaagctcggcgctcacgcggctaggatgacgcccgtgggacgccccaggggccctgctcgcagccactctgctcagggtcatttatagtctctccgttctttgttaaataaagacggtgagacacggacgggctggagccggcaggggtagtggagggcagaggggacgggtcggggcgcccctcgctcctgccacgctgccgccgccccagacaaagacagctgcgtacggcgggagcgcaggggcgcctgcgcgcagggcctaaatcgcctgtcccgtctccccctgacgcccacacacccaagcggcagcccactccccttctaccccgcagccatttgcttcccaccccttgattttcttttttcttttcccctcccctcagcatccccccaacctcctctgatacactttggctaattgtctaatgaatttacctattctaggtatttcgtataagtggaatcatataatattcgtccttctgtgtcggcttattttgcttagtacaaggttttttattttttatttttttttctttgagacacggtctcgttctgtcgcccaggctggggcacagtggcgctcagctcactgcaacctccacctccgggtttcaagtgatcctcccacctcagcctcccaaatagctgggactacaggtgcgctgccaccactgcctagctaatttttgtatttttggtagagaccaggtttcgccatgttgcccacgctggtctccagctccttagctcaaacgatcctcctgccacagcctcccaaagtgctgtaattacaggcgtgtg

SEQ ID NO: 37407 - DNA, 916 bp, Homo sapiens
catcctgccctcaaccacaaacttttatttccttctgctattctatcccatgattctcataaaccatcaaaatgtcttcagaatgccaattttttgtgtgttccgatttcatctctggcatgataaactttatagctctgaaactcttggttcaaaaaatagtgccgtggagagctaggtggtcaccctgagaccacaacttgcagtccctccaggctcatgcctgtatctgtgaacagggaatctcctgaggaaatacacgtggtctccacagattccacagccacacccatctcatgacctggattcctcccctcccccctgcccagcctccaccccctgggcaggaaaaggagccgagaaagtgagtcttcagctccttcctcttctgcacttagatctatcacatctcaccacatcaacactgttattttcttagaactatatagtgtttatatttggggtctagggtaaaattccattttcatctatcattgcaactggcttttctggctttctcttttggagatcttggcttatttttccccagggagtgagtcatattcacaaacacgccttatctcctgggacacaacctggtcagttagctaccccaactcacagaaaatgatcacaaagattttgtgtcccttttactttttttttttttttttttttgagatggagtttcgctcttgttgcccaggctggagtgcaatggcatgatctcggctcaccgcaacctccgcctcccgggttcaaacgattcgcctgcctcagcctactgaggagctgggattacaggcacccgccatcacgcctggctaagttttgtatttttagtagagacggggtttcaccatgttggccagactggtctctaactcctgacctaaggtgatccacccgcctcagc

SEQ ID NO: 37408 - DNA, 3465 bp, Homo sapiens
ccaccacgtccagctgatttttgtattttcagtagagacggggtttcattatgtttgccaggatggtctcgatcttgacctcgtgatccgtctgcctcggcctcccaaagtgctgggattacaggcatgagacaccgtgcccagcgacaagataattttaaaaggagagggaacgtctgcttttgttgcctttctcgtcttttgtggttccacatacaacacagcagtgtctatgggctgtcaatcgcaacataatgcaaacaacacaattgtctctggggtccactgaatccaaatcacacacgcaccacacttctgccttttgcactgctgactgccaagtgaacaatgttttgtagaagcagcaagtgtgaggagaggtgacttctgccagatggtgctaaaaaagacccaagtctgatacacaggagtccttccattaacccatccatgaccaaagcaaagtgtgtgtggggtgaggggtagaaggaattgccctgtctttgccctctggggcttcttctgcctcgaacactatccatctgccacctaacctggttttgccttgatataaatggtagcggtggccaagagaatggggtgacagagggggggaaacccacggtgttacatgctttcacccataccctccaggatggccctgagcgtctcacaccctaggggcctgaccaggtactgacactttcttgccaaagccctacaaccatcacctccctactgtgaaatgtgaggtaagttgcttaaaccggcggaaccagtttcctcaactacatagagggatgatgattccccctagctcacaggaccgctgtgggaatcaaatgagatcactcatgtgaaaagcctagcacaacccctgacacatgacacaagcacttcaggacatattcatgttcctccttccaggacagggccttacactgtctactctggtaaaccagcctcatataagctcctggaggctggcgtgtccccaggggtcaggccatcccagaaacgatgacttgaccatagtcacgtcatgaggtgagagattccgggaaggggcagcaagaggagaaagaagcgaagggcgccccaaggtaatgtgtgccctacacagggctcctagccataagcacttatgcaagtgcggggcacagagaaaattctggtaacactcctcccctcaattctgatcaggtcccaggctcaactaatcagttcagggatgggccctttgccacctttttcctaaccaaagccactctcaaggggaaacttctattaacggccagtaagcaagacacacaacgctttttgtttgaaggactacccaggcgttagtgcccttccagaccggctctagtgactggcggggaagaaggggaaaaagaattagtgtatctggacacaacacccagcatgtgctaggcagaaactaagtgtgcgaagcggatcccgatgtacaaaggggaaaacagcggctgggaaagcctgagccacgggctccaggcggccagtcgcggtcctcccggcgcgtgccctcctcctccccgacctggccggagctgaccggggcgggtgtaggcccgggggcgggagggctactggatcccaggtggggcgggtgtaggcccggggacgggagggcgacgggatcccaggtagggcggggcctggctccgggcgcgacggctctttgctcgcagcgccgcgccgtctcgaggtcggggtgcggcccgaccccacgtgccccaaatcccccccgctgccctgtaaaacctgcgggccccggtccaggcgtggtcccgctcgcacgagggagcggtcgcccagggtgccgggaagtcggggaccggccagccgccgaccggccgcacccctccccgccgagctcgcgcgcccgcctcgtcagcacctttcccgcagcgcagccccacagtggtcacgaggcgggcgcggcccggtcagccctggctagactaggcatcggcaccacccacctcgcccctccccgtcccgctggtttcccctccccctccttcccctccccctctctgttctccttcccctcccgatccccgggcgggccgcagcgcgccacgtacctggccccgcccctgcgagccacgcagggaaccccggtgacgtcaccaccctccggcgctctcattcccgcgctctccagaaaagacgcgaaggtggtgacgtgtcccgtgcgccagggcggctgcgcaggaggcattggcaactgagcgtcctgcggcgccgcctggtggaagcaaagcagccgagccccccggaagcggcggcgcgggcgagtggagaacgtgacttacgtcatctggcggaggcgtgggggcggctgccgcgtgaccagccccagccaggcgcggtcggcgcgtttctctttctcttctcctactctcagcggagcgggtggaagcttgatttcatgccgtttattttactttgactgttttcaaacctatcaagttaatattgttaattatagaaaacgtggggggaaaagggaaaagataggtagaaaatgattcttagcatccccaagcatctttaacctttcattatgtttacttccagcctttttcatgaaacaaaattgtggtctgactgtatacagtggtattaactacaaagattcctaagaagggacaaaaagcaccttttagcttcaaggctaatttagaggaacaggtagaagaggaaaagttcaaacaatggacaaaatgagtgattcgtccacggtatctaatcactgttcacatcatccggaggaaacgggctcagagtcatgcccaaggccgcgcataaaagagtggcagactggggtttcaaacccaggctctaaactgtgaacctgcaagatggtgggagtggggaagacagtgaaaagttgtgcagggaattcacagaactacagaacccactttgtacttctggaactgctgagtggggaactagttctaaggaacaaggttagtgccccagcagttggagcagtttggtgagagagtggcacaaagctgacactggtacatggccctggccactagttgttaagttccacccatctccagcactgccctccccatgagtgacagtgaaaggtgggagggacgttacaggactgtatcaggcattagacctgctactccaagtgcagtctggtgcagtctgcaggccagcagcctccctgctgtccagcactttccgcatcacttggaagcttgatggaaatgcagaatcttggaccacactttaaagcttctgaatcgggcggcatgcgatgcctcatgcttgtaatcccagcactttgggaggccaaggtgggtggatcacctgaggtcaggagttttgagaccaccctggccaacatgttggccccgtctctactaaaccccatctctactaaaagtacaaaaattagccgggcatggt

SEQ ID NO: 37409 - DNA, 1463 bp, Homo sapiens
gcataagccaccatacccgactgcattttggcttttataggaaagctaaagacagtacagagacttcctacctacctttcacacagactccccaaatgttaacatctcacataactatggggcatttgtcaaaaataaggtcttaacattggtacaacactattaactctactacaggctttattcagattttaccagttgtccactaatgcccctttttattttatttatttttttgagacggagtcttgctctgtcacccaggctggagtgcagtggcgtgatcttggctcactgcaacctctgcctcccgggttcaagcaattctcctgcctcagcctcctgagtagctgggattacaggcgtccaccaccaagcccggctaatttttctgtatttttagttgagacggggtttctccatgttggccaggctggtctcgaactcctgacctcaagtgatctgcctgtctcggcctcccaaagtactgggattacaggcgtgagccgctatgcctggcctcaatctcccttttaaaaaagaataaatcttttagactaattttagattttcagaaaagtggcagatagaacacagttcccaaacaccactcacccagtttcccaatgttaacatcatatataaacatgggacatttgtcaaaaccaagggaccaacattgccacattattattaactgaactctagactttgccccttttttctgtttctggatcaaatccaagataccacattgcattgagtcatcacgtctccttagtcccctcaagtccgtgagtttgtctttctttttcctaatcttgacagttttgaagagtcgaatattttacaaaatgtccctcaatttgagcttgtttgatatcttccttgcatatttggaatcagtatattttgatttgatattctgacccagcaattacactactaagaatttattttacagactgactcccacatgtgtgaaatgagggaaattataaggcaactcaatgaagaatatttgtagcagcaaaatataagaaacaacctgatgtccctcaagaagatactggtgtaattaattatggtatgcctacaaaatggaatacttcccagaaaataaaatatttttacagctgtttaaaaaaaaatggcatggccgggcacggtggctcacacctgtaatcccagcactttgggaggcgaggcaggcggatcacctgaggtcgggagttcctgaccagcctgaacaacatggagaaaccctatctctactaaaaatacaaaattagccgggcgtggtgacgtatgcctgtaatcccagctactccggaggctgaggcaggaggatcgcttgaacccgggagccagaggttgcggtgagccaagatcgtgccattgcactccagcctggggaacaagagagaaactccatctcaaaaaaaaaaaaaaaaaaaaaaaaa

SEQ ID NO: 37410 - DNA, 1907 bp, Homo sapiens
cctgtctctactaaaaatacaaaaaattagctgggcgaggtggcgggcgcctgtagtcccagctactagggaggctgaggcaggagaatggcgtgaaccctggggggtggagcctgcagtgagccgagatcgtgccactgcactccagcctgggcgacagcgagactccgtctcaaaaaaaaaaaaaaaaaaatggcctgagtagctggacgtggtggctcacgcctgtaatcccagcactttgggaggctgaggcgggaggatcactgagctcaggagttcaagaccagcctgggcaacatagtgagaccctgtctcttaaaaaaaaaaaaagatacactgtggagtgaaaaaagtgcagcactttgtaatatgctattcttggttttactcttttaaaagaaaaaaaaaaagacgagagatacacatatgtatctatctagacacacacacatacaatgtctattgcatcagaagaaacgacatgggatttgggaaacagaagttaggagggagacttacatctcactgtttggcagtatttgaattttaaaacatgtactagtattacttcctagagactctatatcgaaagcatatacaaacaattaacacaacttgtaaagaacgtggatttgaaacctgaaagatctgctgggtattctcttctcagcaagtttacaaatcagcctcctcggcgggagagtgtcaagggactggtgttggaagcgttaacccgcgatgggtttccatccaaccactacccagacctaaatgtttggtggattctgtttcatgcttgtgaggcacagttaggggaaaagaacaaatgatcattacggataaataataaaactagctgagtacactgcgtgttaaatcctttctatgcatgtactgcccacacgatcctgtgaggtagatactatgttacccatcttagagatgaggaaactgttactcagatttgacggaagcgtcacagccagcaggtaactcacaaacgtgggtttgtagtcggctggatggcttgccaaaccacaagtgggaggatggagcacatcagccctcaacggcctcggaacagcggaggaagaccgccggggccctgcagtcaacggagcggccgcccgactccgggacgctcacctcccggccggcttccgggatgggtctgcagcgacacacacatatcccctgggacctgcttcccggcatcctccccgcgcgagcgctcacttccggtcccaagtaggcccaggcagaagcatcacctcgccggcagccgctccttggacatgctttccgctgggaacccgagctctacacccctgccccaccgccgccccggtccttgctcagcactacccccttacctgccctgcgcaccccccgcgagccccggggcccttagctgacgaccgccctcacctcttctctcttcgcctgccgcggccttttacaaacggggccaaactgttcgctgtaacgacaatcgttattggtcagagccgcccacgcgcggcaagtggccgcccacctgagctcgcgttgtcttatgggagttttagttctctccttcagagaccgctgagacactgggggaatgcggtggtagaacatacgccgacctagcggctgtaaagctcaggctctgccttggagttggagtgcttctggcctatcttactgggcgctcacctccaaggctcgtcttgactcccttctggcctgagagagtcctatttctgaatagacttttgctggtaattgatgcaaaaatgacttgagttgctggacgtggtggctcacgcttgtaatcccagcactttgggaggctgaggcggaggatctcttgaggctaggagttcgagaccagcctgagcgacatagcgagaccctgtcct

SEQ ID NO: 37411 - DNA, 2567 bp, Homo sapiens
ggctagtagttttttagggagtattcatctacagatacaatctttcctaaaacaaaggtcatgcactaattgctacgtcctactgaaaagatactttctgagcctcaggaatagagaaaagaaatttcaaggttactaacagattaactgacaatctattaagaaaacaagtgtaaccacatttccaatatagacaagaaatagcaacttaaaagtggaaaaattttggaggtaaaaaaacaattacatcgtacttcagagcaactttattagagagctgcaaagagaaacctaaaattgcatttttaatgcatggagctctcaaactgccagtattccaagaatataaacaaaaagctatgtcatccaagaaaaacaaaaagctatgtcaagaactcattgagcttttcttcttccgagaaatgccaacaaaggcaggatcaactcatccgataatacctcgaaaaacaaagaacgcagttggggaagccacacgacaaagaaaatatccacgctccggtaatttaacgctatctctaaaaattctctgtaaatatgttagggcatttacagcccgctcgttcaacaccatgtcaatcacaacagtagtaaacgactataaaaataatattaaatccatttcccctcaattgatatattccttctgggtgagatttccaaatccttggggtgtctggttaggctttttggtcggtgggtgctacagaaggaaagccagaggttaaagaaaaatgcttggcttttttccaattggcaactgcaagaataaagtttactgcactgaaaatgagtacaagcaccctcgaggaggaaaaaaaatcttatcaccgagaagaaaatgaaaggaagaatttcagtaggaaatcaaaagtaaaattaaagggagacggctgtaaagataagaagaggttaatcaaaaagggggagaagcgggaaaaggaaagaaagcataggacaaaaggaaggttcgacgagttctaaaaagaggtctgaattaaagtcttttctccaggtctaagaccacagagggcccgtggcgagagcaaaggtcatgcaatggtgttgctaaagtgaagggattaattgagagggttgagccccgtctcccttcacctcgtcctcacagattgggtcttggttgtaagcatccaggtgcatgctaaggaaacaaaaaccacgatatcgcggtgtccacggagaacaataggctgggagcggcgcagggccgaggccttccctccgggacgaccaccatcccgcctccctcatcgctgccccagactcacagagtcttgggcatctcgtcctccatggctgctgctgtcgcggcggcgcctccaggtccagctccctgcccttcactacctcccaaatcgtttaagcggttatggctacaggatagtggggtttctcggctgaccagaggttactccgcctcctcctccggcggcaattacactaaaccgcccggcccagcgggaacaatgaaaccccaatacaagatggcggcgagccgggagcctaggagcagccagcaaagttacccgggccgcgcaggcgcagaataatcttgcactctcaacctccgggccgcccggctacaccttaatccataggttcacttgttgcgcagccgctcttccacccgacgcgagggacgcctcagactgcgcaggcgcaagtattaactacttcacgatttgcgtgaacttttttgtcttctggctgcggattcgagtgtttcgaccgcgaattatgagggagtggaaaccttcagggacagtaaaaagcctaaatctttcctcttttggaaagatatataaagactcttcaagctatctggtttttagcgagcgagaagcaaaacgcctatgcgccgcccgggaatcgaacccgggtcgcaagaatgggaatcttgcatgataccactacaccagcggcgctgttgacatgcccagccgccacagtattttaggaggaaatagaagcagacgttctctcatgtgaaaagaattgtcatgtattatttattcatttaaaagtaaaagtttattgacagtctgtaatcttctgttttccaataacataaataatttatcttttctcatcccaaacataggaatggatgtttcaactttctctgtacagaaaaaaaatttcaatttaaaatgtttacttaagaaataagaaaaaagaaaaaaagttttacttaaaaaagtaaggattttattaagaatttgcgtcgttggtgctagccagatttttcagcgcggggaggatatttccagatgccagatttttatttatatttgcatttcttccgtgtattgattgcacattgaaaagcatttaagaaatagctgtttaggccgggggcagtggctcacgcctgttattccagcactttggatggctgaggcgggcggatcacctgagatcaggagttcgagaccagcctgaccaacatggcgaaaccctgtctctactaaaaatacaaaaattagctggatgtggtggtgggggcccgtaatcccaactactcagga

SEQ ID NO: 37412 - DNA, 1046 bp, Homo sapiens
cttcgatgtcttctgaaggagggtgggcttcgaggcggcaggatgtgcttagggcactgagtggcccagagtggggagctcctgcagggttgagaggaccggcggggcgaggtcggggcggggctcgcaggacctgggcggggctcgcaggggctgggcggcctgggggcggggctgggcggagcgcgcagccgcgcagcggtgggaggactgcggggctcttgaggccagctgcagagcttgtggaggccatggggcgcgtcgtcgcggagctcgtctcctcgctgctggggttgtggctgttgctgtgcagctgcggatgccccgagggcgccgagctgcgtgctccgccagataaaatcggtaggcgagaagggggcggcgcgggaaggtgctggagcgcgccccgcgccgggcggccgctgcgcagtgcgcccagatcccacagccgcgacgcagtccagcggtgcaggccgagccagctgcgcaggtcgcgctttcccccattcacacttcagggcggctttcagctctggtcggaataggactgtgcattcccaggcgtggagaggtgcccacttgaggaatgggcgtggacggggacaggggcgggcgggcaggcaggcgcctagcgtacctgtagcccctgtctcttaggtgtggggctccggggaggcctaggtttctctatcttcccgttgaacactgaccgtgaagactccagtgttctggcttgacctggggcgcccggccagattaacaggctcacgcaggcacagcacagggaggagtgcaaacaagttgaccctgcctgcttcccttgggaggctgaaccgccttcccccagctccgctttgctgaggtcggcctgctctcagaggcccttggcttgcacagtttctccgcctaggactaacacagctgcagaaagaatctgttctctttccactgtcaagagctccagtgtcaggagccttggctctttgcttcctgtctccctcccgcccccctttaaagttgtgttcttcggtatcattaacctatct

SEQ ID NO: 37413 - DNA, 652 bp, Homo sapiens
gccatgatggccaggctggtctcgaactcctaacctcaagtgatcctccagcctgtgcctcccaatgtgctgggattacaggcgtgagccactgcacccggccttttttaaaaagtttttttggtcagcctcttgtagtctctattgatgtcatagcctccggcatctgtgatgttaaacaattgccacagattttttttttgacacgtggacacgtgccctcaggatggggctgttgcatagagtgaactttgaatcaggtcgaataaagacaagccttcaggatagagctttttcggagctgccagataggtcaaatattgacagttctctgaggatagtgctttttgggagctacaaactcgttgtgttctctccagtggcttctagcttgctagtttcacattgcagttggaagggtgctggttttattttttatttttttttctctctctctttttctctttctttctttctttcgacggagtctccctcttgtcgcccaggctggagtgcaatggtgcgatcttggctcactgcaacctccatctcctgggttcaagcgattctcctgcctcagcctcctgaatagctgggattacaggcgtgtgccaccacacctggctaattttttatatttttggtacagatg

SEQ ID NO: 37414 - DNA, 1927 bp, Homo sapiens
ggctggtctcgaactcctgacctcaggtgatcctcccgcctcagcctcccaaagtgctgggattacaggcgtgagccactgtgcccggccgcaaaattattaaataggaactttaccttttgtctgacttccatgggcctggtaataaatgaactaactatacacaaagccaaccacatgctacgccagaaaaaactgatccctgtaaaaattttgcatcctttgtgcaatccaactaatacatgtagaattccagcatcaggaagtataagcaaaacagaaacgtagtcaggaaacacataacctgttaagtccactcaaaaagtatttgaggaattcaaagctttacgttgagtcctacctaaagtaaggctctcctacttaaagttgtttgactttactgggtgtgtagaaaaaacttcaaaaaattagccttctctgactagaaaaaattaatgttcttaaaaaaaaagaaaaatgaatgttcttatatagtttcaacatcagagcaagataacacatgacattcaagcttaacgtaaaagaaggcaagaaaaaggaatgaggtttctaagtaaaagctcaaacacctacaaacacatttgctaagactaaagtggctttcggattctgatgcctcacgtagttttaaaaacacttccttcccttccagcccctccttagttccttcagagaatttccccctctagccgtctatctagaacatgatactattcgagatgttcaacaaaaggtagcactggagatcttcaaggaacgagggacagcgccgggtgaccaggggccagaccgcgggacctggagactagtcggccggaaggaggtgccgtggctgccggctgtaaccacaccgacgcgcgagctctgcgcgggcttcacgtctcatgcgcgggagcctggccgggatcccggcgacctcggaccggaagaagaaatgaagtgaagcggctcaagacattcggctaacggagagggaaccaagggactcgcaggacgcaaataactgaccacttcggtttggctctcacacatacttactttttcaactcgggagggtgagctttgctcatggtgtatactccgcgggctcacagatgccttggaacgcaacgcacggctttcctcacgctcccgctgtaggcccggcgtcttgcgtctggcgtcatcgacctcgttagccaatggattgttggcagtttttacatttcacctcgcgatatctcagcgcctcggtcatcgttgagcttccggttatgtcctcagcgattggccaggacggaggggtgcgtcctctaggcacctttctgaattccgttttccttgtacaaaattgagataacgggtattccaccggtgggtatccctgctctttttcttttctttttgagacggagtctagctctgtcgcccaggctggagtgcagtggcgcgatctcggctcactgcaagctccgcctcccggcctcacgccattctcctgcctcagccacccgaatagctgggactacaggcgcccgccaccatgcccggctaattttgtgtattttttagtagagacggggtttcgccgtgttagccaggatggtctcgatctcctgacctcgttatccgcccgcctcggcctcccaaagtgctaggattacaggcgtgagctaccgcgcccagccggttatccctgctcttgtctatggaacagccaaaataaataaaaataaataaataaataaaaaaagccgggcgccgtaaatcccagaactttggatctcttgagcccaggagttcgagaccagcctgtgcaacatagcgagaccccttctctatttaaaaaataaaattgagatattgagataacggtcccgtctctagctcctgggcaaacccggccaatcccgcatgtctgtggatc

SEQ ID NO: 37415 - DNA, 1425 bp, Homo sapiens
ggctgtcctcacaacagctggcgctgcaccggaacatgagaccctggggagaaagggcagagaggttaggtaggaaagtctctggggacagagatgactatggagcactacaggagttagaaggccacgtggatatttgcacctctctctccaccttctgctttcaccttccctgagaatagacaccaggaccttaaaaccaccactggggaaaattatcctcaatgtctagtgtagtgtttcatggtgtccttgctgctagctcatcggcacctgttgcaccgatggttgggtgaacagaggttcgcccgagtgggtgagggtagggtggtctgacgaagccaaattctgaaaaccaggagcctcttccatggggttcagaggtcagcaacctagcaatacaaattccaccagagggcagccgacccactaatcaatgactcaaggggcactatctgggaaacgcatactccgtgagagaagcaggaccgaaacacacagaggcattgcggggctcagagaagaacagtgtagaaacccgcgctgtgtgaagcgaggttgggcgcaagagaagcaggcatgacctggccaacggggaggccggaagtcctcgcctttctggtctttcacgttggcagcgcctctgctgggcctcgggccgctcacctgcggaaggggccgcgtaagaggggaaggtggtggggcgagcgcctgccaccaggggcttcccacctgccgccgaggacgctcctgccccgggctggaaggggcggaaaacagcctcgcgcacggcaagggcacacggatttcatccgatccgccaaagcttccgaagtcctgtccgaggccgccccggcgaccccagggccgcccacacccggtctgcggggacgcggctgcagtgcaaggcgtcgcgtggtggctgagggaagggcccggaacccacccgctgagaagggggtcctggttcggccccagccccgctacctgcatcttccggatgttctctctttccagactcttcaccatggactccaccgcctcctgcacccggagctgctgcagctcagccatggcgaccccgcgctgccccgcggcgctccgcgccggcgcccatatggaatcggcgtacgggcccgccccctcaccgcccttcgccgcccttcgccgcctgcccttccagggcccacgcccccccctggcggccgaacggagccactgcatgctggtgtccgcgagcccaccgccctcctcccgcttgggaaccggtcactgggacacctgccctgcggctgctgcctgcctttcctcctccctcccatgtccctccctttacattctttaaaattatttaatgtaatttacatacagataaatgcccagatcttaggcgtgctgcttgatgagttttaacaaaccctgtcc

SEQ ID NO: 37416 - DNA, 491 bp, Homo sapiens
gagaagggaaacacactccgtggagaaggggaaggggcagtgttggaagaggtgtgctggaggaggtggtccaggctggcaaggagggagtgagccatccgggttcctcaggaaagttttcttagaggagataaggcttgaattgaggctttgaattgaattgaaatgagtgggtgtttgcttggcatatggggctgaagagaaagccatgtcaggcatgggggtgcaaggtgggggtgggggaggaacaaaggaatggggccgtcattagaatttaacgattttctgccattgggcgctagatggcaggagaactctagtttagggcagtggggagtttgactcaacccaagcttctttgaagaaagctatgttttgattgggcacggtggctcacgcctgtaatcccagcactttggggagctgaggcaggtggatcacctgaggtcaggagttcaggagtttgagaccagcctggccaacatggtgaa

SEQ ID NO: 37417 - DNA, 576 bp, Homo sapiens
gggaggcccctgagggggccaggaacagcccccccttgggcctgcagttaagaccttccagtgagcgcctcctcgcccctgaggagggggcagagaggactccgggacaggcgtgtgctcggtgggcaggaggccagggagggagctcttgaggagccacacagcagcaggcccgctcccttcccacacacgatccacacacccacggcagctgcactcaccactcagcggggacgtgctgttctccaaggcctggcacgcagccaacacaatacctgttgggtggaggagaagagggaaaaggtcagagtctgcttggcaaatgatgtcctcagacgcttagagggcaggccctttgacaggcaaaggttcggtagtttcacagagtggccggtagacaggctcagctacataatttgtggatatcagtgcaaaatgagcacatgggaccccttgttgaaaaagtaagaagaaaatgcccatgaaaagcactgaaatccagagccttccacttcttcccagtctctctctccatctgtcagggtggttttggcctttgttttttcttaacacctt

SEQ ID NO: 37418 - DNA, 1346 bp, Homo sapiens
taggtaaaacatctttatccaacagtgttaaccaggatgcagcacgcatctggctagaggtgaggaaggccctgtgcttgctctcacctgtgcagatctatgccacacccttttgtgccaggaggaagcaattgtctcttccgaagagtttaagccttatcaaagacttagaccaggggctgggtactgagtcaaccttcctcttccccaggcctgctcacgcactggctggctgagggcccccatccaaattcctggaatttcaaggcaacagggcgagtatcgccgagccctctcgggctggctggagttccccagctgctgaatcaccaacaggctctaccagggccgagttctgaggttgcagagaagccgtgccaagctgaggcactctgaaaacctgttccagctgactggcactgtgacacgaggccttgaggtgtctctggaaagggttacacttgattttcccagagtccaggagggaggaagaaggggatggcggcagtgggctagggacaaagctggggataaagtggcagatgctatagctatccacagggccctgggccctttgcattgtgaaccagctgagcagagggcacctggctgacaagaagtacaggaaccaaacaccacctctggaaggatccatggggaggttataagtccctccctatccgtgaaggcccattggccccatctcaacttccctggcctgtgatgtctcagaattaccatcctctgggcccaggtgagcagtggttctgctggtgtgcacctcgggccagcaaagttagactcttggtggctgaaatcaaaccaagcccatcccctcagctcagtcaaagccatgtgtgggcatcattcacacaagtggcttgaaagtagggtatgagcagggaggaggtaaaaacaagcaatccttgaactctgtcccatttcctccatgtgaatagcttggtgatgacaaactcatccctgcaccctggtgcacaacaccctggacaccccggaaccaccctgcagaaggcattgtgaggctttgggtttgggccaatacaaataccagtgtgacttggcagaatctcagatcaatgcagcatcagcctggaagtaggggatgggggaaggggacaatgctgccccattgctaatccccactgtccaccttgggggctggccacaggacaccccttaggcatgctcacttgagttgataagggtggctgattaagaagcaagttcaatcaagaaggaaacaaatccccagaactacaggttttcaagagttaaggggtaaatacacttacttcttgcagctccacatttctcaacccacatca

SEQ ID NO: 37419 - DNA, 2265 bp, Homo sapiens
cggagctgggtgaggctgcggctctgggcatttctggggaggagttccatggctttccacagactctaaccaccctgcagcgagccgcatgctatacgggttaaactcggggcatatcgaacgaacaattcacttcacggaagactagcaataaccaggacacctgcgctattgatcagctatctcaacaccagagagacccaccagcacaaggggcaagaattggccaggaggcgcgcggcgctgcgccctcaccgcgtccagacagacccttgaacttcaccgccaaaaaacgcaccgctccgcagacccgacccgggagaggggtttaacttcccctcacctttcccatccctccttcatttccaaggacatactcaaaggaaactggcaacactcggtctagggtttcgctcctgccctcggcggacaccgaaaccacttctcccagggaagttaattaaaggaaccattaatccgcccaaaaatccaaaacctacccccaaagctcaagagctctgaaaagagatcgagggcgcctctgccgatcttgaacatctctgctcgtcgctggggcttagaggtgggcagggggtgccaaaggggcgcaggcaagacccggccagagggttagacgccggcccccgttccgaggcggcccagtctacacgccagcgacgccggctgagccgggcttggaggcagccaggtaagcaggtaggtgtaggcatgtgtctgagcagacacacagctgcggcggattaaagttcaagcccgttcacactccgcttccccttcccaggtgttctcacgcacggcccaggcagccactttcccggggaagcctcggcgctcgaccggacagtcccctctttgtcattcttaatgactccccttgcctcccaggcgccaacccattgagactactcgcttctctccactctcccaggcgggcgcagaaacccccggaaaggggaactcggcggggaccgggggaagcagggtgtcgcgcggcgcagggggcgccgcagccggcgtacgtacccagagcgaacagggcgagctgtccagccgaggggaccattttacgggcgggcgggcagcaggctctccagcctcctgccctacctgcggtgcccgagtggcggagcggcgccgcggtgcgggggaaaaagacgcagactaggcagggcctgcccccggcgcgggagggcggagggaggaccgagcgcctctctgctggcactcgccccgcagcgctgcccgccgggcggaaataggaaggcggctaccgtcacctcctcgccactcggcgaccggggcacagctgacccccccctcccgccccgatgggggtgcccccctgagggcacagagggtgggggtttggggtaaggggcggggacgctgagcgcaccgagcagggcgcgggctgctgggcggggcgacctgggatcccagagcctggcggcgcgagccgggcacccgggccgacgaaaaggcaggaagcgcctgacttcagacaccacccccgactgccagcgccgtgcggcagcggactccagcgtgcggggtcggcgccggccgcgtagccggattgtcctgggccgcagtggcggcttccaggctctaggcggcggagcggagccgcccgggcacccgttacctacaccgaggggccgctcctggggcatctctggggcggggaaggctggaggctggggacgcagccaggaaagggacctgtgagtttcgccggccgcttgccaagacttggctcaaggaaagtggtcccctgaatcaatgaagaatttgttaaaccaggtttcccacctgtgccacagttcccatcaattctggcaacgcctgccgccttacctcccaggcaggccacatcgttaagatcagtcttcgtacttctggcctgggactgataaaaaatgggtctctgtgacgaatctggttatatggcaccaccagctgaggccaaaagcctgctagcctgccaccaagtgtaccccgaaagaggggtgtgtgggcccgagtcacctgggtggtcctttcaggatttgtggctctgaggtggcccctggtgctggaatttggggaggtggaggggatagagggaagacattctgggcgaagagtggaagatccataggttcctcggtgaccctcatggggacagtacacccgggagattcatgttctccaggtacccggagctcacggactgaccctcttctcctgcctcctctggcctac

SEQ ID NO: 37420 - DNA, 1915 bp, Homo sapiens
agaacaaaccaaacatcccatgtgttgcccttccaagtctggagaagtaaaactttcttagggcaactaaggacaaatctcataaaaatcaacgaaagtctgcatttgatgccacagtacaatgataacctctggctcagaaaacggaatttcacgtattcaataaacacctgctgggcacttggcatgagccaggtccctgggctgagaatacagctgaaaaagacagacaagggtccttccctgacccagcttgggaaagggaaggggaacagtagggagagacagacgagtttagtgtgagaaatgctactttagggaaaggacagggcactgctggaccatcaacccctgtggacttcccggaaaagatgacatctcaactgaggccgaatgggaaccagccagaggagaagtgtcaaaggtggagagagcagggagcatgaagggccagaggcgcaaaggcggcggtaggcgttggggaaaagttccgcgcggcaggcccgcgaagagtgggagccgcagcggttagcggtccgcagacgcgggggcggcactcgagtcaccctttctcgggcagtgccggagcggactctgtgacacctggaaggagccacggtcaggccgggctgccaggctcgacaggaggggcaggatcaggcgggaaggggttggggcggcgaaggccgggagcgccgggcagtggtcccccgagtggctccgaaacccccgcgatgcgacccccaacgagcaccgatgccggggcgggagcccgcgcgggccggggtcgtgcagtctcaccgacagccagcgtgatgaaggccacctggatgaagagcgacagccagctcagcaggtacatgaaccacatggcgcccccacccgcccgctccccggccaccgggacgggcctgcgcgcttcggctccggcgacacacagccgccaccgccgccgccgccgccgcgtccccgccccgcggacgacaggacgacggtgcgccgccgccgagaggagcccggccctagcgctgcccggggccaggctcgcgctagcgccgcccgccggagaggagggccaaccgccgctgccccgccaggatcccccgctccactgaggggaatgaatgcagaccgctgcagccagagggaggcgggacggtgcccaggggcggagacgaccaagcgcccatactggggctcggagtgcagcctccagtccctccctgtgcactcccgtaccagcctggaggtggtccagggccggacagggccgcccgaccgcgccccagcaacctccccagaacctgcctcccggcaggttgcggacaagtctgtctcttgctatcgcaggtgatagggacaaaattattgaattcctaatatgtgccacgctctgtgataaaggcgaggtgtgttcttgtcggaaatttgagcagataatgtaaatcattttatagacggggaagccggggccaaaggaagttgccctgggtcatgcacctaggaagcggcacaatcaggagttggggtgattttaatcggtcatcctccggcctaattcccctctaggctgttcttttggggtacattctgcacctttgtatcgcctgcacctcaccccttgccgggcacgcagggcgtccgctaggcgctggatgcatttactacacctctgggagggttcctgaggggcacctggaaccggttagtccttgtcaacaagtctcccatctagtggcggagacaggcatgcaaaataaagtatgtagaacaagagtctagtaggcttatttcagaatcatatttttcctgcataaaaatacgtattcctaaaaaaaacaattaccgtatgatttagcaattctacttctgggtatatacccaaaagaactgagaaagcagagacatttgtata

SEQ ID NO: 37421 - DNA, 2013 bp, Homo sapiens
ggctcattgcagtagtacaggacagaaacaattatttcaaaatccacctacaatctagtctccaaaaatcctgcccagtttaattgcaccacaatctactaactgtaattctaaaaatgtgtatgttggataatcttccagctctaaagtgctgtgaattaaaaaaatgccataggcaggcataaaaaaatcctaccctctattatattctccatctgatatagaatatatgatatatattctataaatgaatacatgatacagagtctatcatgtagtgatttactttttacttttgtgaattacaacgtggtagggtaggaaatgagaaagcttaaaaagcctaattttctcactaaagcataaccagacacagcagcctattaggggtttctccagaagatggcaggcagtcaagggggacagagttcgacccgcgacaggccaactgatttccccaaaaagatgccaagggcagctaaccgccctcctggcccgcgaagctgctccttgagggcccaaaacttcccggaggagccagaggaggccctcaggagccacagctctccctgacttggcctgtatttgcacccctagggatcccattccctttcccgacgcagcgcaaggaaggggagcggaatgggggctgaaaggcaataaaaaacttgtaaagccgtatctgctagttctcccagtgggctatgtccctgcaaatatcctccacaagaagtaaactgggtgggtaggaagaggtgaaggctccctcctcagggctgccgggaccgcctcgagggcttgtctgtttaggtcccaattcctcccggatccgtacattcacacgagcgcagggcaacaatctgagcgagtgttcgtgtgtgcccgtgtgactcgccatcgcgtggcagatgttcagtagaacattacagtaatttctgttacaggtccatgggcgcaggtccctgagcccacagcttcgcgggggtctggccgagcatgcgtcacaacctacgcggccaagagcagtgcgcacgcgcaacctaacgcgggactgccagcaacttccgggcgtttacaggcaggcaggtcagtgatgtgtcctaagggtccgaccgacctagatacccctctttgattcctcctcttgggattagtgtccatctctggaagcaggatccaggaggacgggaggggccgctgcggaccgcagtcgctccacctggaggagacaccagaaggaagacagcctgagggacgcagccatccccggctcctaccggcgccccgccccgcgcatgcgcacgcgcacagggagtcagctggctgcgcgggaggtcacgggaagtggggcggtgcccagacagctggagggaaggaggtgtcaggcggggagagacgcaaacggcgggaccagcagcgacggtagcagcagcatggccgcgatctatgggggtgtagaggggtgagtgcggcccggcggagggagcctgggcccgaaggcggggcggaaggccgtggccagcctggcaagctggtggccttgatcctcggcgtccgggcactttgggcggcgggaccttgcggtgaagaggtgtgtgcacgcgcaggggcgccctggagcgcacagctgtatgccttacggggactctgcctgtgcaacagccacaccccgggttggggatcctttgtgtttcttggcggaaccacgcccctttcttccacgaaacacccactccgctgtcttcagctggagaagcagctcctttttcctattcctgacctcggacagagttttgcagaacaggtgtcaggtgtgaaattgctgagcgcgggcagggtggggagtgggagtggggagaagcgggacaaagatcttggctgaggttatccgggagctggagcagctgcgagccagagtactaggttgtcctgatgtctgaaaaccgctccatccctgttggccttccatgctgctttcactagattgcatttttctgctcagaagcttgttta

SEQ ID NO: 37422 - DNA, 2025 bp, Homo sapiens
cacgaatgtcccggagtaactctggggcattaccacttggcaccttcttcctaatagggaatctcagattaagggaaatacttgccctctcataaaaggaggaagagaaaaaaaaaaaggataaaaagaggagaaagtgagtcagaaaacgtgacaattattacagttatttctgtcataactgattctatgtacatattttaaaaaaaatgaagggggagagaactcaagaaagtttccaaatccacatgcttttatctgtgtacgcgataaatatattagtgcacgtggaaaaaccactccttttgtattctttacaccactgacctttgagtgttcccaacagaaagctggtcacgcttggagttcggccgactagtagttgttgtttttacggaacgtgctctcctttctggtttctccccagtctctttattggtgcgcggtaaaataacttaccgatccgcttctatttacttctgtccctgccctgcctgacctgccgggcaagttccctcgactctcccgcccacatactggaaggtgcagagcccaaggcgcacagctctcggatggaaatgggactcatgcacaaggcaatccccgctactaagcggtggcgcttctggaaggcaccctctgcctaagtgacagcagctgctgtggaacgcgcccccgggggaggacattagatcaaggtgctttggccacgccgaggcctcctccgcccccgaccgccgttcccacgctccctgtcccatggcgaaggtcgccggtgcccggtattcacctacggcattcgcggctgcagccttcagcacccgcgccattttggaaagcaacccgccacgtcaagactagccacggaggttgagagacgcgcggcagagggcggggcgggaggcagagggggcggggacagaaaggtcaggggcgtggcgaaggtcgctgctttcctgctacaacgggcctactttagctaaaacagaaacgtaaggccaggacgggtcaccctttgtgggcccctgaaaaatacaaaacgaagtttggagagagttgaaaggcgtttgggctgaccatggagatttttgtttcccaccctcctgcgaaagcgctcgcgctgccattggctctggctgagggcgagtccggaacctgtgcgccgcggaactttcggctctgaaatccaagttgcgctgggcgcatctttgccgcgcggtttccgggcggctcccttcccttgcatgctgcattgtgtcgggagttgctgacagccatggcgccgcaggtctggcgtcgacggaccctggagcggtgtctgacggaagtcggcaaagccacgggtcggcccgagtgcttcctcacgtaagtgcgcagatcccgggctcggggtgcgaccggggtctcacgtggacgcgggttgcaggcctccggcaaattgtggagctgggggaaggtaaggggaaacgtaaaatcgcttttccccaaatttcagagtttatgctttcctaggctatcaaaattttaaaaactgttaaaatttgtatagatggatctctcagttgagtgttactgaaatcactctaacctcaattgttaacacctagaagcttcccttgggcttcttacgcccccatccctctacacacagactgttggtttctccttcctcctatgtgctctcaaagcacttagcgcttagcatactttattgaaagtacgaacttgtcacttgtctgtccaccccccatgactaagcttcttcagaaatagaacttccatgtctcttcccaacacaagcgttttatatgtattttgttgaagaatttaaaatgtgatctatgaaattattactcatttatgtttcaaaccccaacctttccctgagttcccagctcacagcaactacagactgagcttagtttgaattccgtagcacacaactgggatatccacactgtacaacttttaacgatttttaaaattttggtactgtcaagcatctcaaattcactgcgtccaaaa

SEQ ID NO: 37423 - DNA, 1849 bp, Homo sapiens
acagattcaatgctgttattatcccttcataggttgggtgtgatcgaatcacactgtgctgtacaactaagtatgttctatattttatgacaaagtagggtagccaggcccttacactacaaactcccagaaaccccagttaagctgtttaaagtataatccaattcaatttactgaaaataatagtaacaaaatttaaatcccttgcttctagttagcccttttcaactgcattttcagcaattaccaccaaaagaactgcattaggacaaagattctagagcgggtataatggtcaaatgccatttgaaggcaaaaacagtctaccaggaacaaaacattaaagttcccaaccttgccaaactccctgttctgcgtattctgcctctctcagttcaccttccagctgcctggaagaggcaagtggaaaatgttagttttctggagagatgagaatggaatttaggggttggtagggggtgatgggctcactcacggaccgcaaggcacaagagaagtggcgaacgtctcccaggcaaatgaggcatgaagaatgagggctggagtcaagggggagatggagcaagtataaaaaggcagaggacgcgcaggggccgcgaataggggaagggcacgacgcgcaatccctcccgctccagcccggggagaggggcgggggatgccgcgcgggtcaatttgcctagcattgttgcacctgggtagaaatgggactcaggccaagaattcggttcgagtgttaggaggacgctgaggggagtcaggaacttgggtgggagtcggggggaaacagagcacctgtgcgggggggaaagggacgaaaaccccctattgctcccgaggggcaggggctgaccccagcggacgccccttttcgccgatggccgcgacgtgggaccccgcgcgctttccctccctacaggagctcgggcaggcgcgtgccgcccttcacagccccgacggcggcagaaagggaggcgcagggcgcccccagagccgggagaacggcgtttccctcgagtcctttccccagcagcccgggcacccgagcccacctgggctaaccagaagcccctccttcagatcgtactctgccactcctccgagagcttaagccgttgccgtagaggtcgccgtcgccacaacagtctcggcctttagtaccaaaacgtgaagcacagcacccgagaagcgccactaccacttgccaggttatctcttactgcacactgcctcctcgccccgcccccgaacccaagccattggttgccgggcaccgccccattcgtctattgggccaaagaagatgccgttcggtcacctagaatggcatatgtggtttttattggtctaaatgtgaagcagtgcccgcccactccctcagaagtttcagcttctgattggttttaatgtctgtcttttctcttccttcattttttttttcctgtggtggaacacctccttgagggagatgccggctctgattggctgaaaggacgctacgctagcctgggataggcattgggccaaggatgcgcccggcccactcgtgggggaggagaccaaggcgccgcactctgggtttgtttacacaggctcttgctcccgcttcgtctattggctgagctggaagccactgccaccgagttttgcctgtcagcctagcaaggaggagggtgggggtgggcctcagtaggatttccctcagctgtcaattaccaaaggaggagctttgattcaggctgctttggacctggtgctattctctgtagggaaaattaaggaattgggctccttgggaggctggaaggaagcaaagggacgctggaag

SEQ ID NO: 37424 - DNA, 627 bp, Homo sapiens
ctccgcgtccattggctggcctcgggggtgggcgggtcccgccgcacggagtcctgcgccttgaggctcaagcggcggcgtgcaaggcgtgtgaggcgcgtagagagccgcgcgcgccgtctgcgatgccccgggacggcgttcctgccgggaataccaccccggcggcagcccaggctgccgcgcagagcccggattccgcgactgccggggcaccgcaggttttggactcgctgaagcggtgagctctgcctttgccctatatgccgcgctctcgcccgtgctctggggcagttggcagtgggtgggcaggaaggggcgggccggcagggcgtcgcacgttggcgtccccgcgtcgcgggaatggggttcggattccccccgtgaatgtcattccccaggctaccggtctttagcgctaagttgcatgggctggtgtgccagtcggtcagcgaatagcggcagaacgcctggccgggccggcgttttccgggacactcgtttcggcctcgcagtggcagcgcctcctgcgagcctagaccggctcagtggacgcgccgcgctgtgcacgcgggtctggggagacggcggttcttgaatgatccctcacactgcagggtatctggg

SEQ ID NO: 37425 - DNA, 706 bp, Homo sapiens
tttctcagggagttaatccactctctctcccctactgcaagatcccgctgcagtggtcctaaaaaagaaaaagaaaaagaaatttctcatactacagaagaataaagtagccacgctctgtgttttgaatcaattttcaaggattttttttccactttgcttaggcgttctttcacccacaactacacccccaggttccagattttggaatggtgtaaataacgccccccggcgcccatccacttagcggaaggaaagtcagccactaggctgcgggctccgggctgtccccagcgtgggagaggctgtcctgctggcccggctgtttattgcagcgatttggatgttccaagagtcacaagggacactgctcacgtccccatctagggggtcacttcatagcagcatcagctctttcttttcatccttcttgcttgagtctgcctccggtcctctggatggagcaggctacaacggacgctcggagtaatgaagtgaattgctctttcttgatacaaatgaatactagtgctgtactgccttctcccaatctttgtggcgtttgtgtgagctgctgagagcaggcagtggagagaatgatagacattttgcagaagcggaacgctctagtgttatgtcatccttcttggctctggtttctaggtccaagttctggtgacattgtttcagcttgctttgccctttc

SEQ ID NO: 37426 - DNA, 1521 bp, Homo sapiens
agctgggactacaggcgcgcgccaccggctattttttgtgtttttagtaacggggtttcaccctgttggccgggctggtctcgaactcctgacctcagatgatccacccacctcggtctcccaaagtgctgggattacaggcgtgaaccaccgcgcctggccatataatgttattattgaaggcacaaatgatcagggaagacttcatgaaggaggtgagacaatataggtcttaaaaggatgagcggtttggagaggacaggcacagaaccagcaaaagagtgaagacggcgctggagtttttttttttttttgccgcacgccttcgccgccaccacgcgggagcgccccttccgggagcccgctccgcccggctcttctcgggcttcgggcgagcgcggtgccagcggtacgcaggcgccgggagcctacgagggctcgcaggagctgggaggcgcgcatgcgtgcagctctttggaggcggtagcgttttcggcgtcgagactggaggctgagtgctaaactgtgtggggcgcggatgggatccagctgttagtcgggtaggcataggtaggaccgctgccctgtggggagtagggggttggaaggcggaggccggtatcgtgggggtcctgagcccttcctgtgagatccgggccgactattgtatctgtgtcgcagcggctccgcacaaaatggcggcgggcagacggcgggggcgggaggaggttgggggacccccgggatgggaagggaagctgtgctgtgctgccctgctccgtcgtttattcacttcgctacccgggagggcccgtccgggtactcgtgaaggaccctgcctcgagaagagctgcctgacgccgttgcactgggccgaggatcgtgaagagccctttggcgaggccgaggcggccccttccccagcagcgcccggcctgccgaggctgcgctgggcctgacagccgaggaagcggtggtgagggaatgccgagcagggaggaagcgttcccgtcgggcccgaagaggcggtggagtttgagccgagccctctgaccagcgacattgtgcaagaagcgtggagagaagagcgtgtttgtgtttggggttggggagggggtgtcgggatgaaggagggaatgttaggatccagcggcttttccgggctggtgttctgtgctgcgtagtgcaggtatgaaaccaaagaaaatatcacctctgtgggagactgaggactcataaatggttgtgatacctaacagtatttccaaatttctcagaggaattgtgaaaacagaacgttagtgaattgtttttgtgtgattcttagcttgggccccgttctcttaaaggaagggggaatgtatatatcacagactggaatccttgagaacgtttgaaatagatcttttgttgtttgaggtaattgttaatgagggatacttcagtattacaaaatcatggattgagctatagagtgaaggctacctgaagctaatttttcttaatcttaaaatttgtcct

SEQ ID NO: 37427 - DNA, 725 bp, Homo sapiens
tgttagcaagcagtgggaccagagttatttcacaggatgaaataggcttggattaaccagcttgctcagggtaacattgttagcaagcagcaggaccagagttaaaacactgaatgtagggtctaagttcttaaagactgtgctgcactacctctctaaagctgaattagtagtgctaaattttacttaaggagttaactaattttgcatgaagtcattcactggcacccctcctagcagggtgggtatcttcagatcagtggaaatttccccaaagattagattattatggattgcataataggctgactaacagtcaatagttaggaagtgaacatgatgtagaaaagaagggccaaatccaaaaatgtgtttaaggctgatgctctttattatactgcaggttttctgcctcttgccatattgcctatagttttttttttttttttgactttgtataaagtaagaagatcacatagtccaatgttggacatgaaatgttgtgccattaactatatttgaatgaatttaagtgacaggtggtgggggagttccctgtctcctgcatatatggttttttcccgaaaagtttgacattaagttgcatatattgtggtcctttatctctaaatacttcagtgtgtatttcctaaaaatattttctttcacagtcatagttaccaacttcaatgaatttcacgtttataaaatccttttttattttt

SEQ ID NO: 37428 - DNA, 1033 bp, Homo sapiens
acagagttttaacttcaaggggtagagagagaaagaccacaaataagttaaaaatgcatatgtattatgtttgttttcaacaagtgctatggtaaaaaaaaattaggaaaggggaatagaagtactcttgttggggaatgaagagctgtgcaactttcagtaagttagttggggaagatctcattgaaaaggtgatatatgagcaaacatttgaagaagatgagggaacaaaccacgtcctggattgagagcattccagacagaaggaatagcacctgtcaaacctatacctttgtagcatcttagaggagtagaaaggatgcttggggatggagtgaagaagtataggaaggaagtgtattgtggtttgggagttagaaggtaggtagaacatacgttgtaaacttttagaggccattgttaagtactggctttttttccttgagtctaatgagaggttttgagttgtggaacagcaggttcagtctgggtttatgttgtgaatagagagtgagtgaatggcaaggactgaagcagagaccattacgaggcgattgtagtaatcaaagcaaaaggtagtagtagattagaccagggtgatagcagttgaactttagacatttgagatgtcacagtgctatgagaaaccatgtttttgaaagttacagtagttcccgtttatctgaggcttggctttgcagtttcagtggtcagttgtggtttgaaaatattgaatagaaaattccagaaataaacaacatgttttaaactgtgccctgttctgagttagcatgatgaaatttcatgcagtccaactccagcccactggggctgtgagtcattgctttgtctagagtatccacattttatatgctacctgcccactagtcacttaatagctgtcttggttatcagattgaccgtcactgtattgcagtgcttgtgtttaaccctcattttacttaataatggccctaaagtgcaagtatggtgatgctggcaatttggatatgccaaagagaaggggaaaaat

SEQ ID NO: 37429 - DNA, 514 bp, Homo sapiens
ttaagtcagttattttcccaataaaagccctttgctcacctgtgggaactcccacatgtgagttccaccaaatctttcagaaagcaatatcgatttcagctataccatggcattcaggagaagggaaagcttcctgtaaaaggggaaatgagaaaaggtgggggaacaggctaatacatcaaatactgacaaagacactacacacctatcagaatggctaaaataaaaaatactgatagcaccaaatgctgatgagtatgtagagaaactcatacattgtgtgcaagagcaattgtgaaatagtacagccattctagaaaagagtatgacagtttaacttaacaaaactaaacacatgcttaccatatgacatcacttacactcttgggcactcatcccagagaaatgaaaacttagctcatacaagggcctatacacgagtatttatgggtactttgtttataattgccccaaactggaaacaacccaaatgttcttcagtggatgaatggct

SEQ ID NO: 37430 - DNA, 692 bp, Homo sapiens
agatgacttttaaacatatgaagacggatacaactacacttataattaaagaaaaaaaaatcctaccagtttccatttcacattgggaaggttgatcatttcagttaaccatgttaggtttttgtaggagattggtcagggtggtgggaaaagttataaggagagacgcaaaccttcttggaagtcctgggaggttttgcaaagcttcgggagagaataaaggctgaaggcagctaaattctcttaccctgaggctaagggcaagtagtaggtaacaaaggagtgtaaaggaatttatctagataagtttatttacttttgccgacctttgatcatccgacctttgatcatccgacctttgatcatctgacctttgatcatctgacctttgatcatccgacctttgatcatctgacctttgatcatccgcgtgcaggactgctccctacaggcgggggcaacaactacccacagattgtgttggctccaggcctttgtcattaaatctgtactaaataaatacaagcagctccagcttattggggctgcgttctctcttcggcgtctctaaggccgagcagtttcctagctgcgctcacgcaaaatacctgtgtctgcgtacttttttcatccgtcgctcggccagagtcggtggatcagactcagcagctggtgcccctcgtgaggaacac

SEQ ID NO: 37431 - DNA, 2034 bp, Homo sapiens
ctacagaaggaccctaagtgaccacaggaaatgtttgctaccctaatcttgaaattacagacctttttttggggagtgttgctctcttctagtatctccctatggggaaaaaaatcagccacctgtcagcggccagcccatcctgccctgggtgtgtctactgcccccaggggctgctgtgggagttttgctgacagctgcacacccatccaactggccctctttagagggtgagtcaacaggctgccgggagtgtggatctatctgcaggaaggcagtttagcaataggtactagaacctaaaaaaaagtcatatcctgtgaccttacaatctaatctgaagaactgggtggggggagggggagggctaagatgagtttatatcttttttattaaaaagaaactccctttctcactattatagtagaatctggggagagcctaaatgtgaaacaagagaaagtttgtgaatctagtacattcatatgacagacaattatatagctattgaaaatagtgtttatgaataattgtttaatgatgtaagatgttacatgaaaacgtgggacacagactgcattctacactcagatatataataaatactgcaatttacatgtgtgtatacattcagaggagaaagcctgggctgccaaatacccaaatgttaatatactattttttcagaaccagagatttctttctttatgctttttgttttaaaatggcatgtgttgcttttaaagccagaaaaagggggcaaagtttttaaggcagctgccttgcttgtcaatgaaattctcaactccaggcttctcttagggaaagaggcctccccaggatcccccgtcctaccccgggcggtcgggttgagttctggagagactgctccaatccccgaggcggaaggaggcaaccgatttggcgcagcactcagccagggggtagaagctcaggggaggagccgagcctttctcctgtccaagagcgagatctgggctacgccgggcgcccggagccctagtccagcccccggccatcgcggccgccgcccagccaggtgcaaaatgccgtgtcattgggagactccgcagccggagcattagattacagctcgacggagctcgggaagggcggcgggggtggaagatgagcagaagcccctgttctcggaacgccggctgacaagcggggtgagcgcagccggggcggggacccagcctagcccactggagcagccgggggtggcccgttcccctttaagagcaactgctctaagccaggagccagagattcgagccggcctcgcccagccagccctctccagcgaggggacccacaagcggcgcctcggccctcccgacctttccgagccctctttgcgccctgggcgcacggggccctacacgcgccaagcatgctgagggtcttcatcctctatgccgagaacgtccacacacccgacaccgacatcagcgatgcctactgctccgcggtgtttgcaggtaggaggggccgaccaccctcgcccggggtcggggtggggtagaggaggggacgccgcggctctcaaccctggagagcacctagagctgagagacaggagactttctggccccgccagactgacgttgagtgttgcaacgacacaggtctgcagagggcgactcagagggaaactgaggctggaaggagagaggtgtctgaatggcgcttctcctggaagcttcagcccaggttggtactgaggtaggccaggaaggtgggaccagcatctctcctctcaccttttcgggatctctgaaaagaggtctttctgcgttgccggcggcgaagcgctgtactgcagggctctcctccttctcccctgaaggtctggtcccaggcctatttataacccagctctcttcccgccccgatctgcgcctggctgctttcctggccctttgctctctctcagaggctggcctggcaggctggcagccactggaggcgaaggcaccctacccttgctttgcgcacaggatgggggaa

SEQ ID NO: 37432 - DNA, 1179 bp, Homo sapiens
tacctcatggtccctcacccaggctaggctcagacctctggttggagaaaggaaagaatgaataataaatggcaggcactttctaaccccagaagtgcaggaagtgctgctggtgtggcttttcttttgttatttcagccccaagggcctgtgtgtggagcagctccccccatcctgcatcctcccatttacacatccctggctgaatcctctccccacccccatctgctttttgcctgctgcctggctcttcggggtaggctccccctttccagggcccagagcacacagctcaccttggggaaaggaagtacattttctgtgccaatccgtcatgagcccctgagcctaggaagagactggctggagcccccacccctggtcatcactgaaaccgccaggcagtcctggggaatgcagtccctcccctcccccagcccctggccacatttcacgtcctgcattagccaagctcctaacccatgtccaaatttggcctccctgtgacattcaggcctgctcgctctccttctccctggcagggtcagcttggtgaatgattacacagaagacttcggtctcagggatgcagctcaaagcaaaacaccagtctgggaagccttccctccccagctgggctgggtctgctcttcccagactctatctgttgtcccataaagcccctcctttggttacatgattataataccctgtagccacacttcacagcccctttgtgcatgtatacattcattgcaagctcacagaagctttgtgaggtagagggcaaagatattatccccccttaaagataaggatattggcccagagaagtgaaggagcctggccaaggtcacatagtggccacagcatccccacccccaacccctcatcagtgccctctgttgttctcagtatccttggtgcatgaataagaaagtgctctggagagcataccatatgctgcccacacccagggcaccagggcactcggacctgagccagccagggagggtggtgcctggggtccccagcaagaagctgagtcagagtagggggagtgcagggctgcaggagcatggtgtgaaacaattgaccaaaagatggaggattctggggtttcaaatgcgtgttcctcacaaacagagggaatggacatttgctaagcacaaaagcata

SEQ ID NO: 37433 - DNA, 1243 bp, Homo sapiens
cgggagaggaccggctccctggcgcagatcatggggcaggtggagagaggcgagaggcaatgaggcggggggctcggggtgcacggcacgctccgcacactcccccttcagcgctcactcagacttggtttccccgaagacacactctcgtccccgccgctgattgcccactccttccgcctgcactcctgcctccttctcaccctttcgtcgagcgcacagggcggctgccaagtcggcaccggtgcgcaccgggcccgggatccctggctggtgtggagccttggtcaccggaggcccccgcggagcaggccccacggcgccttgtgcgctctcggaggccgagctgcgcgcccgcgtcagcggcgcctcgttcctggccgggagctgggacccgcggagctagggaccagcacccccacaggcgcccgtctgacccctgtccctccccgcccgccgcgggcagggcggatctgggtaggggccggagggggagggtccgcccagcgggtgtccggtgtcctccctgcagcctctcccaggcattggtcacttctccgcggaggagcagcgaaggcgacagctctcttggcgcggctgcctgggagccgggcgcttgctgggtgggtgctcgggcccggtgctcccgctcccgccctgactgcgcgcctgtgtgccgccggggctgcccagccatgctgtgctgcctgctggtgagggccagcaacctccccagtgcgaagaaggaccggcgcagcgaccctgtcgcaagcctgactttccgaggtgagagccccgtggctgccgcgcccatgctcgggtgctacccgactctcggcgctcactggcgggtctgaagcccctgctccggagctaaccctagtccaggccacagtttctccctttgtcagcagggacggaaatcccagccccgacttctgcaggggggcgatgaggaataagcagagcacaataaatgccacagggctttgaaaaattggaaaagcgaaagtgccgtaggtcagcggttatcacttttctaagactgacacccagaggaaataaagtccgagcttttactgggtagtggggataagggtaagttggaagatgggtgcagaaggtagagaggaatcagggcctctgaaaaacggggcgtgtagatgatgtgctttgaaagttgtgtcttttttcattcattcattcattcattcacccatctttatccaacattggctgtatt

SEQ ID NO: 37434 - DNA, 645 bp, Homo sapiens
gcacagatgctgtgagtcatggtgccagcacataggttgcatgttatggtaatgaagctacaggtctcctggggtgcaggctttagcatggtcatgaggaaagttcattggggttcatctgtaagttgccgggctctgtcaggagctggttttagcccactagatgaccgcctactacacagagcttgaaaaaaacaggctgtaagacagaaagctgtaaagcaggcagattgctcaatctccctacctgcttacagaaggctgatggtgacattaatgtatgagtgtaattttttggtagggcattgtgaaatgtgtcaacatctgggaagatctacgtaactgactgaacaaaaattttccaaatgaccaatgcaactgttacagaatcatacgtgggtgaaagattcattcaaactgcaagatagaacaatgaattttaatgtagcagagtacaaaatgttcattgatctggtttcagatttcacattgcaacttactgttaagaagttaagaactactacttgttgagttttgatgtagtatcaaagaaggatattcacagttatctgaaagtgtattaaaataggcctccctttccaactacatatctggttggattttcttcatagacatcaatcaaaa

SEQ ID NO: 37435 - DNA, 1402 bp, Homo sapiens
tcttatggcgtgtctcattctgcctgtccctctcttttagcctgcttgcatgtcccttttctctctttacaccctaagctgaagagccctgaggttacattctgtgtacccacccaccccagctggccttctttgcatttccccttatggacacctggtggcagtattatccaagatgtgaaccatacttgatttggccaagttcctaagaagataggagtgtgggagagtgtgtgcgactgtgcacttcatggtatggaagaaagaaaaggtcctgccctacttgtagggcaggacaggaagatttaaaacaacttttttttttctgaattcaagaataaaacccattaattgcaaaaaattgaaaaaaatcagagacaaggaaaacaacaaaaactcccactgcaccatattctgtaccctgcaccaccctggagagaattactgataacattggtttgtattacctaccctgttacctcccctcttcccacttgctgggaaaaaatcatgaaaatattgattttccttattcaaggattctgtatttgccaatttgcctactcactaaaatgtatttgcaagcccaaaatcaacactcatggcactttagtgatgatttgtggacactttcagggctttgaaaaatttgagtctcccagcgtgtatgttggttgctgaggttgaacaaggtgactctctgcctccccgctccaactctcatggagtaaacatgacatgtccatgatcaaaggacatgtatttactccacgagagttgaaacagggaggcagagagtctcaaaacatggtactgcacaggacacgtatcaaaggacacagacaaaatgtgtgtcctttgatatgtgtcctgtgtagtctcatgtttttcacatttttgtgccttttcttggcgacttcgctgtttaaaatggccccaaatgtcgtgctgaagtgctgtctggcgttcctcagctcagaaaggctgtgatgtgttttatggaggaagtgcgtgtgataggtaagcttctggcaggcttgagtcacagtgccgttggctgtgagttcaatgctgatgactcagcaatgtatattaaaaagtaaggtgtccttcaacagaagcacacataaaccaaggttacgtattgatcagttgacaaaaacattgtgacagaggctgccaggaatttaaccctgcttcttctctgaggtaatgagtcagcattcactaattcagggttcatggtgaccttatagatcataactaccatgaataatgagaatcaactatatacatgcagtttggtaaactgcttgtgttgtctcatcttttcttaggttattaaagagtcattgaaatgattttttttgatggctgcataatattctgtcagatgagtata

SEQ ID NO: 37436 - DNA, 1034 bp, Homo sapiens
agcagggaggagtcagaagccatcaagttctgcccaagtctgcagacaccccctgagctcctcatgactacatgtgaggctggagttacaggcatgagactggatgtatttgggcgtggggagccttggaaggttcttgagccaggatagaccctggtttgttgggcctggactctgccttctttgctctaactgttcactcctttttggttcagtagcagtgacaaggcctgggggttgggtccagcatgcaccctctgccctgtggtgacacacctgacccttgcctgcccattccacaggaagctggcctggagcaggtccacctggccctgaaggcgcagtgctccacggaggacgtggactcgctggtggctcagctgacggatgagctcatcgcaggctgcaggtaggggggacctggcgcccctggtgcccacctctcctggctcaactgggcctgtttcgctgggagtgctcgtgtgtggcagtgagcagtggcacgtctcccagccacgcttggccagcagtccagcccgtgctgagtccaaaggtggtggagccagtgcaggagttgaaaaggtgacattgagagcaggtcataaatctccctgcagcagcggcagctgcgggcccggcggccggctcacctgaatggggagcattgtgtctctgatccccgacctcttatttccctgatggaatctccaggaggagctggctggggggtggggtgacggcgcccctcattccctcaaggccatgtcggggatcatggtttctgtttagctttctattgacatggctgattgttgacttcaggaaaaaagggcccggggtgtggaggcccagcagaggggtgcatctcacatctcctctgctgccatgtggttttggggagccacccatgggttttgacccttggttttctcaacttcaacctggcatgaagaataactactttataatatcttctaaacaaagtgcctggcccttgggaaggatttaataaatggtagctataattattgctc

SEQ ID NO: 37437 - DNA, 898 bp, Homo sapiens
ttctgtgtgtgctgccctcaaaatgtctacacactcagatggggagggactattttaggtcctgctggccacaagcacagccagaggcagacgatgaggaggcccagcctggccatcctcccggcgttgacatgagggaactggggctgggatctgagccagagctgggcctgtgctgtttgtgggagcacacggccactctggctagagctgctggccagaccagcagcactggtgggagctgggatggggctcctggaggtgtacccacctggggaggggctgggcctcccctggcctgggacaggggaggaggaggaaatgacactgatttgctctgatgggggaggcttggaccttgccctcatggagctccctgtctgatgaaagagacaaaactctgttctcaaaagcctcaaacccagcagggagaccagttctgttctgcagggagccctggccctctggggaagccccttttctggtatctgactttgttccatgtttttctctgagatctattgctctgatttggctgatccaggaaatctttcactcactcgcctctcctccctgtccctggcactctgaaggacaggcgctccaaggccaacccaggaggcagctgaccccgggtgcagttccagtggtttgctagataactatggctgggctttcttcctctccctccttccccagtgcagatagcatgaagggccctggcttctggggacaggagggacgagaggtctggcagaatctggattttggctggcttctgtctgccccaccggtgtttctcggcagcctgttccatcctcacagttgatgcagccctggctggtgctggatgtgttcactgtgtcctggctgtggtcctaggacccctcctagctca

SEQ ID NO: 37438 - DNA, 989 bp, Homo sapiens
cagctcatctggggaaagagataacctctgttatccacctcagggcacagccacgcttcctccatcaaagtggcacttccaggagacgctggcagagcatcggtttgtctgcagacttctcctgagccttggggtccatcgtcaccgaggcccctcaagcccctcccctccaggcctctggatatcacttcctttgggaacaggagatgctagccgatttgggaaatgctcactgcagaggagtctggcactgtgtccgggtcggcaaggctatatttaaccagctatatttgctgtcccactcacttgtcccaacccggccccgcccgccacccctccccctcagcagcctgtcctgtcccactggggccgcgccgtccttgctcaccctgctccagctgtgcaattgtggtctgggccacaggctattttttgcttggtgccaaagattattcagttatcaggaatgtgtgtttaagtggccgtctccggaacaaggattataaataggaacttggggtcaaggcctgggccccagtgtcctcctctttgtcccagttcctgtcctggctccaggattttacttggggtgaacaccatgaggccatggtgaggttgtctggaggagaggaccccagggtgggaggccagaggtccaggactaagaacacttctgacaggcaagtcacctgatgtctctgggacttgctttctccatctgggcaatggggagactcaggctcattcactgaatggcaaacaggaaatagatgggcaagaactagtcttgggagtaaatgcgtaacagttcaatttgctttttgggagctcctggtcttttggtgggactgtgcctaggtttgatctcagcattaagtggcctaagcaggatgaagtgggcatatttggtcacaggcacccaagatgaggctaaatctttctcctacaagatgagggctgcttcccaaggtgccagttatcacggagaa

SEQ ID NO: 37439 - DNA, 1133 bp, Homo sapiens
agaccagcctgggaaaaagggagatcctatctctacaaaaaatttaaaattagcctggtatggtggcacacacttgtgatttcagctacacgggaggctgaggcaggaggattgcttaagtccagaagtttgagggtgcagtgagctgtgactgcaccactgcactccagcctgaatgagacacagcaagagacctgaccctgtctcaaaaaaaaaaaaaaaaagagtgtcacagagatgagctcaaggcagcagcatttatggtgactggatttgatctttatttgaggggagccagagggaggcacagaacttttggggggcccaggagatattgcagagttcacggtttacagcagggaggtgctgagggcctggagacaggttctcagtaccctaaggtgaagcctttgatcaggaaaacatctcttcccaaggccaaagtccttgggctgtctatggcacacacatgcggaaggccagggcacatttgcctcagctcaaaacatacaactcactacatgaacagctcaactgaactaggccctttgatttatgtgtttacattcccaaagggaaactttctttacctgagggactcttggctgggttcctttcatgatgagaacaggacatgaaactttgtttatggagaggtagtactccaagccggggtggaagccggcccttaaagtttggggctgggcagccctgataaccaccaggtggggaattttgtctctgagctttctgtccctgatgtctcagcctgggcacccagcaggactccctggtgtcagcaacatgagtgacagatgaatcattcattcctgaggcgctcagatgagtcactggagaagcagtgtcacctttccaaaatttaactttccagcaacttcaggaattcagcagtcgtgtagagagagggatgcctgcagttcgatttttgtcccttcccaccacccttttcacctgcttgatggtgcagggtggggaggacgggcaggacactgcaaacagcttttagctgggtgaagatgaaggagaactttcttgcttatggccacccaaaatagatccaaatgcagttctttctctccccagcagaagggagtgaggctagactttgggga

SEQ ID NO: 37440 - DNA, 1608 bp, Homo sapiens
cttccttccttctatcgacctgcaacttttagagacctgctaggggtcagattgtttgcttacgcccagggcttttgtagttcagaggctcccacattcagagtgagacagctggactgaggcagtgagaaggagagggccctgggggaagagcaaaggtacagttgtataggaatggtcagccatgagacacacccttgactccacgtgtcctcattcctgccactaaagaataaaaatcccagtcagttacaacggcagcaatcgaaatccagcttctgatgtgagatctcaccagggcccccagaggttcaaccaaagggaggaggcacagggcaaagcccaggcagagattcctcacgctcctcccccgactgccattaagaagattcttttataagaagatcaatctaaccttcagaaattgagggaaagatagaccatccagtggcacattgtgtgattcaggttcttagtcaaaaggagcttagaagcctgggagcctccccagaagaggtcagaggtgatctgtgagatgaatatgagtcctgaacaagctgaggataaaccacgaggagaagagagagtgcttcggggaggggagaatgcagacaaagtttgggaggtaggaaggagcccagcctgctctggagatggagaggagccaggcctgggtagaaggcaggtgtgtaagccccgaggagagagtgatggataggctggtgaggaaacagcagatttcaggggcctgcatcagatgcatttgtaggacactctcttggaatttttctggagaggtagggaatctgggtctgcgtgtatttttagcctgtcttttctgccctcttctgagcaatgattctaagagctttcagcctgaggtcatctgttttcctagtgcctgttccagggaagcagatgccagcaccactacctcacacagaggctgctgccgccccagcgctgaccccaggagagcgacgtgtccactgcaccacgggagcaggctgtaggaggctgccccatgggaggctccacagtcccgagctctgccagaatgtcacccttctgttctggcatgaccctagaggagagtttctttgaggtccatgggaagccccagatgcctgtccccatttccttcagggccaatatgggcacccctcaggctggaaggctgtggaaggacgcgggttgtgggatccagccctcaggattgcaaatgtctgcctcaaccttgtttcccgggaattctgcccttcctgtctgtcttgttaccttccagctccctgcctctccatcgccatttcctacctctctgccagcaaagcaggggcaggttattttctaagactctgctttctccatttaggaatctatagtgcacacaacggctcctagaggagagttcatttgctccctcgctacaacccagtctaaagcttcttttctgtgctctaggttcatgttttcaagtcctcagtggacatgactactggagaatcatgacccaaaacaattcacagtcttccctccagaatgtaactcctttcggccatcttgtttatgtcagggatgcctccagtctcctcccaggctgagcccctg

SEQ ID NO: 37441 - DNA, 1438 bp, Homo sapiens
gagaggtctcagcagggtggagacagaacctgactgcaccaggcccctcctgacctggggttttctcgctgaagcagagaaggtagactgcagccctttggctagatattggggagaccaggaatatggataaaatgagagaaggttttgggaacatcagagtggccccaaagaagggaatccctgaacccaaaccagctgcccagctactgctggtagcccaggttctgaggctgaggaatggggaagccccatccccactcttcagcacccagttgattggaagagggaggaagctggcagctggggaaaggtcttgggccaaacatttttccactggtgaatcagaggacagcagtaacaggagccaggctggcctgaccccagccacctctgtgagtcatagctgaggtccctgtgctaatcttaacccctcagagaggacttgttgggacttgccaccaaatcttgaccaccaaaatagtcttggagctgacgtggccctggaaagccctggcccatcacagaaggggtcagagaatggagccagggtagagagggctggtctgggagttaggctgtgccccagctctcccgtgaccttgagcaactcacagtgaagtgttagcaagatgggctcccaggtcccttccagacattctcccagaccagagccaaactgggtctgagaaggaaggaaccaggacctgaggcagcagaaggttttcaggccaggtctggccctgccctcatcacagttgctcaccaaggtcctcgccttttacagtgcacagctagtgacagcaaccttggttctggggccagctgcatccaaaatttgttctgggatttttgacaagttgcttcacaaatctcctttctacagggaaggcagtacagctagtggtttaaggcactggactttgaagtcagactaacccaggtgagaatcacttagtcgctgggtgtcctggggcaagtcatttaaatgttcagcaaatttcagctgctatcattaccagctagtatgtctggtcctcaattatgtccttctataaaaaaaagaggatagcaagaatgatttctaagtccctttctctagctgtccttttctctaatcaggtccttgaccctgcacaatcaattcagggactgggaccttgtggcaaatgagagaacaatgagttgaggaaacatctctgggactacagaaaagggatttaagatgcaacacagggactgtggtgaaacagaggtgagctctggaaaggcttggtgcaggagcaggagccaggccaagttctgaagctcagtgcagggggctgaggctcgggtctgggagactggaacctgagccctgatggctgggaggaagccttctccccagctcaggctgagcctcaggtttccactgcattctgagcagaagaatctttct

SEQ ID NO: 37442 - DNA, 2182 bp, Homo sapiens
tgctgagtctggagcacctcacgcgggtgggcctgttagacttcctcctcccagtcaggagagtccaggagcactcagacgtcctgggtgcctggcaggggagacaagtccaatggatctgggatgcagggtgctggtggcacagtgaagacacaatggacattgtttatagtgttgccaaaggctggagactgcagaggccgctaaggagtggagagtggaggagaaaactacaattaaatggcaaccccagcgccgtctcaattcctgccctgatagggaggagagggcagagctaatatggaaagggtaggaagggacagggcaatcccttgacagagagagctttgactcaggggtcaagggaacagctgtggaagcctcgggcacatctggctggggctgggctggaagagggtgagcctgtggctggcagggagccagggatgtggtagagacagatagggcctgtgtttactgtccagctgaggtgttgcaacaggaagctggctgggggtggcagggaggaggctgctcaggcggaaactatttatctgaaacagaaggaacagctggggagggaggccaggcgcagcagccagctttccaaggccacgcaggatgcccgtgccatggcagcgagccaccctatctcctgcccagcctgcctgcctcgctgcacatccagccctgctgtccttgtccagagcagagccagctgaccagtcgtccccattcctagtccccagctggggctgtgcttcccagtgggatgccccaccagactgcaggtttggcctgtggctgactacgctgtgaggatccaccatgtgccaggcattgtgagataggtgtgcgtgttctccagtttccaaaggtgaaaacagagggcataagggatttgtccaggaccacacaagaagttagcattgtggaagaaactgcaacccaagtctgtcatatttacagaatcgctcaggtgttcctgcacacgtggaggtgggctgtgggcctgcccttggccctgtgggactcaccttcatccagctcacagcccaccacctgagaaatcagcagaccccacaaacaccccctcccaccaggaaatgatccctctcctaagtctctgcacccacagctgggcacatgggaacaacagcagcctctgagcaaagatttcctatcacaaccaggtaagaggacccagtctggcagaaatctcctggaactctccctcacctctacggagggatctccagaatgatttggaagcctaggaaaaccgtgaatgctgacttccctcctgaaggaggcccggagaaggtgggagcataaaggagcaaagtggccccctcttaggaagacctctggatttccgtccagttttgagacagtgaagaagaggcagggggagccctaccaaagcaggacaggcttcacctcatccccactttaatacccatcacggaatggaggctccagccccacattcagttgattctcagggaatgtcatttcccacctggagggatgttgcattgcccatctcactttgtgccccagctgacactgggacctacctcctccaggtcagggtcttcgcctcctacctctctgtatccattcatggaagggggatgaaatcaacaagaatggaacatctagtatgtgtcccttcatgggccaagcactgtcactttcagtccttgcacactcctatgaagcaaatgtggccacctccagttttcagatgaagaaactgaatctcagagacaaagggactggctcaagttcaaataatgagtcagcagctggcttaatttcaatggttgcgtactgcacacatatttcatgtctgtgtgttggtaaagataagtgaagttatgccacataacaaatagtccctacatcttaacaacaaaggtttatcttcctctcactgaaaatctgcagcagtactcttcagggcaagtatctttcaaacttgtttggggctggcttaatctggggctttgtcatctcatcagaagacttctcattcactggggtgggtgatgagactgttcactgatgaactggtcagaactagccacatggccctgctctacctgcaggggagcaggacaaatgggggaacagacggaatgctggtgggcatgtggagtatctgccacggccatgg

SEQ ID NO: 37443 - DNA, 1194 bp, Homo sapiens
ctgtatcgagcaagcaccaattacccatacaaattagcagtgaactggatgccaggaatgctgatgcctttctcaaaaagccccagcctgggcaccaaccatgggcatactgcctccagaagactgcttcccatgagccacacctctggggaacagtcactggaacagcagggggccaactgatccaacgtccatgttattgctcaacagcagcccgcggcatatggtgacgggaaatgggctcacagttcagccaaagggctgctgtctttgatgatgcaacaactgccttatctgtgacatggcaatctagagggttcagaaggggagctcttccaccctcagcaacctctgttgctcaagccagaaatctgggagctgcccctaactccttccccccaagtcctgcccccagcaggagtcctgtgggtcacttgccatgtctgcctctctctgtgggcccagcctgggcttggtcagtcctcatcatcatgcccaaccccctttaggagggcatttgccttcattgccaggggcaggaggcctgctagttggggggaggaggggcaggttggggatggccatgggcctgtccccctaccaggaggccctcaggttgactgtaggtgacctgggcaggtgtggccaggtggttgtaaagacactggagggggtgaggaccatcttatggcctgggggtggaaagactgtggctgctgctgcctctctggggatgatctccacatagtcacatagcactaatggggaccattcagtctcagactgacttccctgatctgggcagcagagactctggctataaaattcctgttttatgaggttctctgggaagccaaaactcccctggcaggcctaccagggcagccccagaggagctctgcagaggaagcctcgctgccaggacacattgcatcttagtcacgctacgaacaactcagttctcaaaagcccaaacacccagccggctgtcacagatctcagaggaggtctctggcttcattatgaagggctgaccatgaataatgaccccaagatccggctcccgttgacccaggcacagtaagagaaacagggtgcaggggaaagtcagtgcaagtccaagtctccgcctccattcttcgtcagtcccctaaaagtccccctagtagacctgagagagggcagtgcactgac

SEQ ID NO: 37444 - DNA, 1177 bp, Homo sapiens
tcctctctagccccagttggcagggcttaactggacactccctctgtctgaggccagtccccaccgggaacctggccaaaccgtctgaggccaggacgcatggacaaaacaacccaggccacctctgcctccaccctatggtgtgcacatctcccctggccagagcactgcccaagaggaggcatcatgttctcccacaactccagggctgggacattctcgggccaagagccaggagagtccagcgcagcaggcacctatgctgacactcatttggtccaaactcttcattttgttggggcaactgtggtcctggaaggggcagtggctaactgtctcaggctctccaacagcccagaagctctctgcaaggcccaggggtccccctgattgctgtagcaggatcccacatcccttcttcttggggaaatgatagagttggttacatgtgctttgtcatcaactctatttgaaaactgtgaaaggatccgagctgcttgggaagaggcagagggaggccagtaatagtttagtcttaacaaaataaaattttatgttccttaaatacatgaagtcacccagaacggccattaacaaagtgtggtcaaggaaaggtactggctgcctcagagatgaggtcagagttcacttgtgattggcatgctaactgctcccatgcaaccgggtgttgccaaagggcacagcactccctctgccatctggaacacaacacttgcccggaggccagtagctcctgttattattatcttgttcccactaggagtttgttcagcacatgttcccatcagcagggtccaattcctctctggccttgtaaaagcatcacaaattctaaattagaggtgtctgagctaacgagggcctctccctactcttcttaagtttcttccattgtgtgtttctcatccccaccaccgtctcccggctagatctttaattccacagagacagggaccatgtcttctatttcatccattcaacaagtattgattgaccacctgccatgggttgtaccaggtgctttggggaatacaaaacatgagaaagccacgtctctgccctcaagaaagagacgatggctctgagtgactgcgttgccttgctttgtgtagccatcagtatttttaatgctattttagactctagctcctttaat

SEQ ID NO: 37445 - DNA, 1054 bp, Homo sapiens
aagagacttgctcagtgcagggttaccaaaaaccttccatttgtaaaaaacgcagtatctgggaggcataataaagtgaagcgtaataaaacgaggtatggccttttgcagttataaagtgtgaaaatgctaagagcgattctaaagggggtctcactgaaatgatccttaaggaagtgacatttaagcgcgattgaaagaaagagaaggagttaagagggaaagcgtcttcctggtggaggagagtgcatagagaggcaggagcctgcaagagctttctaccttccagcaactgaaagaagagcaatgcactgagagcatgggggcggggtagggcaaaaagccagggcagggaggtggtggccagatcatctgggccatcgggaggccaggactcagcctgaggtcagagtcaggggtcattctgaggtcaagtttaggggtcagtctgaagcgaggcttattgcacaggcaccagagtgacaggctaggctcagtctgtggccagggttaggtctttgatgccagaattaggggttggtctgtggccaggcttagactcagtctgaattcagagcgagaggcattccgagggcaagtgtaggggtcagtttgaggacagtgttaggatcagtcattcatgaaatattcactaagcatctcactggccaactccctaggagtagaatgaaggccctgactgtacccctgctatcctgcgtcttagagttaaatgggaaagacagtcattaaacaaggagttgccagagtagttcattaataatcatggcggcgagtgctgcggatgaaatgttaggaacctgagacctcagagcagggttactatgtggctgcatagcaaatgacaccacaactttgcagcttaagacagccatggattgtgctcccagaatctgtgggttgggaactggaaaaggcatggcaaggatggcttgtccatgcagtctggggctacagctgggtagacccacaggctagagctgggggctggaatcgtttgaaggctgctcactcgcacacctggcacctgggc

SEQ ID NO: 37446 - DNA, 1559 bp, Homo sapiens
cattttgctgatgaaattagaagttttatgaatcaaatttcctatgaaatactagagaactccatgccttaatggaatcctatggcaaagctgtctctaaaatgaagaatactttgtaaagttaagaatttctcccatttcagctttgttgaaaatgcagatttgtgttgacctgatttgggggagtgcagcagctccctcctcaggctccaggctcagattaaacacctcgtttgctcacactggtctttctctgtcatctggagctttgtcctctgtcttggggagatgagaggaaatgggtcctaacatcagcaaggatttaaatcagaagtggacagagcctgggttatgtgggtctccaagaaaaataaagacagctggaccaagcaccaactgggagactgtaaggatgaaactggagcagtgctgcctctgggaccccttcatgctgtgaatagaaagggctgctcacggtttggctgctgcctccctgaaagggctgtctctgggcctgtttcctctccttgccaagttgcccctgatgcccattgcacagctcttgccctgatcccgacagcaccccactcacctctgctcccttggcaatgaccagagttctgcaacagcttgtggcataactcccttcctcactggccttgggaaactccatgaacttggccccagggctagggtcaggcaggaagtgtgacccagatgacctcatgctgggttcttgccctgctgttcatccttcagcagctagtgactcacctcaggggggacaggccaaggccatttgaaaacggaaagcctttgggcctcttcccttccaagggctccaagaacaggcctttggcagtttttaatctgctcttcccaaggacccagaatgaaaggctagatgtttccaaccagggtttttgttccctaggagcaggcaaagcatcgtgtcttccccatctgacttcttggagccaggagctgagaagcccaggcccagcctgactgtgtggtggtgactatgttccttgccctctctggggcctatctctgcactgctaagctccaagccctctgctctcagtccgtccctgccctcctctccagccagacatatcagtctgcccccacacttccccagatcctcatgcatcttagcctcaggaagctttagctgcatttggaagagttctgtggcaaagcatttcttgttccctgaatattcatgtgcccccttatactttccagcccccttgcagttaggtggggcctggtgacaagttctgaccagtgattacctcttggctagaaaagcaaacaagagttctcctcaccctgtcctctcctgacacctgggaagtgcacaaggagacctcatattacagatctgcactttacaatgtggtggcaaccagctgcatgtgacaatttaaataaattagtatgaaataaaatgtaaaattccattccttaatcatactagccatatttcaattcctccatagccacacgtggctagtagctaccatagtgcacaatgtagctagtagctacat

SEQ ID NO: 37447 - DNA, 1004 bp, Homo sapiens
agttggtgagaatatgaagggactggaccatataattttccttggggtataaggggatcttaaggaagctttggagctaagtcagatggaaattgagaggtgagcttccctttatgtttctatccagagttggccaaaaataaggagtagaaagcgtagagaaggaaggatgagctaatattgtcattagtgatagtcaagggtggggctgacctcaggaatgacaggcctgaattcaataactggggttgcagagttcgactggaaattcacagaggcagcattctgcttaggaatgatcggttaattggtgattaattcatatcagaagctagttaacccagagatcctccttccaagttgtaggctcaactttccaatcctccacttggcttccccagctgagtgtcctctcaacacctcagcctctgcctggccaacatgccaccctcccccccaacctggcagcaaatgtcatggcaatccaagcacatggctgtggccttagtatcctctggtagtcacccaaccacacagatacactcaacaagtcccactggggcctcttccagcaatgcccagcatcttttcctgccctaccttctctggcacccctatatcataactgactgtttttctcccggaacacagcagcttctgaactgcaaggccctgcctcctaacttcactccttccaacctatcctgcattccaaacaagaggatgtttgcctgggtcacgcctctgtgcaaaagccttcaggggatctccgaagaaatctaacctcgtcagcttggcattcaaaactttctacttgctggttcaacctgatttcttactactccttcacacacacacacaaaatcctcactcctgccgtacagatctcctcattgctgcctctgtccctcactcctatcatacccctcatgtccctggaagccctccctgatggttctcttttcctgtcacctttctcctactgttactgtgaagttcaaagg

SEQ ID NO: 37448 - DNA, 921 bp, Homo sapiens
aacagaagactagagtccctctctctaaagagatcgagacagaagctctgaattcagcagcactgtgagcaaccaaggatgggggagggggaattcgagactgtaaataggaaaattaggtgagcagagagtgcagtcccctcccccaactctgcctctacacttctgcatcagcatttatgcatcacccccacccccaggcaggagattgtgaatccctctatgattaaaccaactatccccagagaaaagacctatggacactgacatgcagtggttccccaaagaattatccagccacgctgtcctggagtgtcaccatagtcagtaagcctcatccatgcacattgtttccagtttttcagtgccccactcttaaatatgatccaaggattgccaacatatgatgagggatgttgacaagaatagaatggaggcaactggttgtcaatgttaatgacagtatgtctgaactgttgagagaagtttttacttccttcagagagatttatcagtgaaagttatagacattaacaactaaaaatggacaattattaaccccaggggaaacaaaaagttgcacaagaaaggaaatgtgttcatgggacactacatggtgcagctgcaatgaatagattatgtggacataataccaagagtaaatattggtccaaccaaaaagataatataattccattggaagactagaagaacaaatacatctgtatgctgggaaaagaatggtagcaaaaacctcatttttaatagtagaagaccaatgctaatacttaagcctactacaaaagtctgtataagcatgatatttaaaaatatggccactaatgtcacaaaaaaaactcaaagtagctgcctctgggaagtggaattcaagcaagatgaagaataaaaatgttacacttt

SEQ ID NO: 37449 - DNA, 649 bp, Homo sapiens
cccggggggtaacaacacaggcacttcccaaagccggggcagctctgaaaccaccgcccaccacaaaggatgggcggaggcagaggcgcaggctggggcagagggcggccagggcggcgtcagggcgggctgggtctgaggccatcacctgctggggtcaggactcgggcacactgggaaggtgccggggagcggctccctgtgaagagaggaagggttcctggcccggagctacttccctgaccacaggcatcgcaggagccacgactgctttgtttccttctggggcttccctcggaattcccaaaagtcagccaagaatgctggacaaaggtcactgggagccagcccaggctcaggccaagccctgcagagggagtggcaggtatggactccccaccacggctggtgccaggggagagcaagggcactgtcacaggagcccaggagcgcatgtccaggtttacctgctgcagccccagaggctcaggcaggagggaggagggcactcgccttaagggatggccttgggcaactcccctgccaagcccccaaggacacaataggctcatgagtctacacccttggttctctccctccctccagagtgggagctgatcccacaagggtctaggggtaccgccagggg

SEQ ID NO: 37450 - DNA, 1004 bp, Homo sapiens
tcaagggcactataaacctttcaaggctaaaatagccatatagaagtgcttaacagatgtcagttgatgatagagcttaaaggacaaatgctatattaatcattctgactatttctgagaagaaaggattcctactcacattttacagaaacaaaaagtgatgtctagaagagttaatttacttcccttggattcttgagctgaaccaaaatgaactgagaaggttcctctccttactagagcaggcagcctcttggcaaatcaaagtgcataatcccttcagtaacagtggttgcttaccagcatagtcagtattgatttatgcttgcaggcacatggcagctggagaatagggcagtaatattgggccactaatacacaagacgagattaaatggtttgaaatattctgaatcctggttttctccgagcttagaaaatgacctattggatatgttattctgagggcaaagagaaatagaaaaatcacatcctggcactggcttgtcattactatctttaatttagatttccaaaatcgccaaatatttggtttttaggtacaatgtaattttcaatacacttcccagcaagacagctaccaataaattcaagtaattttagtttctgcagcatttcttggaaacttcatgctggcactgtccttgtctctgaattgttttggcatgtttggcccatgatgattcaatcaattagcaatgcaattcacaggcaaagtggctgaaatttttgtgactcagcagaagagtcttgaaagacatggttattttcctggcaacttttgatttaattgtcatcttgccagatttagtataaatagattaatagtgggacaagcaaagagggctatcaaaattcaggggaccatgggcagtcttagtttctcctgcgctgtctcaggtgactccactgctctttggcaaagtctgtactacctctgataactatcaacaacagattacgagtcccatatttaaacacagc

SEQ ID NO: 37451 - DNA, 628 bp, Homo sapiens
atgggtgcagaagtagacactgatgaagccaccacaggcctggaaggcagcgccaagagccatagataattagttccaggccttgaaatctaatgtaaattgccttgctggattcaaacttgcttggaactggtggctcctttattctctcagtttcccccttttggaatgaaaatgtctattgtatccctatcccaccactgtattttggaaacagatcatttcttttctaagttcatagttccacaggtagagaagaattttgccccagggtgcatcatacccagagggccacccatatctaacgtagatgatttaggtgatgaaatgtgggacttttgagctgatgatgtttagatgagactttagacttagagttaatgcaataatggattgagacttctggggatgtggggaaaggctgaatgtgttttgcatgtggaataaatgttaatttttgagagccagaggataaactacatttggttggatggtgataccaaaaaagatttgtccaagtcataacctcaggtatctgtgaatgcgagcttatttggaaacaggatctttgtagatgtaattcagtcaaggatctcaaggtgagaccattctggatcaactgggtagg

SEQ ID NO: 37452 - DNA, 645 bp, Homo sapiens
cttttaaaaacatatttttcaattactataaaatgatattttatatcctgccccttacctgcccaaatctaaactgtacgtgaatgtgaagatttaaaccatataaaattttttaaatgattccataaaatacttctacctttgccctgcacactcccactgcattattttatcaaagaccatgtctcaattaaccactatctgacccttgttcactttcttccctcccctccccctgccaaagtttgcccttcctgccaaagttcagcacttcctagaaaagtctcactgcctgtttgatattgtacttcactttagtcaccaaaggaagaatttgcaggtgcttggccccatctataagaccatgaccgaaatctgacctcctgttacaatacatgaactcctgacctactgataaggctggcagatataagtaggatttttcaaataatcctttgggaatttataagcagcaaagccataaaaggggggtgagtggaaggtcggtttcactaaaaataataaatattgccatgtttattcaaagagtgccttgttatcctccaggccaaaagttcagataaacactattgtaaatgacaaaatattagaactttttgttacttatgttatgatccttccgtt

SEQ ID NO: 37453 - DNA, 798 bp, Homo sapiens
tacacatggccggagtcacctttccttttgcaggcttacatattgctaagatagacaggtttcagcccttccatttgtagcaagacattttctctgtatgtcatttggcagatgcagttgtgggactctgccaattcaccctggagccctccattttaatcagtatcacataaagtttaacacatgctttgaaatatgcaccagattcaaggctttgcctggagacgggggtggggatgcttgctacaaaaacacataccatcccagccgctactccacaagcaattatctttcacctttggctgaaccaggagaactgtcaacacaggcacactgccaaccaggggagaggttacagggtcaaagcgggaaagacggctggatgctttggggttcagctcggacatctgttaatctctctggctacatggaagaagaattctctttagtcaccaagacacagctataagagaagtagctgagagtacactagaattttagcaaggcttttctagtagtaaacttagtaaaagcacaaagctcctgcagtacaataggacaaccacgtatgaaaagccaaagaactcagatcagcaaattcacgtacatcaggaaactgcaactgtgaactgggctgcgtagacaagaggattaaaacaaacctcatatgttaggaataaacacttgttttcttcatcataaatacaagttaaaaatatatgaaagtattctttaaggtttttttttgaacagagaaaccaaagaaaagttgtcattgatacttttttcaaaaaaaga

SEQ ID NO: 37454 - DNA, 1687 bp, Homo sapiens
tcttattaaaattttacaggctcaaaaacaatacaattcacatggtttagtgtaaacagaatggtgtttatactacaattaggtatgaagagctatgtgcaataaaatgcaattcctctagagagaaactttagaacggatagaaagccaaaaattaagccaaaaagataaacacactttggggtttagttatattttggaacattgtttatagaatgaggaaaattcaacaatgttgtctgcagacgcaaggcacattcactgatgagacacatggctcatgctgaaaacatctggtctgtcaaatagctccacatttttcaaggctaattagtacaaaacccagtgattcctggcaacaaagaatgtcaccctatttccccattttcccttcccagtatagtcacattttaactataacaaatcagtaatattcaaatgtctagtctatttcaatatccgtgacaggttaaagaatgatagccaactaacacctgtatagcaggcaccaaaagaaaaaaaatatgtccagtgaccacggaaatccaaaattagattttgatgtacttttgacaatctccaaacattattaaaactgaatcaaaaggcaaattcctaagtttcacttgtatgtgtggtcactctctcccctcttctcatgcaggctccttaacagagatgcaatcagaactaaagtaaagaaaataaaagcagagaataaaagggaggaaggcagggaaagaggttctaaataatcctacaaactgagtaaccatgatcagaataacagacatggttgaatgctaaagcaagaagaagaatattgattccaagcaaattaaattttggtactttcttgccataccatggaattctttcacagtgatggtttctaaaattctaggaagtgatccttgaaagcaaattgcaactatctataagaaattttttaaaattcagagtatgataaaatatgaaataaaaactttcatcacagaaaaatattagtgtcattcctaatcaaagagcatcattaacaaatacgtaatttcttctgtgcgctagagatagaaagatgttcagatgtctttccctagggagcacaaaatgcagtagaaaaatcagtatttatagcttaaaaaaaaaaaaaaaaaagacttctagctacgaaagcctaacaaggaacagacatgatctctcactttataaacaagtagaatattggcaaaaatatatgaaacagccattttcagacattggacatcaggcaacatagaactgctatctctgtaaaaagagaaacaaacaaggtgagtttaataattaccaggattatctacctaaagttgacttctaggtcatgggcacagccagaaaaaatcaaaacagagctcagcagccttgctgacttaaagaatcagtgatagtagctcaggaaagttgattcagcttgaagttgtgtggcagagttccccaaaaaaagagcaatgcagaaaaagaactgcagaaatttacacaggggttcccttgagtctgctaagtactaggacaggcatagagaaagtgaaattccacatggataggtaaaaagaaggaaggaagggagagagtgggagaccagccaggggaaggtaagatgaacacttccacaatctcagacaaggcagataaacattcaaactctgaa

SEQ ID NO: 37455 - DNA, 2502 bp, Homo sapiens
agaccatgagttccttgagagtttacacctggaacaatggctgtatcccacagagaaagcattataaagtgacaaagagccaaagcagtgcccaaaaatgtttcaacatttcatcttaccccaaagagaagcactagagttcaataataaatatttttaccaaaaagttaattcaagttctagcagtgcaaataatttgcacttcagctaaaatgttaaacagaaaaagaaagaaacagaggaagaaaggagaaatttagatggctaaaggaaatctattgtaggaggagagtagtgtctggcaataatttgttatttccctagctctcctctaacctcctctggaagctaggagaaggaagatgattaaactgcaacaagacctggctctgaagagaactgatgtttctggcccttgttgccaacagaagggggagggtgacagcagtccctacgggcttttagaaaaaattgcttccaggtggaaattttttatggtactgagcagcctggagccatttttggctttacttcttaactactgatgattaaaccatggacaatcaggctgcaacaatggaaacagacagctctcaaacatcatggttatatgctccaaattacaaagttaactctcaaaggagagaaacattttgttggcaaaatctttttttaagggggacgtttttaactgtgttggggcgggggttgtcaggtggagtctgttaaagatttatatttggtaaaacataaaagtagccaagaactctgtatcataatgataaacatcagtcccatgccaaacctagacactgtaatgcagagtcatagggagctgaacaaaggacaatgctaaatgtcctggtatttcaaaatttttcattactttattttggcctggattaagcattctattaaatgattatcatagatgtctgtagggaaatccagccacacaacatgtgggacagctaagtcgatttataacctaatcatggttctgaaaaaagttgtgatatatatttctgagtttggagtgatggctcaagaacattagcagaaaaaagttacttatagtaccaactcatatgaaaagcaaacaaaaacagagaccaattatttgaccacccagtaatttaatctatgctattttattactgcactatcatccataccattaaaggttaaattcagcccaaaattataaaatagtagtaaaagtaagcatttttaaaatacgtgccaaatcctgttaaacattttatattcactaactcacttattccccaaatataatcctagcagaatagttattatcatcattttgcacatgaagcaacctttttcacattgccagtacatagaagcatttacctttcccaggttgccacagttatataaagtataataaaatgaaggaaaaaggatgagggaaaggaaaaggaagatgagtaaaaggaagaggaagaggagagtaagaaggaaggtgaggtgaagaaacagatgtaaaactatatacacattcaatataaagataaatatgttcaaatattttaattcaattctatagaaaacaatcaaggacagaaagaaaaccagcaaactaatacaatgtttagatgatgcaattctgaattttttctatttctgtattactttatctattacttaaataaacatgtattgcttttccaactgaaaaaataaaatgcatttaagaatctagaatagtaactggttcatagtagatgctcaataaaatattacttaaaatgaaaaccaaacaacaacaaaaattcagtgtaactacaagtctaattttcaataattatctaaaataaaataaatgcttaaaacaataatgtggcggttaacaataacaaaatggagtcacttatgtcaaaactttaaccaaaatgaagtcggggaaggccataaagaaactctctcccttgcattcctgaaatatctggacatcttgttagtacttgtacacagagcaaacagagattatcacaggaatttcctctggcctacagtatttcagataagacattcagacctggacagttgcctagcaacagctatctccccaaatgaattagtgccaacccctgcaatgtgtccctgagaccaatgagctttgtttcaaagcagtttgtgtaaatttctctttgtctttaaaaatttccagtttgtcccagttttcctcatgtgggcccatgattttcatagcatgtacaccctaggttgcaagcctttgctattaccaaataaactcttttgttctagacagcctatctctctgagtttcttttttaggttgacaaatgaaatgaaaactccttctcaggatcgatccctcacaaacccaagaagcaatcaccactggtcagaatttttaaaattcagtgtcttttccatattctaacttcctcttgtaattaatcatgatatcaaaatggttttaaaacatacatatgggccaggcacagtggctca

SEQ ID NO: 37456 - DNA, 1047 bp, Homo sapiens
aagcttcaagacaaaaatagctgcaagaaaaaagggacattattatttctattttagaggttcagaaaactagtactcaaactctattctgcatactgctccttctagaataatgtactgtttacaatagaaacagaattaactctttggtgcctgcataggtaggaacaaatgtgctgtatactagttaccaaaaaagtaccatttcatacactggtgaggaggccctggttaatgtttagcctatttgtgccaaacagttatcctttcagttcaggaaagggatgtactaatctgacaaacacattcaagcgaaggactacaaatcatgactaagatttgctattagtcatctcccattctttctaaagacttcactcctttggggtaaagactatcatacacaagtaaagtttttcccaaaatgtcatgtttcagaggaaagttaagatcaccgagttccaaaattcgttttcttcagggttattaattttctaaaaatataatagagcaaacaaatatattagtttttttaaaaaagcaggatacaacataacacatgcatgtacctgtctgtatgttaatacaatattaacatatacagtgaatatgtccatatatagtatgtatagtataacataaatattacagtatttataaaaacaatagctcatgtttcttccatgtttacttcttataaaggactgttctaaacatttttcacttatcatcttgctaaaccccaaaactacacccatgatacagggtgacagtattaccttcattgtataaagaaactgaatcacaggcaagataaattgtttgcccaagttacaaagctagtgagtagagccatgattacagtgaaagtataaaaactcagaatcccacactcatccatttctctatctgccactgtattataagcatatatatattatattatataaatgtacatattataacttgctgtccccatacaaaatatatataacattatgtaacatcataaatacatttgttatacatacacaaattttatatata

SEQ ID NO: 37457 - DNA, 1284 bp, Homo sapiens
aagttgaggtaagtagggatttcttttgacatctccaaataaaatggagatgtgcgtgcaaaaaaaaatgataactggggggcggcagcagggtcagttttccccagcgatgaggaggctgcaccgtgggcgagggtcgtcctcgtaacagggaggcagggataaaggagcagcggctcccaggagaggggcgcgggttggggaaacttccatccaggcctaggatttccagggactcgtttctgagaagtggctgtgattctgaggcaagactttgatttcgagcactagaccatggagtgaaattctgtgttgtctgaagagcaggactcctgtctagggcaggacgtagttagagacggagggagaagggtgatgtccccagggggaagatctgccgggagccaccaccatctgtcgggcgccctctcgttccccagcgccggaccagcctcggagggagaacgaaggctgctcctgccccgagggaggcagcgggagggtcctgagtcactgggctgtagggcgccgggaagggaccccgcgtcggggctgcgaagggagacccgcctcgcccggtatgcagggtctctccgaagggaggggccggcgccggacctggggacagccggccggaggcccgacccagaggagcctgccccgtcccgcccgttcccgcccctctgtggtcccggcacccggggtacctgagcgtgggcccgatgcaggccgtgtcagtgctctcgatctctcgcaggatccgctcgtgctctgccgctgtctccaggctctccgcctccgccatcttaccccgctccatagactgggggcgccccgcagcgcgtcccctccgtcggctcggctcaccttttccctgccccacaatgccgctcccaccacaggctccacagccgccccagcctctggctacccgcaggccgacccctccctcaggctcgacacgcccccttgcgtcaccgcgtccgtcggcgttctgcgtaatgtccgctgggatttgtagttctctgggaaatgctaggttggattccattcattcatacatggaatccgcaaatactagttgaagcccactgtaagcaaaaacagttaacgacagtgcgtaaacagtgatgatcaagtcaggcagtggcactaaacctacaaattcttgtttaccacctttgccacaaagtgccaaggctccgtcggcgcgaataataaagtctaacttaatgtctgacagaggccttacagtctagtgggggagacacggggagctggaga

SEQ ID NO: 37458 - DNA, 1686 bp, Homo sapiens
aacttgtctcacgttcctcctctcctagaaaaaaaaaaatgtggatttttctgaagcacctgcctggaggtacagacagatgattgcgcaaacttgaagctgaaagtggatggaattgctgccagggagactgtagcatgagcaggagcagaatcctggggaacacacttttagggacaggagtcagaaatctcagagaagcaggggttactggtgggatcacggagctgctcagggcctagtaaaagggaaaggttttaatatcatttggagccactgtggttctcccagaggaagctcctgtcatccagagagcggtgagctcccaaacaagcagagacttcaattcctaaacaggcataagcttcattcagggtgttcactggccacgaccagggacgcccagcacccagtgcagggcctgccctggaagaggtcagtagtgcaaagttagggctggaactgggaggaaattcgagcatgcgtcccagccggaggctgagcttgcgggcgaagaacacggcagcgctgggaaccgggctagggctttccgtgtgggccgcgcctgccggccctctctgttgtcccacttggcacggactgggctaccgccacggtttgacttccgccaccagcaaccaagggaaccagatcccaagggaaccagcacccctgggcgctcgcggcccgaagcctgaggttcccgccccgccccggcagggcggccccgccgacacccgtagcggtcccgccccccgcggccgcaccgcctcctgcctggtctcgggtgccagcgccgccggcggagaacaggagcatggagggcgggctggggcgtgctgtgtgcttgctgaccggggcctcccgcggcttcggccggacgctggccccgctcctggcctcgctgctgtcgcccggctccgtgcttgtccttagcgcccgcaacgacgaggcactgcgccagctggaggccgagctgggcgccgagcggtctggcctgcgcgtggtgcgggtgcccgccgacctgggcgccgaggccggcttgcagcagctgctcggcgccctgcgcgagctcccccggcccaaggggctgcagcgactgctgcttatcaacaacgcgggtaagaccccggggctggagcggactccccatgtgagcgcccacttcctccaccgctggggaatttaagggctactcctaggggtcagataggacgcctagaaatctaaagccctagttgttccagcttgagtagcaagtggaggcgaggtgtacaggaagactcggtgccgtcgggacaacagtctgcccccacttcctggaaaattggccagccgggttttccaaagcgcctgtagaactttcccgagccccttgctctgcgccctctggcggaggcctgagtcagggcttggagtctccaaacaagtaaactctctgcttctccaaaggaccgctagagctttccttcagccccacggcaaggcaggtgccttctcattctgcagcttgggatggctaggttccccagctgtgtctttccgcagagctggggaagagagaagcctcttcagaagcgctaggcagcttcctcctctaggtctgcatgggaagaggatatctggaggaacttgggagggctggggaagaagaaagccccgcctgcactgagttactcctaaggg

SEQ ID NO: 37459 - DNA, 944 bp, Homo sapiens
ggaaaataaagagcctgagacacaaacgagaggaaaagaccatcacagaaagctggaaatctccggagaggccagcgagaacccgcgctccccacggattccatcattccttccgaaggcgcctctgcggtgtctcagccgtgccaggccccggggttcccaggacgcggaggagtgctgggtgcggccgcctcgcctccccacccctggccgcccctccccacctcgcccaagggggccggaacggcgtcggcgcgcgggggcttttcggagcagtcgagtggaaaatagactttaacccgctttgtggcggccggggcgccctgagcgctctccaaaccacggctcccggcgctcaggcgggccgctgccaagacccggcctggagtccccgcagagttgcgcggcgcacggaccccgtggccttggggcgtcaggaggcccaacccagatctgcgcgcccaggcagcgctcaggccgctagaatggaccccggcagcggcgaggaagcggaactctctgcggctccctctccgcagtgcgccggcaaggtccaggtcccagcctccccaccgccgcccgcgccctcctaggcctcggagcggcgcctttctgcggcctcgaaggtggggtgggaaagtttggggagtcccggctctcacagcctgtcgtgagaactgcccccggggaattcgtccgccgtacggaaaaactggccggagcagagtcgtccgcggttccgcggtcgcgggtggaaggtgaaggtcgagggaggtcaggctgcttctgcgtgtcctgacggctggcgtgttctcttgagatgggctcgggctacttggccagcttcaatttaagccacagtgtctccgaggccctgacctggtccggcccgccgacacttgagcccccagagcctcagagaaggcgagggggtggatctccca

SEQ ID NO: 37460 - DNA, 3599 bp, Homo sapiens
agacatctaaaattgactgtgaggttaaaaagcagtttacagaatagtatatatatatctatatatgaacccatttgtattaagttacatttatatagacatatttatacactacatatagatataataggcagagattcatatacttttagatgttaacttgaatttggagggatatatactaaatgactcgggagagagaagtaggattgcttattctattatgtattatcagaaagaaatagagccattttcattaaaacgaacaaacaagcactctagtagcaagcatgagacttcagctgctattctggctcaagactgatgttggactaagtacttccatattccacttcctcttctgcaagaagtgggaggtaatgctggcctcccctcccctcttctctcttctctcctccctccctctcttccttccttccaccgttgtgggcaacacagtcaatgattcaaatggtgtaaaaggggaaataataaaaagtaagtctccttcccaaccctaaactttaccccctccccagaggcaaccactatagccaggttctcatgtccctgcccgggaaggtctatgtatatacatgtaggcatattaccacctttacacactcacacatactctctctctcacactcgaatcacagcagaatacaacccctctgcctttaagacagtgatgattatcaaataaggatgcatgccctcatatttgcttgatttcacaaaaatccccattattccacctgagaggcagtgctaagtaagcagcacaaattttctcttaagtagcttgagaatttggggagagtttcacaacccatattgaagtgtcaccgactcaggatcgggaatttctggattgaaaaatcagcctgtaagtctaggtgtaggctgactcggaagtttggaatctcttaatgtgattcctgctaacacatccatctttttaaaaagcccctttttatcacagctgcctcttagcttgagattcttcaatggttcctcatcaaccaaagataaagctcaaaccccaagctaacactcatagcgacaacatgccctcctctgttccccagcaggccaggccagcccagccaggccccctgccccctcctgcattcccctcctgcatagcccctccctccctctgcattacacctccccactttctctgcctctgggcttctctaccttctggatttcaggaattataaaaccccagaactggaaggccatttacgcaacaagcacttatggagcacctacggtatgccagatcctgagcaagctgcttggaaacaggtgccttggtcgcgtgcgagtgcccctcacagcttctggggcctgtctactaatcagacatttccctcaaatccaggagtcaggcagctcattccaataacaggctctcatttttttcagaagatcctgtcactcttatggcgttaccacttatcagagctactcttgacgtgtacagccagaattaaacagactcctttgttcttggtgttctatctttagtaatgcagctgaaatctgagtgagcatcatcagaggcacacaccacaccagggacccattctgagcacacggcacacgagacccccgggtctctgtcttgagaacttcagccaagtcaggtcttgacaccctcacacttgtgcacctacattttttgaacagcaaggcttacatcaaaccttgtgagatctcatcggcccacctcgatggatctttttagatcctggtgctcttgcccatgaattcacaatccctgccaggttggtgtccctgttttttgaatatgagccacaggcctcctccatccaaggcatcaaaataactgaagggaatgaaactgaagacagagccctgggacactagacactttcctctggctgccttggacccactgcctgtgtcctcttggggcctgacacacagcaggggcccatgccagttctgaggctgccaccaattctggcacccagcccagcccaaccttccatggctcctcaaaatccacagcaccacgcccacatattcctttgataacatgatctaattatccccgcccttttctcaacaaacaccatttccgtacataattcagttcatattagattcctaaaatcgtagaggtgatggaaggtgatttagagagattatcgaatgggtttcatcctctataaaactttattgcccttatcactggaactttgtgtgtgtgtgtgtgtgtgtgtgtgtgtgtgcgtgccattttgaacatctaaccacctcttacccccaaagaacaagttccctgatggcaggaatgtgccacccctgattggggcaggaggaacagagtggagctggaagaggatcaacatttagtaggtgctcatgctacgctgggaaattgacatgttcaatccccatgaaaactttgcttagagatactagtatccattttatagacggggccataatggcctggaagggttggataatgtgcccaggatgatctggaaaggggtgggcccattggtcatccaccctaggcctgctgactaagagtggaccacagtgatggtaaaaatgtaaacaagaaaacagagcactccaaaacaactttaaaaagtggaaaaggtccagaataaatgtccaggtagctacagaatctggccaccactgtcatcagggtgaggttctgccacgagtgactcatctcaaaccttttgtgccaaagcactcatttgatcattgaataaacccacattgagcactgactgtgtgccaggcaccgagggggctgagtgtggtggtagatgagatccagtccctgccttggggcactcaatgtctaatgggggaggcaggcttggaaacaacacgggcagtccccagatagacatcggcacacacaggtagctgccatctaaccctggctgggactcccagcgagggcttccaagaggagatggtgtttgagcagagtcacaaaggcctggtagtcgagggagggcagagggtgcttgaggtagtgggaagagcaggtatccagacatcagggccacatgcaaaggcctggggcccggcaagagggaggagaggaggacggcagcgttctccagggctgcagtggggcacaggagaggcaagagcaggccaggtcaaagaagggactcatggcatccagaggtgcctgaagggcatgaatgccacgtgaagcaccactgaccttgatggatggaccttgatgtcacagggcccaggacaagctgccacaggtgcacactgctgcctcctgctcacaggggatgaggcctggggagctgtgctctgacctgggggtaggccctccagacttgggcagcactgccatggccactcctagacggaggaagcagggtggactgagcacaaagggggagcagtggagcaaagaggggttcaatgacatgaagacccgtgtggccttggggagaagggggcatggacgtcagggaacaggtttgccacacctgtgaatgaacagaagaccttctcccaaatagtgccaggacaccctgggcaacggactcattggttaacaccga

SEQ ID NO: 37461 - DNA, 951 bp, Homo sapiens
gctgcacctgtgtgagcggctgaagcctcattcccaaaaagaagaggggaggggaattacactggagtctgaagaggggcaggtcagaaagtctcagacccaaagcagggactctcctcctgaaagagtcccagagaggttaagaccacctcaaggtgacacagcaagatggccagtagggctggaatgggcccccggcaaagttcttatctaaagcttggctagggacagattacatcttggccgaatcccagatccagcccagtgcagcagagcgctgccccttctcaggctgcatctgaccctgcagctgaatggccgggaacaccagttgggcagccgtgtttgctttattaggccccttaacgaagtcagatctaaagggttattccattaatggcccacgacagaaatagctgaaagttcattaaaagtgtggagttgctatagcaattatctgggctggctgaggctgagccaggtggctggttctcggaattcattagtctctgggtcatccagaggtggggctgcccagcaatgacctctcaccctctcacagggctttgcaggtgcttcaaagcaccctcctctcagtggaaactggtttgtggcctcacttgctcctcccagagctctgggctgtaggaaggtgggtactggtacccgccttttacagatggagaagcagggccctgtagatgacgatcagggtcaggaccatgagcctgggtctgactccagctcttcagatggtgccttggtaccacagaggtcacgagtcctcatgccctgtgctggcctgtccccatcgttgtcctttggcacagatggggagctctgctgttatggttcaaggactggtttatccttctcttttgacagctatgcactgccttacactgctctcaatactgtttatttctttttagttttaaaaactccttccac

SEQ ID NO: 37462 - DNA, 3019 bp, Homo sapiens
ctaggtggaaatgccagtgtcaaggctctcacaggccttgccagcccatggaacagctgggctcccatgtcaacagatgatagctgcccaatatctctagagaataatataccccaagttccaacacagacaattaagaaaaagctaaggaacttgccctgtgctacaactgcaggtctagaagtgtctggtttaagataaagggagtcatccaagcagagatggccatatgtgaagcctatgagagagacttggggtggaggtttagatgtcagggggcagccacagcatatcaggcctctcaattcctatggcccaggccagctcctattcccctcctctcccccaaggtgagcaaatgttaggactctcctctaccccaaactgacaggcccccaaaggggacttagatgcatcctgccttctttgcctttgaattgaagttggggagaggtggccttgccagcaaagcaggggcccagcagcccttcctggacaacagaagggtgactgggcctccaccacaagctctccaaggagtgcaggggctctgggggggagttaccagccctggaccctccccactcaggagcagcccttcagcttgtggccagcagtcgggacctgggagcgctaaggcagcttccagaaattttggaggaagctttatgggaattttgcccccaagtagctgataccatcatgatccaaaacccaaatgtaagagctacccaagaagaatctgaaagccagccgaactcatcccttgcactgctcccatttaatgggccttcttcacttcatgtaaacagcccctccccagagggctcctggcccagaaactgcagctgacctcagctgagtcatgtctgagtcggccacccacctgaagggctggcattttaaataagatatctagaggagggccatgcttaaccaagaggcagccactgatggtggcatgtcacgctgtagggaggatgactgggcctccctagcctgaaccccaccactggggagagggcagtgatgctcaccttggtcgcattgcggtttgcatagttgacacaggcattgtggctctggttcagccactgaaaggcaatgatgagagaagtcagggaaggagtggtcacctccctggaagccaggcctggaccccaggaggccacacatccccagaaaggcacagcatgcggtctccagctcacatggtgccgcccatgctgccggtcagcatgactgaccgtcctggtttgcccagggctgtgctggtgttagcactggaagccctgcctctcgggaagtctctcggttcctgaatggggtcctgcgcaccccagtagtccacctgatcctgagacagtcacctctcttggaatgatggcattcactgcccctgcagaccccactgcctttgtcacaccatctttattatattacctgctggacaaaagttggcctagaatgactgacagccctacaattctttcaaaaatctcccagtccagtatcctgcacctccagttcccagacacagaggccggcaggagtttagttcagggaagactgacattttctcctagaagacagacaggttttccttcctgcccgtctttctctgcacacacaaacacagagatatcctcagttttcatggcatcacaacccagactgtctccaagagcagggaccagggtctgtgatgcacttcacaacctcaggttaggggtggatttagcttcctcagcagatgtgggggaggctgatgtcaaaatgaggctatgggcctcagggtcactggccttgggatgagcagccaaggggcagagtgggggccaccccactgacaagccagcatgttccaggcaggggcacgcagccctcatgacctctgtccaaaggttagagtgacacatggtggattgagacatgctgggctgctggagacctgctcagcagggccaaagtcctggttttccttcagtggcttctgggctaggggtggtgttggggtggactgaccctacacggggtctggacggggcaggagacaccacagcagggagttcttaaccagcacctgtgtgggcccttccttcaggagccctgtttgctgcgagactgttacctgccagaagacagtggatgccagtgtctggttgggcaagagaagaccgactacctatgagcaagagagaagaaatgctgaaaaaggcagaagaaacatcctatgcttttgcaaagaaaaaatacgctaccacaaatgagtgagctggatctgtacaaactgatgtggtatgccgtgtacatacaaactgaggttcattgagggagaggctgtgtgatgggaaaaaaccaagttgcagaattatattacagcataatcttatttatttaaagaaaaatcattttatatataacgatatacacaaacacatgcatacacacattatcttcaagcatgaaaaaacctgtagtgtggatgtctctggaggttgggttgcagattacttttgcacaatcttaaatatttctgtattcttttaaacaacagacatgtattatttccacaattaggggggcaataaaaacaagcaaacaaaaggaataccttcgtttccactcaggttacctgactgctcaccctagccttcccgtaggatttttgcgaggattaaacaaaaatcatttcaaaggccttaagtgctttgtaaatacaagttgggggaatttgtatctgttatctgtgaatttccatgaagcaaaaacctataccaggtttaagcaactgaatgaaacatagatttctaatatttgttgaatgagtgaagaaaggaatgaatgaagaaatgaacaaatatacacatatacacatatggctaggtatgggaacatgtagatccattattcccaaagcccaaatatcacctaagacctagacttgctgaccgtgtttttggtttaagtcaagatgaatggtctgattttgacactggccaagccttggacttcaggg

SEQ ID NO: 37463 - DNA, 2324 bp, Homo sapiens
aaaaaggataaattatacagatatatctggcataatacagaggaaccaacaattagggagggaaagtgggcaactgggggagagaaaaagggagagttttttaaaaattcctattctttttatacctttagaattctgtatcttgttcatatattacctcctcaaaaatatttgtttaaaaattaaaggtaaccactagaaaaagataatagaagatgcacaaattccaagccctttattgacccttatggcacagaccacaaactgtccaataaaatccatgtcctattgtgttgtccatagtcatagaacagaagctggcaggtggctggcctgctacacatttcccagcctcctctgcaatgaggcttgtccatgtagctgagacccacagtggcatctgaggggaagtgatgtgccttttccaggccagtggctccccctccatgctttctgtccccttgctgtgagccagtgcaaggatgtggctgcagcccagcctcagccatgaagatagcacgacgcccaaagagatggtagagaaacatgatggaaggagcctgggtccctgaataatcctgtggggcagagctagctgcccacctggaacttgagctgttatacaggacagaaataaactgtctcatttaagctagtacatttggggatcgttttgttacagcagctagtaccactttaactaatataacccatttggggttattggaaactgcttccagtgatatcagggaaagatttccagggaagaaaggaaggaatggaagctaaagtggtgcttgaagctcttcttgaggcatctgacaacacaccagactcagaggttttggggtgagttgggaggaacatctccattttcaacaaaaattcctagtcatgatctgatcttgtttgggctgatcccatcaccaggctgcagtgacaacagtcaggatcatggactttggccctctctcagtcactaacttacatagcctgcctgtgcaagttacctcacagcttggacttgtattatttttaaaattaggcagaagcagggacaggaggtagaagcaagtctctccagggccccttcctgtcctacggtgtatgaggccacgcccagcttagagggagaacaggacaaggactcaggtctgactccttgggtctaggcttttccctaggacctgctggattaaatgttgactttaaggggttaaatgtcagatgcaaaaatggcagcaggtaatgtaccacccacaagccaagagctggttgctagtttgaagtttcacaagccagtcctgcaaacaggtgatgggggaggatcatcctagggtgtcaagagttcgacgggacatcctaggatatcaagagttcaacgtcttctcactagaccactgaagcatctccactttaaactacaattcctgcttaagacctcatcttgtgtgggctcagcccatctcctctgtgcctctgctgagcataaaaatatgcagctttgatcccttgggacttactggctccaacaacaaatcagtgtggatatgagactttgaaccttgcttgatttctcaacttggtaaataagaacatggagcaggtgtggagaagcaatccgggtgagaggtggctggaagatcccagaagttggctaatttcaaaaacagccagcatctcagctgaagtgccatctgaacctacctgaagttcggtgtagagtccaagggaggggcagaggacactcaccaactggccttctcgggcagagcggggcacacccccaacacccagagggaggaggaacagcccagccccacccccaatctggctcgctccccttcccctctgcctccttccaagctgcttctccaaacctcccaaggcagcaaagacagagcctatttaaaacaacctccagaaggtaattaaacagagcctgaaggggatccttctgtaaggcaaagaatgcctccataaaacaaacaaaaaaaacttcctaatttatcagttgggccaatcgcattatacctcaccattaattttgttgccatggttactcccaggtaatatgtacctattgcaagtctatgtcaggtgagggtacccccaattctacagactcacgaaagaagagggactcttcgcctagttctgcagcatagcacacagcagcagttgcaacttccctatacacgcagtttgtttctatccagacctgggtttaaattctagatctcccgcttgctggctatgtgatttagggcaatacgcttaatctttctgagcctcctcttcctcatttgtaatatgaggatgtg

SEQ ID NO: 37464 - DNA, 1041 bp, Homo sapiens
gttgagtttagagggttgcacagacagacaaacgataagcaacacaaacaataaataagcacattttctgatatgttagaaggaaaagtgcttcaggaaactagggaaaatagaccaggacaagaggatagcaagtgtgagcaggtggcagagatggagattacagacataagtaagatagtcagggtgggtctcactgaggtgatattggaggaaacacttgaaggagagaatgagtcatgcagctatctagtgggagattgctctggtagacagaacagccagtgcaaaggccctgaggcagaagtgggcctgtctggtatgtttgagagacagcaaggagaccagtgtgactgcagtggaccaaataggggagagcagtaggagacaagatcagagaggactgggggctttgcaggccaggttaaggactatggcttttactctaagtgcaaaagaggaacactatagtttctattagagcagtggttctcaactaggaggtggattttgcacccaggggacatttggcaacatcagaaaacatttttgattgtcatgactggggaggggaagctaatggcatctactgggtcacagccaggcaggttgctaaacaccctcagtacactggacagccctcgcaaaaaagaataatctggctccaaatgccaatcgtgccaagtctgagaaaccctggagcagaggaacaaacaatgtcctgtataatttcacaggtcactctgtgtgctgtatcagcaatggacagaggagcccaggtagtataggcagatcatccaggaggccactgcagggacccagcccacaaatgcatctacagcactcagtacgacacctagcacatcatacaaatgactcacctcctactgatcacttgcctgttctgtgctaccagttagggccatgctgggcctggcccagaggggcagggtgctgaccaggatccccagagcttgatgctaggagtcagggtaagactagtgggtcagccaagccttcccttcggcatctgacaaacct

SEQ ID NO: 37465 - DNA, 3322 bp, Homo sapiens
tagacgatgggggcttggtctaggattctggcagtagagatgggtggacttgagagctgtgtaagaggtaagatcactgggcctctggttgcatttaaagggtgagggagaagaaggaaagaacacaggcggctcccaggtttctggctgcattgattgggtggcaagttgggctgtttgcagagccagggagccatgcgggaggagcagatatggaggaaagagaagatccttaacatggatgaatcacatgcaacgtgctttatgcaggccactatgctggaggaggggagcttcaaaagtgcatacaacaaacacttttactgccttcaagagcagtgccaaaaagaagtaccgctatggctgcaggaacagggtagcctaaaatgtttatctatggctctagagcagtgctcacagcacagggctcagtcatataagccactaagacgtatttgataaatgtctgttaggtcactgaatgtccctagtgccacatacagataacagacaccaggacaaaaagaaaaagaaaaaaaaaaaggaaacacaaatcttttactcggcacattactatatgcctaacctgtctccatcagggtaagacagaggcagagaagggcaagatcagccccttcttgcaaaaggcctacagggggtttgaggaaaccaagtcgtcacacagcaaacatttagaagaccacagggcagactgtatggagagctatgaggatctgactcaggtggccaaagagatgtgcaggaggaagcctgcgatctgatgggaccagagaagaagggagcaagtgtttgccagagaggcaggcccgactgagcctttaagaacgagcagaatgggggtgggagcggggacaggcaatgtaataaggtcactcaagtccaggcagggacaccccgacactctcgccctagatggcctcctacactggaaggaagatgccagtctcgcctcggatacctacatgctgagatggcctacttttaaaaggaattaaagtcctgttaagaaacactggggacatttttttcagacggctcaggagccaagttccctaattatcagcaaagctcggggcacccccttgctggaaccagtccccttccaccacaacaacaaaaaaagaaaaaaaaagccaccgcaccgaccttagcacaatttcctttcttccttcaaagttcttttctggccgcctcggctgccgcccacccctggcaagccccggttcacttcagcggtctctctgcctgtttcctaataaattccgtctcattggtgcgggaggcgcgggagcccgagggtctgcggcgcgggagcggcccctccccggctccggtctccgggcccaaccaggcgcccgggctccgcgttccacccccgcctccgcagtctagggccgagtcggcgacgccccagaggaggtcccggagggaaaggacccctgtcgccgtgccccgaagagcctgagcgggtgtgcccagagccagtccccggcggcgcgggggcccgggcgcgggagaccctccgcggagaacacagcgaggaagaggctgggggggggttcccaggcggcagcccctcggagggacgacggccccaggggatgacacagcgtttcccccgcacgccctggctgcgtcccctcagggcatcggccggcttgctgcgtcagcgaatcctcagcccgagatggagagcagggacgggggacgccggaccgccgctcgcctcggcactcgccccctcaacctgctgcgcgcgccgagcccggcttgggggccagggctggggagtgaccgcggggcgcgacgctgcccggcggcaccgccagcagctcgaaaggaacgtcagtccccaccgggggaaaaagttagaaggcatcccggccacgccaacttcccatccagggccagactagaactttgcgtcccgggcgggcagctgcacaacccggagcgaccctgagcagccgctcgaagccgggcgctcgggaccttgaccgcagccgccggtggccaatcacagggcgccgcgggcgggaaaggctagagggcgcgggcagtcggggagtgacggcgccaagggccaataggaagccaagatgggagtccgcgcccgccccgttgaccaatgggaaaagggtgactgtgaccgaggttccccccctggcgctagctgcaggctccgctggccgcgggtgggagacccttgggcggaaggggactttggaggggagtttgctcgtcctctctttgccacccgccggcccgcagaccacagcccggtcctcacctgctggaagcggggtttgcccagttggaaaggaggtgcatcgctcgaggcgctagcggcactagccgccgccgccgatgctgtagtcgctgtatccgccatggccactgacgcccgcaatctccggcccttttaaaatgtccctcctcggcccccgccacagctgcctctcccgattggccctaatcaaccgcagcgagcgggaggcgcaaggcgttgtggggagtgtagtttttcgcgtcgcggcgcttacaaccgtagactgcggagagttgcggccgtccggagaggtctcggtgcccgctgtccgcgttgcaaggtgcaaggtcggcagtccaggaaaggtgttcctgtacgacgaccacgggccacccctcgctgcttagttgcccccagaagttagagttgctgccgtgggcgtcgctcctggggccaggcagcgcagaagggtcccattcaagggggaacctgggaccagatgggcaaagactccaggcggagtagggttaacctcggaaggctttctccaaggagttgcactgcggaccttctcgtactttcctccgtcgccaccctgcccactcgtcctgtgctctccggctgccctgacactcagttcctggagcatgctgggcctgcccgcctcccgacccctgaacattctgtacccggaagactaaatcttcgcctgatgctggctttctggctttagcctaaacattgcatttcccagtccatcactctgcttgcacaaaatcccacagaggctccgtggcacccagcacttctcttttgcactcacaactacttactgttctggacagtctttcttactgtaaagttcacagggcaggggctatgactttttgattcacttcagttttcagagccagacataaaagggctcacagtagagactcaaataagtgttggctgtgagttcatcagtgggggattaagagccctggcagctttcaccttgtctggccaaccaaggaagatccctcctgg

SEQ ID NO: 37466 - DNA, 758 bp, Homo sapiens
cacctgtgagaagaggggagcaggcagaactcagtcacgggcccagggagcctggctcccgcccggtaccaggcactgcccagacccctccttgctctgagagccactgatagcctctccccaaaggctcctgctctgacccatcggcctgggcttccaggcttcagatgcagctgagaaactatccaaaacatttccatgatggagaaaaccacatcctgagtggggaagctcctcgggtgccaccaggtagggcggcggttaccacaccatgcctcctcccaccccaggaccttctcctggtgctcagagacctctcctctgccccatctcccctacatctgaaactctgaggcccagaggggtgaggctgggcctgggagagccctcccatctccaggccccagcacagacagacctacccacatttctccctgttgacatcatctcctctggccagtcccagccaaagctctgctcccagccaccgtgagcccaggaaagaacagctcacccagaggcccagggccaggaacacaggaatgctagtgcatacactcatgtatgtatacacacacacacacacacacacacacacacacacctcactcacacactgactcaccccaagccctgtcaggaatacctctacaagatgcaggaacagacaagaatggcagaaagagacccaggaaagacgaagagcgctcatatctgttgagcatctatggtgcattacgaccagcatgagggttctt

SEQ ID NO: 37467 - DNA, 2715 bp, Homo sapiens
gagccagccaggaaagtcattccacacccatgtttcagaaaacattcaaggtcagatcctttttacctaaatcctgctttcatttgggtttgcaccaggctcatccccctcctccagcaagccttcctggatttattcactcagtggatgccattccactggggcaaacctttccggcacctctcctgacctaaggcacagtcctgccccaatccccttaccctcctacccagatcactcccaagttaaccacttgagtgatccacagcaggctgtcagccccggggactggcttccagctcctgcccaagcccaaaacaggaaatggggctccaaggctgaagccttgatcttaacacaggcaaggttaaatgctgccaaaataaatgatttaaaaaaaccctggcccactgaggtggaagtgaccgggagataatctcctgctgttcattaaccatgccgctgcctctacctcaggcagggcagggcaggcaggcaggccactggaaggctgactcaagtgtttccttccttaacttagaagctcctcctatcctcagaccagggacacaggacacagagggacaggatgggggtgggggggtgacatctctagatagtggagggcatcttgagagcaagaggcagatgccccctgcagccagcttctacgtttagcggggtaatcaacattcaacctcgccctggaggaagacacctggctttccttcccccgtagggcaaggctgcgcctctccactcccctgccggacaggcgcccgcagttcccctcccctttgaggaaagggaggcaggcccggaggttctaagaacggccccaagatttcccttcttgaggtttccatagccccaaagcctctgaatctcattcctaactttacttgacaatctactcctaacgttcgccaccacttaaacctcccccaggcctcccagggaccaccagtggctgagccccacacagcgcacgtttgggaagcttgaagacgaccccgaaatgcgaagaaccaacgtttctgtcggtttacgcccttaagcacgaggcaagggctcactggcccggctgaagttcggggtcctgatcccccaccagccccgccctgttaggcctttagccgtttctgtgcccccgcgccccctactcactgcgtgtgctgggcgcggcctgcgccgaagacctcgtccagcgccaccgtggcctggcccaggaacttgtcgacgccgatgagcgagcggtgcatggtggtgagcaccagctcgcaggcggcggcggagctcgcggcccagggcgccgggcccgcgtcggcctcctgcgcccgcagcaggccatccagggcccccggcggcagctcgaaggagcactcctcacgccactcggggcagccgtgcgtcttctccaccaccgacgtactgtacttctcgcggcccacctggatcaccgtgtacgcgtcgctggtgctgcccgctcccgagctcttgccccgcagcccgcgggcccgcagcaccgtcacctggacgtgcgtgggcagccagcgggaaggccccgccgccggctccgcgccccgcaccagggccatggcggagaagcggggggcgaggtctggccgagccggtgcagaccccaggacctggtgacaaacccggccgcggcagaaggcggtcaggaaccaactctgagcgccgccgcagctgcgggctgggctgggccgggccgaccggccgccgcctccccgcctcaccgggccgctggccgcgggccgcgccgcgacgtcagcgccccgccccctgccccgccccgcgcccgccgccccaaccggcgaggcggtgcgacagggatgcgggcacgcagctcgcgccccggcagccgcagaccagcccggagcgggaaggggcggtgcgcggcctctgcagagggtgggcggagttcccgcggtggccccgcccctggctgggggcgcccgaagcaacccggcctcgcttgtggggagccctacacccgcggccaggtacgaaaaacccgctctgcgcctccaggccaatcccacgtcttccttctaaaagtccctgctccggaaagccctctccgtaaaagggtcccggcccgcagttcctgggatggccagcctcttggcgcggacttggggtgatggggacccccgccgctcccctgaccccgggccgcgctctcccctcctccagtccgcccctgcgggggaaaatgccggagtgaaactggagcgattgccgccccgccacgtgacggtcccgcatcggcgacctggaagcgggtgagctgccgccgcctccaatctctcccggcgcagggggccgggatgcggccatgcggcggcgcgggaggcccgagagcggggctcaccctcctcagactctgcggcggagagccgagtgatgaataaatgagtaaccacatcaatatttaagtgttcactcggagccttggggccagtgtgtcacgggttgggggaaattacaggccctggtggggggttaaataactacttccacccattattaagtgcctactgtgtgccagggcctaagtattaacgtatacttggtttattattgataataacgatgtttagtaattatagatgctgaatttcagccaactctggtcagtgcgcttttatatgcattacctcattttatcctcagagcaactctgtgggg

SEQ ID NO: 37468 - DNA, 2456 bp, Homo sapiens
gggcccagggtggggattgtgatggcccctcgggagctgggttgagccggcggctcctgagctaatcaatgggctgcagccggcggaaggggcccggcggggggattaggagccgagaagggcaattacccgggtgggccgctcccccgctcgccttcgccgcgctgctcaaatgccgcatttcggatgcagcgccgcgctcggcctgtttgcttgcagagccggggccccggggcaggaagccaactcgcaagtgtatcggagattagggcccgcggcggcgggggcgggcgctgggcaaacacgcggcggccgcctcaatccccagtgctcgattccgcccgcggcggtgcctgcccggcagtgactcggtggtgggggaagggggcggccccggctcccagcgcccgggtgccctcgacgcccaccccgggggatactcggggaggcaggcaccggatggggagcgacgggtttttccttcgggagaggccacccgggcacggtctcctttcgccccatcctcaggcacacctcgccgcgccgtcttgaggcctggttctaaccctcccgtctcccgcacccctagttccccgtctgcctagtgggtcgaggggaaggggaaccggttggggaagggaaggaaaaagacccaaaggcggaggtgtgaagactggagagtggcggggccccgcccggtgcgtacttgggggtcagtgcccgcgaccgcagggcggggcggcgggcacgacacccggtgatgtccagggaactcgcggacctcagccgcagggctgagtcctcagctgctccgggaagcgagacttcggcaggcatccagcagccccagggtacaagaccgagtcttaaaccagatctcagggcccccagaggtcggaaggacagcctagaactccagaaccagctcctctcctggtagccgcacccccagctagagttcctctggccctgcccctgccctcccgccccgcaaattccaactctttcccgtttcccaggcggactgctcattcctacaaacaagactttgccctggcttctccaaattctgcccacctatcaaggcacagctagctcccagcctcttcctccaggaagttctccagttttccagctcagagggctgtgcgcaaatttagcatctgattccatctcagggtccctctgcgaaggtctttagcctcccccccacttttctttcaaagaaaggcggtatgttcagtatgggctggcaggtttggtctaggataggatccctcatcccttagaaagacgtaggggcttgaaagcgcagtaggctggtccctggggcacctgtgcccaagcgggcctcctctctggagtgacgcagggactccccactcatgcctcactctggctcctgggacacccccaacccagcccctgggaggcgaagacgctttgtaaccagccctcttcttggaaggttatgaagtcctatgctattggtgcttctgaactgaccaagccacttccccgctctacgccttctcttcttcaccctcccctaagttccgtagtgagctgctgggacttccagaagtgaccggctcttcctcctgggaggaggggcggggaatgtttgtttcttccccacagttaggaagcagtgactccaccagcccgagcgcagcggtagtcagcgctcgacagtgtccccgttccccaccaccacccatcctttaccgcccccggggcacagcgcccttccccctctcccccgttccagcttcatttcccgtagcttcgaagctcctaaggagttaggatcatcttggcgtacagatcccttcgaagcactgatccctccgctccttcccggcacagccccttcccggcacggccctttcccgcgcgatctcccgctctagagacccgcgggatgcgtccccgcccgctgccgggaggtggggcgccagcattgtacagtctgcgcgcgccccctgctgctcgccgcgagaaatgacggcctacgtccgccgggcccttcagctcctcggttccgggcgccccccaccgttcacatccccgcgcgttctcgcgtcctcgctgggactgcgcccaggagccgcaggcacttacaaaacaaattgctgcctccatcactgggctcagtaccacctgacactatcaccccacttttcaggggacctcagtgacgttcctgcatcaagcagcaggactggagcccaggtttcccaaaaggaagtccagacttttacaaaccattaatgaagggcttaaattctccagggcactgtacccctcgtacagctctgtggagactgagaaaatggggttctggcacccaggaacctggacccccaaaacaggcacaggcctagctctgtgctgggcagtgctgtgagtcacctgttctgcccctgggtggagtatacccaggcagtaggcac

SEQ ID NO: 37469 - DNA, 1239 bp, Homo sapiens
actgcacaccagcctgggcgacagagtgagactatctcaaaaaaaaaaaaccacaacaaaacatgcaacggactcaaagatacacacatcaaaactgtacgcgcacacagactctgatacagaggtacagacacaaaaaggcaccgatgtaaaagcacaaaggcaggcccagttacactcccgtcaacaaaccacggaacctaaattcagacttggtggagcccaaaacctcgcagcctcaggggcactctcgccgggggcgggaccagaagggggtgtggcctctcaggtcgaggcggggttaagggtcataaggcggaggcgcgcccaagatggcggcctccatgtgcgacgtgttctccttctgcgtgggcgtggcgggccgcgcgcgggtctccgtggaagtccgtttcgtgagcagcgccaaggtgaggtcggggcgggtcctgccgggagcctctccccagtccggccatggagacagcccggccggactccatgcccggagcccagaggcttctgtgccgctcggacgctacggccctgcccctgctcgcggcccgggggctcccagtctgtccctgcgcgcaggctcgtggcgcggtcacgcgatagacccgggcctccggagtctccgtgcgcatttcctcccagcggaattcggccagcccgcgggaggcccttctgtggctgctcggggcggggctagggggctttgctgctgtatccctggaacggtgggcggggatgtgccgggcagagagaactgaggtgtaaaagagggagtcctcacgaacttcatgtgtgagatttgggtgaggggatgaggagagaggccaagatccttcacgagggtccttggagtgctgaggaatttggaccagagtccaaaggccgtgggggcattgggagagtttttagcaggaaggtgacgtgattttgtcgtttttattgtgttccaaaagttcattgtagaaaaaaatacaaaatgcatgtaaggaaagaaaatacaaaaatcacccatacttctatacttgtgcaaagatgagtacgttaaaattacatttttagaaactgctttttgatgcagcagtgaatctttcaatatcaagcctatttctacatattaagttttaagagctgagtagtagcttcttccgtgagagggtcacagttcactcaaccaaccccttattaatggaccctttattgttgtatggtatttttcatccccagagt

SEQ ID NO: 37470 - DNA, 2819 bp, Homo sapiens
aatgctcacatacatatctccagcctgtagtatccttccttagctgtcccttctggtcgcaccctaagtcacctgggtcggcgctagtgggcggggaggggcgagtggggagatctgctttgtcgtgggaaggtgaggagtcagagcttcagcctcaggctgcgcccactttatgtccttggaccaccacccacttattccggccgcccgctcccagacctgtcctgctctgaactcgcagggtccccaaggtgacccttggcccccaacccgagacgcgcgcaagctggacggccagccccgccctgcaacgcagtcccacccgttgccgctcaccgtgggccgcgacgcacgcggggagccagagcacgagacaacaccagcccgcggcgccggggaccatctccagggccgggcccggcccggcgccgcgtttcctctcgccgccccgccgcgcgtcgctcgcaggacttcagcctgacagctgctccggcctcccgcccacatacccgctctcgccgcgggctggacgacgggaacgaggctcaaggctgattggctctgacgcctgctcatgtagccacactttccgcctctgcgccttagcctacttcctattggtcgagagaagtggagccgggggctgattggcttaaactcttaacagctacaaccggccttcgcctcagccccgccccagcatactctccgggtcctcgctggcggtgggcgggccagggaggacaagcactggaggtgtgcccgtagccggacttgcttcagctgtcgatagtcgaggccgttaacccttgcggtctcggtcctgtccactccaaggccgcctcgattgacgacgattagccttctcccagctgcgcttccctcctcccagctgcgcttccctcctccccacgccttcacgggaaggcactcgtcttgcgccagggggtcttccgcccagtgccaccaacgcttgcgcgctcaccgtggataggcgctggggccgcggcctggcgcacgccatccacgaggagcctctggccagtgcaaagccagaaaacgggcattgggggcagcttcccacgctcgtcccgttgacactgactatgtaactgtgacactggacaccttgacctctcagcctcctttctgtcatcagtaaaatggccttaataggaccaacgcaatagggttgtgaggattaaatgagatcgctcacgtaaagtgctttggcaccagcctatcccacactttgcgtcccacacttttgcctttattgcattccttggtctggcgtccggggatggaggagggtggaattaagttagtaggtgatgcgggccgagcaaagaccctccgtgctctaagaagcacgaccgaaatgcggcgacccctctttaatgaacgcccctcactagagagtccccgaagcccagcctcaggtccttctagccgcaccgagtcggtggtaacgaaccatagagtagcggaagtggtccgttctcttcctctcccggcccaagcttctgggtatttctattgcgcgaggcattgtgggttgctgggcggcccggtctcggagaagaggggagagtggcgggccgctgaataagcttccaaaatgatggtgagtggcgtctcgcgcatccgtcgccatcagctgccatctggccggtggccggcgccgctcggcctgggcttgctctgtaggaccctcttttgcttgccgcctctgtcctcgcccagatccccagcttaggggcgaccccagccagccgcggcctggctcggcccgagcacggcgctggagccgttggcgagggctgcgtggggctttagaggagtctctgggctggccggttggggactacaagtcccagggtgcttcgggcccgcgaacccacgtcggggacctcttttttagccccgcatgatcgggacttgcgtgaaacgagtgcaggtcggccgtggttacgcggtcggcagctagacttggaagctggggctgctctgagatttgcgggctgtaaagacgtgtgcttcttggaaccggcacaggcacattggggacctcatattgtgcccgcctagggactcactatgttcactcgctgaccctcaccgcagcgtgcagagaagcagacgccttccctagtacttttaattcattcactcattcgctcagtcattaaataaacgcgtctttagtgcctactgaatgtaccaggccctggtggttgctgggggttgcagcctctcagccaggagaacgggaaaggtagatggagacactgtatcggaggtgggaagacccaggctcggactctggtgacataagaaaggcttttctagttggctacctaactctgggtctcgttttcttgaaatttggggcgagggagttgctgtgagtcctggagccacctaaagtgctccttgtagccctacttcccacacttcttttctctgtctctcggagctttagatactttccgtgggtcccaagcctcgatggtatctcctgggttgttattgagtagggccagcttccgaggtggtgtttgaccctgactgagatactgctttctgtgcacttggcagttcacttattcattttggcctgtccgactctatcttctgctcttttcctgcttcctgcagcttttctctgtcctgttagggacgcagacaccttttaggtgttctaccaaatgccctatgaatcccgcttgtacccaaggtagaaggaaattagcatttaacagtacttcctctcccctttatgtctctagcattgctcattcttgaagtcgtcttca

SEQ ID NO: 37471 - DNA, 1572 bp, Homo sapiens
atactcaacctttaaaactttataatttgcatgtgtgattataacgggtacgtcctagagtttgatctcttctctgtgcaggggcgaaactcgaccccagccgagaactacactgtccttgcgcggggccctctgcgccccggaaggcgcccagtcccggtttattgtgagcttacagtacagttcgcaaggtcccggccggtgacggcggcgaggcggcaacgtcgcctgtagcaaacctccgccctaaggcgttcccgccgggcctcgcgcggcgtccctagcaacgcgcgcgcggtcttccggccccgcccaggcgggcggcactgcgcctaagctgggccacaaccgccagtcagggctctccccttcccctccctccccccctcctcctcctcctctgccgcccagagcgagacaccaacatggagcccgaggatctgccatggccgggcgagctggaggaggaggaggaggaggaggaggaggaggaggaggaagaggaggaggctgcagcggcggcggcggcgaacgtggacgacgtagtggtcgtggaggaggtggaggaagaggcggggcgggagttggactccgactctcactacgggccccagcatctggaaagtatagacgacgaggaggacgaggaggccaaggcctggctgcaggcgcaccccggcaggattttgcctccgctgtcgcccccgcagcaccgctactcggagggcgagcggacctccctggagaaggtgaggcgggccggggaggggtgtggagccgcggcgagttgggggtggaggctgggccccgagcgctccgcccgcccgcaggtcacgccgcctgacggagaaaacgcgcgcagctgaggctagtaggcggcccagactccagcccaggtgccggccggctgctccgcgtctcccaggctttgtggcaaagacttctcgtttcctccccctcggtgggtcctgggccttttgaactcccgtagacgttcaggggagcctgcattccccgtgagaaacgctgagagaggaccacgggtgtgtcgagccttgaaggagggaaaaggcggtgtaggaccggagcgagtggttgcctggggagcatcttgttggggagacagtgaacagatgagcttgactgaattgcaggactcccctgagggagtaatgtggataatgtacaccgcgcgatcacttagtctggagaggctccccgcgggttttcctcccctggaccatcatttgtagcaataaaggggttccccagccgataggaggggcttggaatgcaggaggcttgtgatgcggctccaaacagtctgcaaaactacaaagcacagataatacacaatggagaaagccgatttcatggtagacccccgaagatcattttgaaaataactctccatttaatttgctgcccttacccccctttttttaacttactgcttttcgaggagcaagacctgccctgctcagtacagtagccactggccacgtgtggctttttacatcttaaagagaaaactattatagttttgagtaagagttaaaaataaattaaatg

SEQ ID NO: 37472 - DNA, 591 bp, Homo sapiens
cttttgtttaaccttactaccttaggttgttatttgttggatatcttctcccttgaagatgcaagttactcagggcagggagggaacctgcgtgtggctcagagtaagggaggactttagtttggggcaggactttgaagggttctcttaaagatgaggagcctggaagcaagatctgaaattacatcttctcctgtcccagagggaatttctttgagtaggggtgcacctatcagggtggtttgatgactgggtattactatgaccaggttataactttcccagggttattctgttaggaaatagtgtttgggatttgatgtttgagtacagagttcatgaacttttcacaacaccagcagttcattagctttttgaaacctctgcccacttaggaatgaggaagagtctataacgcactttacctaacaattcctgctttcgcattgaaaaagaacttagtgatagcaacaacaaaattaggaattaaattacaggctataatgttagctcgtgtatgtgatttttgtgttataaaacagtgccctattatcttttgaaactaagcaattttattacatttaacttgat

SEQ ID NO: 37473 - DNA, 826 bp, Homo sapiens
ttattagctgaagagagctgaaaggaagtttggaattaacagtctagattttctcactaatgggtccaagtcattgacctctaaaattatcttagaacatgccctccctccttcctactttctggaaaactatcagtctcctaccctatgcttgcccatagagttccatgtacaaatcacaaatctgcatttgccgttccctggaagcccttacattcccaagggctggcctcatccactgccaccgaaaacagccccagttcaggcaaagcaatcactccctctccctctctgtcattcctttcttttcctttcactatctctctaccctcctcttccccactctctgtttcctctctctctctgtctctctctctcccccaccatctcctctctctttctctccccctgccttctctgtctctctctctgacacacacacacacacacacacacacacacacacacacacacacacacaccgcagcaacattctacctcagccagagttccaggccaataggtgtggactttgacttccagattcctctggcaagtgtcaacatcagtcctggtgctccctggcagagaaggacttggagtcaccttggccaagaagctgtctggaggtcacagtggcaccgcccatcggccccttggccggagctaggtgagggcagattcagcacagcagcaactctccccataaaaaaatccctcagtgtcttctctaacccttcttatactccttgtgagttttagagccacctaaactcttcttttttcccaatacatggagacaaaatttacataacatacagttagc

SEQ ID NO: 37474 - DNA, 699 bp, Homo sapiens
tgccttattgcttggctcctgaatgtttggtaatcatcaaccctagggtcaaagagctgggctgtaacacagcagggagcccagtgtgcattcctctttgtggtcaaagggaacgacctggagggggagactcagggtctggaaccgcctgggttccttgcccttctggaaggcctgccacctctcttgcctgttcaggccccgtgcatctctctgccacctggcacacttagtactctcggtccctgtccacatatacgatccaccctggtccttgtacacatatacgacgagcctgagaactgtaccattcaccctgcaatcagtcaccattggccagaagccgagtccccatgcttggcaacaaggcccttcccagctaggcttctcctcgctgaggtttccctggtccacgaagcatctgttgttggcagttccttgcactcacctcaccaacccccatctccacccattcattgattcagtcaacagttgtgtgtcatgcacttcctgtgtcctggggtcatttcagccatgagcaaggttgacattcggcttgacaggcatggctgtgtgtggcttgtgtgtgttctggctgttggtcagaggctgtgccacacccgttgttaaatattttgcactgcagatgttggggaggcccaaattcatgctcttgtacccgacgtggagctgatccca

SEQ ID NO: 37475 - DNA, 913 bp, Homo sapiens
tggtccaagtcactgacctctaaaattatcttagatcatgccctccctccttcctactttctggaaaacaatcagtctcctaccctatgcttgcccaaagagtttcccatacaaatcacaaatctgcacttgccattccctggaagcccttacattcccaaggcctggcctcatccactgccactgcccatggccccagtccaggcaaagcaatcactccctctccctctctgtcattcctttcttttcctttcactctctttctaccctcctcttccccactctctgtttcctctctctctctctatctctctctccccaccatctcctctctctgtctccccccgccttctctctctgtctctgtctctctgtttctctgtgtctctctctctgtctctctctttgtctctctctctgtctctctctcacacacacacacacacacacacacgcacacacacacacagccagcaacattctacctctgccagagttccaggttgaataggtgtggactttgactttcagattcctctggcaagtgtcaacatcagtcctgttgctccctggcagaggaggacttggagtcaccttggccaagaagctgtctggaggtcacagtggcaccgcccatcggccccttggctgaggctagatgagggcagattcagcacagcagcaactctccccataaaaaaaatccctcagtgtcttagttctctgacccttgtactccttgtgagttttagagccacatgaactcttcttttttcccaatgcttggagacaaaatttacataacctacagttagccattttcaagtgtacagttccctgccatttggtacattcacagtgttttgcaagcaacacccatatcaagccccaaaacattttcattacccaggaa

SEQ ID NO: 37476 - DNA, 1658 bp, Homo sapiens
atacttttgattcgtccacttctctcccatacgctaggtcacatcgctcatctacagcagtagccttctgagtggtttctcacaattcctgccctcctataatccagtcgtcaccagcagttacagtgatcctttcaaaatgtacatcagatcttgtcattctgctgctcttatgataaagccccaactttgtgtcacggtgttccacactctacgatctggtccctgcctctcctcttctgctaccgccgcaatggccttctctaagctcaagtcaccaacctttctccccgattctgccctatcggacaggtagttccctctctcctttcatctccgcctgacgcactcctccctcccttcaactccatttggagtccatttactacagcgcccagaaccccggcactacggctctttttagtctgaggactagctcctttttgggcccaatcacaactctgaagaatcctgcgcctatccgctgcatgtctcctcactaaactatttcttgaggggacagcctgactctatcattctcgtgctgcattcccaggggctggcctcgttgccgcttgagaaataccaaccgcagccgttgtcccaaagacactactaaaactgcccggaccctcccgctcccgagcctgcccgttagagcgcaaggaaaactcaccatccggcccccagtgcgtctcggaagagctcccgctccgaaacaaagctcacaacttccggaagcgatggccaatccccgtcttcttcgagccagtttccggataggccggctcggggtggccatctgtttccgggtcctggtaggaggggtgcttccgcccatggtcccgcccattcttccgcctccccaacctgggtcccgtcaacggacgcgaaggagaacaggggctgtatatcacttccggcgaaggaaatggaagaatctatgggctgggaccggaagctggggtctggttttgagtctcggctttgtcttaacctgtgttgggcgttgcaccgggcgacctcagtttcttcctgtacaaggaaaagtactgaccaaaatgagttctacatacatttccgctgctggagatttctttggtttttgagacagagtcttgctctgttactcaggctggagtgctgtggtgcaatctcggctcactgcaacctccgcgtcccggttcaagccattctcctgcctcagcctcccgagcagctgggactacaggcacccgccaccacgccccgctaattttttgtatttttagtagagacggggtttcaccgtgttagctaggatggtctggatcacctgacctcgtgatccacccgccttggcctcccaaggagctgggattagttctttttctgggccatgtctcctgtgacactttggacttttgagtttaatgctggaacaagttaaaattttggtaggtgattgggaaggcatgattatgttttgcaatgtcagaaggacatgagatttgggggtccagggatggattgaatatatgtccctgccaaatctcatgttgaattgtccccatttttggaggtgggacctgatgggaggtgtttgggtcatggaagtggatctctcatggcttggtgtctttgcaatagtgagtgagtgccaggaagatgtggttatt

SEQ ID NO: 37477 - DNA, 1331 bp, Homo sapiens
cctggcggagaagagcaaaaatccatcccaaaaacaaaaacaaaaaaacggattggaagaaaacaaacaggagattcactaattagaaccccactgcaataagtcaggcaagacctgtattagggtactgacagaaagtgacagtcaaaagatagtagataaaatgaagaggatttattgaggtatgagatggtggaggatggtctcaaggagtaaaaacagttcaatgcacctacgtgcaaagtctcaaaattaatcatttgtacgtataaaggagttatctttcaaatgaggcctgttaggaagtaacaaagtatgctctttgtgatttctggaaacaatacaaaccaactttccatgtgagatctcagggcgctactactgctgggttcctaactcaaaccattacactttccgtgccaacgtaacaaggaattgaggaggttccattttgggaattaaggagtgtccccaacagtaacagtcccaccttaaagcaatccttccgtattttacctaagagcaatggccagaacctcccttttacaagaatatggagaaatcacaggacatcacagacatcgcccctttcagctacagcgggtggcgcagagggtcaaagcctcaaagcaagcggcggacaagtcaagcttgcgatggcaacggcgagaggcagagaccacaaacgatgaagcccagacccagaagccacgagctggaaaggccacgccaagggaccaagacatactacctttcggggatgtggtttccgcccttcttcttggctgaggagcgtcctgaaaagtcgcgtctccggccccagccactgcggggatgatgccactggctcatgtgggtcccaagaagccgcccacccaatgccaagtcggccaaaagcgccagtccggcgccctcaatgccaggataagaccctaaacaggaaaagactcggcagccacctacgccgcgctccagcgtctcgctattgcgcatgtgccaccgccggtcgtgatggcgtagccacgctggcttactgagactcctgatctgtaaacaggactttggtggctacagcgccctctttagccagaggccagtagcacaggtcaataagggcgtgtatgcacccttcagaattcaaacagtgaggcacagggaagtccctctgcccgatccgccccacgccccggttccttgtgtgttcttctagatatttaccagcgcttacattcacattttgcatattttgtatacatatttactttcacatatatgtatatcctctatttttatacaaaaggagtaactgtacatattctacagtatacctt

SEQ ID NO: 37478 - DNA, 912 bp, Homo sapiens
taaaaaataaaaaataaaaaaatataataaaaaaataaaaataaaaaataagaaagtttcaaaatcaaacacattatctcagaatgcacttctttttcataccaaatcctgtctctactcccactttgattatttactatgaattctccagcaaaactagtgtgatggcagtaatgagtcattctctaactgtgattcattcaccagagaagagacctgtgaggcagcatcctacagaagctgtctcacaatgacctctgccctgctgtgtgagtgtgcatgctggtgtgtgtgtgcgtgcatatgtttgggatggagggacacctttgcttgactcttagcctgccttttttaaatttcagaactggattctttaaactaactgaccatggactagaggagatttcttcctgtcgccagaaaggatttcatccacacagcaaggatccacctctgttctgtgtacgtatctatgtaaaagaaaatggggctatgcttcaagcagggaggacagtcagagctgatgaaatgcatcatcctttctgatccacacagaagaccagctttgtcacttaccttgccagatctccataataaggacgtacatgagaagcagtgtgggacaggaatagatttgaatcttagctttgccactgtgtgcctttgattgggctacttaccgttcctgggcctcagttttcccatctataaaataggcataataataacacctactttatagggttcttgagatgattaaatgaagtaatgtgcaggaagtacgtaatgcagttgctggcttattaaatgttactttttcctttcatcaatgtctctttctaagcctgtacttcaataagagatttgaaggcaaaggaaaagagaagccacttcagataggtaaattaagta

SEQ ID NO: 37479 - DNA, 1808 bp, Homo sapiens
aagttaaatttgtgtaaatcatcagattgagtcattttcctactttaaaacttccattttcttccgatattaaaataaaaaccagacaacaagcacctggggggggggaaatcccctcttaaaattacaatttctatttttaattttgtcttcagttataaaatttattttaaagttatacaaaaatgaagtggttggattgtggaattacgtcttttaaaatgttatttgtccaatgaacaaaaaccactcgcaccgcaactccttttactatcaaattctgcaccgttgcaaaacttccttcactcaacgcttctttacaaacatcgcgatagcggagcggtctcttgggcgcaccccgccgcatgttcaaccccacccacttcctgtctgacgatctccttacgtcaacggtgcgctggagcgagtgagcagcgatacctagggcggaagtgctctcggcggaagtgatcgctgtgtgaatcgtgggtgggatggccgcgggccgcctctttctaagtcggcttcgagcacccttcagttccatggccaagagcccactcgagggcgtttcctcctccagaggcctgcacgcggggcgcgggccccgaaggctctccatcgaaggcaacattggtaagggccggaaagcggctgccaagccttggcctccgccacgcaggcgacagaggctgggaaaggagctgggcccggaatggcctgcgtctgatgcggccggcctctttttctgggctgcgaggagagcctttcccctcgcaaagtgcactgtgtatctttgcctccttgtttttaggatatcgggcctcagtacccgcccacaggaacatatttgttggggcataaaagccacgcagttagtggataggacaagaattgtattagctgtttgtaatagatcgaaattgaagcgacaagcgggtgcagtttatttgttctcctagatagggttgccatatttagcagaaattaaaaataatatccagttaaaatagaatttaagataacgaataatttttagtgtgtgtccaatgcaatatttgggacatccttacagcaaaacaacaacgaaatcactcattgaaagttcaaatttaactgtgtcctgtattttatctggcaaccctattcgaagagagttcctaaatttcagtcgttcaaataccacattcacaatttttgccctgtgcctgtgctagttgcataataatttcttaaggcttttcttagaagaacctcactttttaaacttaaaaacatgtattaaattaaaaattattttgttaaaagagtgagatccagtatcttgaataaaaagtagtcagaaagcaaaatgaaggcaaagcatttcgatttaatattaataaattctgacttgatacttttatctaccaagtcactgagcccctaaaaggggcttagcaagtgttgagtactgaagacgtagcagcaaactgagaatttctttttttattcattcaacaaatcaccttttgagccacttccatatgccagcactgttcttggcctggagaatacagctgtgaatagaacaaataaaaatctctgctctcatggaactcaagtagggagagatggacaataaacaacataaattaagcaaggtgaacaatatgttagagagtaataagtatgatggagaaaaattagggatgaagaattgagggaagtttttattttattttatttgagatggagttttgctcttgttacccaggctggagtgcaatgacacgatctcgactcactgcaacctctgcctccctggt

SEQ ID NO: 37480 - DNA, 1469 bp, Homo sapiens
cagttctcttatctgtaaaatggtgatgataataaaaactatgtcatagataaggaaagttaacatttgcacatttgttgtatttgccactctgtgcagacagaaggataatgtgtgtggaagtgctttgaaaagggaaagatctatgcaaatattagttgataatatttttagccaatacatgaccaaagaagtaatacatccaaaatcaaataaacctcccaataccttcagtctttaaaaccaagcccaggtatggatatcgggatgtatttacatttctgcaaaaggtccccatacgcaaatctcattcttaaataaggacaaattactcattagctgaagaggagagaggtcaagtacctgaggaggttagtcacatcaatcacctgagagttcagcagcatccaacagtgttagttccacgtgttaacttcctgaagaaccacaggcttgcacatccaattatgcttcctgtccctttcctcccccgtgcggaatcaacttcagctcatcaatggggtaggaaagcctccttatttcgcaccctccatgctccaggcatccagggaaatgcccctgccacccctatctcccttgagttcttagggcttcctcctctagcaaggagatttccctttctagtcccgggggcagcggcacagcccggctctgacctcgcgggagcagtcgcctaaaagaggctccgcccttggccgcttggggtggcgcccgccaaacccgctcctaaaaggagcctctctccctctgtctgctctaagcgccttgggggcctaatcgcagtctccacctgggtgctgaacttccttctcccccgcttgctgtagtccagtgctgctctaacttgacttcacctgacggactaattaaaacagattgctgggcccgcccccagggtttctgattcagtggggttaggatggggccgagagcttgcatttctagccagttcccaggagatggtgatgctgctggtgccggggctctcttggcggaaccactgcgtctaggctaatgcagccccaggaagggctcgccctatccctacgcccacccccgctgctctcctgccctgagcgcaatgtgaatgggaatagccgcagcagcccaggaggctggagaaccagaaggcaggacctgaggagtttaggctgttttatcttgggcgcccctgaccagtttgtgcaagtcgtaaagaaagcaggaaagaagcctatgggtcttcagtgttactggggtctgtcattcattagggtctactcacctcgtctcttcattcaacacagtggttggttgctaggtctagggttatgaggtgaaagacagcgtgctacccttccaggagtttgtagtaactgggaaagaaacatgcaaaccattccagtgcccagcgccgatgagataactgttcctaggcagggagagtcaaacttctgtggagggagagt

SEQ ID NO: 37481 - DNA, 3097 bp, Homo sapiens
ttattaaaaatatattacattaaaaacaattacgagtctgcaacctgttcccctgtttgaaaattgcactctcttggtttttcgtctcggttctagtcttactaccctgaacagaaactcttcagtcctcccaaaggccatggtaggaagtggatattgcagccatgttcacccccacccactccctcgctgacaacctggaccctggagcaggctgtcaaaatcagagggaagttccagatagaacccgggctgctttaccgcctagggctttctggacagcgctacttcagatcagttacttttttttctttctttctaaatagccggccgaatgctctttttccagttctggctaagctgttagctgcagccgggcggcgacgcctgccaggtacctggctccgtgagcaccgcccaaactggtcaggccagtccgtcctgtggctgtttctgccaggactcgcccgagtgtgtgtgtgcgcgtgtatgtcagagacccaccctgctcccctgcaaccgaggtaggtggaaggcagttgcaggcaccagcctggcagtcaggccagatgggtggggctgaattaatctaacctggaatttcaacttggcctgcacaacaggtgagggaaaaaagcagcagagagaacgggcagtttggcaacttggaaatattcctgagccctgccccttaccccctgcctggaacgtagcccagggtgactcttcaaagtgtctgcgccgggttttagggcttagtcgccccacggccccctcgaggctgtccgaggccctcctgaacgctgtcctcctcagttaccctccgcgacgcgcccgttccccctcctctgggaggcagggcgggggtatcggattagtctttgttttcgacgcgaaagaatcgagcgcggcgcgggggaggctggtgatggcagggccgtggggtccacctggacagggcattcggccgtgacccctgcgagggtgcccttagcctctgcccccgagcaaccccttcttgccggccaggctgactcggtacgcaaacgcgcgatgtcccccattgtcctgcctcggaatgagccagcggcagctgggacaggggggtcagtcgggcccggcgctcaggcctcccgggggcgccggggctgtcccggacagatctggcccgcagggagtggcaggaagtggggacaccgagcgaggctcggccgagggcctaggctggaaggtccgcgtgccccaccccgcctcgccggccccggctgcagccccgccggagggcgagggtggccaacccgaagggggcggccgcctcccgggagggccgaccgcgtgggtgggagccactgcaggtgcagagaagcggcggccgggccggagcctgccccaagccgctcgcaggccgcccacccgacccctcccctccgcgggaaccacccccctctcgcccggcccggggcccggccgggccggcggggctcggcggggccgcacgtgtgcgccctcccgggcgggggagtccccgggcgagcacgtgccgcggtgcgcggggggcggggagtcccgcggacgccttcattgctgctgctgctgccgccgcggccgccgctgcctcttccttcctcctgcgccgtcccctcctcggcccgggcggggggctccgcgcgctgagctcggtcgggccgggcgctccgggaggcgggagccccaggcggcggcggcggcggccgcgacggtggtggcggcggcggcgcgggccgggaaactttgcccctttgtgcgctccgccccggaggcggcgggcaggtcggtgcagtcggtgcctttccggctccggagtgggggaggggcggcgggaggcgcggggggcccggcccgggggagggggaggggacggcccggatccggcggggggccgctcctccggtgcggggggccggactggggtgctgcggggcgctgtgcggctgagccgggcgggggtggcggggcgggggcgggggctgcgaagccgccggagcggagtggcggaggccccagaacaaaggagcccgagcggcggcgcgcgcgcggcccggcccgcggctcgagcgcgcccccctccccgcgcccctcggcggcgcgggccgccctccccagtcgggctggcgggctgcgctccggcggcgggcgcggcgggcgcgggctgcccagggcgcgcccccacctccaggcggcttccgtgccgggggcgccggggcagtcccgccgagcgaggctctcagcaaactttattttgaaagctcagctccctagggagggcccggcggcctccagccagggcgtgtgggggaattttggtgaaactctcaccagcccgtgggggtggggaagagggcaactttcttagaaatctcaccttgatcacccccttgaatccagggcccccagcagccctcaggcccgaggccgcctccctcagacagggagcgggtgctgggtgcgtcctgcctgaggttctgggcaggacctcaattgagcaagccccatctcttcccccattttctcttcccagaaacaggaagaagtgacacgtgaaagttgtccctgagccccgagtgatgcgcttcccctttctgtctttttcaggcagcactgccttctccagcgtccagaccctggaggaaaaataccaggagaaactgctcactcagctctgcccccaccacacccctacctgctcaactcatgcctgggtccagggtgggtgagggtgaagaacccaccgggccaagatgatcccttttctgagggctgctgctggtgtcctcccccagatcctgggccccagcaggtgggagagtggccccctacggagtccgatcagactgctgcagaggaggtgaagaggggttgagaagaggcatccatccacgagactgaagccacttgccttcacccttgtagactcttgactgttctaggcgagaaggacctgttggtggcctttggaggtggcaggaaacgactgtggttctgccccagcacctatgaccccacctctggcagcatcatgagccagtttcaggtgcccctggccgtccagccggacctg

SEQ ID NO: 37482 - DNA, 1323 bp, Homo sapiens
aggctggacaggattgccaggagtgagggtggggtggagctgcttctgggggcagaatcttgagggtaaaggcagagagtaaccagatggcagacagaatcggcagctactaaggggtgagagaggtgagcgttgcagaatccttgggagaagcctttcatcttagcggatctgtgggcagcggcctttagtggaacaatcaactgacatccccagatgatcactgtccacgctgaaagtcaccgcagtggaagaacttctcttcatgcacagggcaggcaggttcagaaccaggggagaaggaaaatgaaagttaagagaaagaatggtatgagctgaagcaaaggatggttcagaaagggggagagattaggagagcgcgtgggaagtgccccctgcttgggttctgctccggtagtgtgggatttggaggaggatcaaggtcagaggcccagtcgaccttcccaaggccccggccccgctgcagtccctcgcacccacgccttgactctgggctatgactcctgtcttctgctcggtaaaccaatcctttttttttcctgtgcccgcagtattatgactgttcatgtgtctgtccgcctgacctccaacctccacccagctcgggagctcccctagagcgcgccagagcttgaaatttcgaatgccgttgtcgctgagtgaatgaatgaatgaaagaatgaatgagagaaaggaagaggagccccccattgccagtgccgcgcgcgccctccgggagccagtcctcaagccccgacagccgccggccccgcggtccctccgcagctcccgtcccggggagagcagccccgaccctgcccacgctcaccccgcggatcccgcggaggagaggcgctgccgcggccgggctccatgcagccatgcccggccgacgtgacccgccgcccgaggtcactgtatgcccgaaagacgcggagcgggggaccgagagccgccgccgtgggagaggccgccccctgccgcccggaggccgtcagcctcccggccccgccccggaggcctccggtcgcctggctccggccccaccccgccatcccctggccctggctgactcgccacccccgacactgcagcgcctgccgacctcggggccccgccctctgccttcgctcgcgccgctctccttcagtctccccagggcctgtttcatggatagggtccccttgcccgcgtgaaagtctcattcctcctcagctcagaaacactccaaggtctcggcgccctatactggccttccctcatccgaatacccctcgtgctcctgatgtacttttccattcc

SEQ ID NO: 37483 - DNA, 1492 bp, Homo sapiens
aatgagattctaaggtatgcctatcaagttaattgctgtagtgcactaaaatggcaatactgtgtttctgcaatgggactatgaatttgttttaactttccaaattatttataatactgcaatgtactatataataatgctgtatggtatattacataatgattaaaaacacaggattctaccgaggacaagagaagttggttaaaatcaaagccagtaagtgggcagaatcagaactggacagaacgatccgactccaaggccagcatcttaacttcaagcttctcaaactgcggcaacgcacattctcctggggcggcatttaacaccgacaataatgaaactggacctataaccgagcaacgagttaagtcggcaaggacggtttctagaagctcgagacaagagaaactgggggctcgcggctccgcccccagatcgtctccccgccctcgggggcgctcgggcggaaaagtttggaggcgcgacggccccggggcctttctactccccagccttcacgctccgtttcctttacttcgaccttcatctctgtcggcctctcccaacatctcggcctcccccgcggacccgaacagaggcaaaacaaacgccagctaccccgcccccgcctcggcccccaggccgagccctcgcctcaggtccggggaggcctcccccacaacctcggcccgcaggcccggcgcccgcggcccgaccccactcacaagaggaagctcatcttcggtcctcagaggggaggcgaggggcccctggcccccgcctggatcaggattcggagctggctagagggagcggaccgtccttagctcacgggcagcggaagccgggccgccgccgctcggagccgggtttctggccgctgcgagcctttgcaaacctcggcgcccgccttgcccgcctaccccacctcgcagacccgaaatgcggaaccaacaaaatctcgcgagctaaggtttcgctgcgccgggagggacttgtcgcgccccctttcgctccgcctcgtcctagaactcggccaatcatcgctctccaagccaggacctccctcccccggaggcgtggcgaggatggcggtcctgcggaaggggcagtggctggtcctgctcttagagtatcttggtgctgctgggtttcgatcccgctccctaggttatgcagggacctctataagcgctgcgtactcctgcaatttttaaaattgttaatttaatttttacttgaaatatattcacatagcataaaatctgtcctttaaacatgtaccctctagtggtctttttcggttttttctttcttttttttttttttttctgaggtgtctcgctctgtcgcccagactggagttcacagttcactgcagcctggacttcctgggcttaagtgatcctctcgcctcagcctcccgagtagctgagaccacaggtgcctgccaccacgcccggctaattttctcaaagtttttgcagag

SEQ ID NO: 37484 - DNA, 537 bp, Homo sapiens
catggacttttaaattactacaaatgaaataacattcttcattttttaatactggcaaaagttaaaaagattgacaacttcctgtgtcagtgaaaacatggggaggtggcctctcatctgctgcaggtgtaatgacacagccttcctggtgtgggcagcctgtttcaacattcagtgtgcatgccttttgacccagtggttcgatttctaggaaacgatcacaggaatataattacactgccacaccctgtaatatgtatacaaggacgctcgatgaagctttgtctgttaggccaaagaactggaaaccaccaggttttcagtagaagcatgattacatcaattctgtatgtccatgttgtggaatatcccccagaaataaataaaaaatatgtgggtgaactcacatactgacaggacggacactaccatcccattttataaaaaagaaaaacacacttgtgtgtgtgcacacatgtgtctggagaaagcaaaagttttggagggatccatgtcaaatggttaacaatgattact

SEQ ID NO: 37485 - DNA, 599 bp, Homo sapiens
aaaaataaataaataaaataaaaataaaaaatatgtggaaaggcctacaaagccctgtaacttgtgaacacagtatgaacagaggcagaaataactttgcttgactagcgaatagtaaagaaccctagcttagctgaagtaacgaattgtagatggttattctatcaaactataagccttttgaagcatagcccacaccttttcctctttatgatccaatagccagtaagtagctcatggtcaaatatttattgaataaacatttattgaataacattgcaacatactgggaggtaactgtgggtaggcacggagtttaacatcaggcagacagagaaggacttgatccaataataacaggaaggcagtcttgttcctgagcaggagactgcatagtgaaaactattttaggaagatcaaactgatgacacctgcaggatggagtgcaggcaggagcaacctggcaaagacaggaataacagcaaggaggctgctgcaacatttgacacagggtaaggaaggtttgaaccaggatcaggaggagaagaaagaggccagttcagagacagtaccaaaaaagccctgagaaggccttgtaa

SEQ ID NO: 37486 - DNA, 1730 bp, Homo sapiens
tagcatattaaaggctctgcaatattctgtagtaaagtttaaccacgaattttccaacagctttcgaaaacaaaatgccttttttaaaaataaagttatcattatctcttttaacatctcatagcttaggctttggcagtacattaagtaaaggatgtcaatctctacctcctagctcttcgcctctcggtaccttaagtatacctgagtagccagtggtcaacatgggtttgctgctctcctcactgcaataaatgacggtaagttttcaaatccctgcctctgaaacagcagagatccttatctgtgtgatttagctgtggttctgtctaaagacaagggatgcgcaagatgacctcaaggatcatcttgccagctaaggcggaccccaggagtaggatcacacacacaagtcatatccagactcccatgctgtgagtcctttacgatttttctccccgtttgagacgaatttctcaaccatgtgcccacaggaaacctgtagctcagtatggattcaggggcgcctcagacgctcgcaggaacggaggggagacccttgcagttctggaggaactctaaggcgcagtcactctgatcccaggagaacaatgctaggctgaagagctgaggtgggtcagaccggcctcggggcaaacgctcaggcggagcccccggaccccgacaagcgcccacccctgccagtccccgccccgcacaccgggctcggtccccagcccaccgccggcaacctcacgaacacgtagggggccggcggagcagacggttggcagagtcgcgcctccgtacctgcactgtgaggggctccgcgcccagctccgaccccaccgacgaccgacgcccaagaccctgcggggccggccccgccctccccgccctcgtgggctgcccgactcgccgccagacccttccaggaccgcccagaacccttcggcccagaggcccagaggcgttctgggtcgagtgaaccctcttttcccgcagtccagccctgactgaaaactgcgcaccgaccgcagccgggattacatcaatcaggcacaaagctggacacctgggacaggataagcgcacgcgcactgtgcctgggaagccgattaggaccataagaaatcggcgtgtcgtggcgagcgccctctttcggcggaggggagaaagcgcagaagggctggaggacttatttgcaagtgttaaactgctaattaaaacaatagcgataaaccatatctcctccattagcctgggggagaaaattaaatgttgctgctactcagtgttacctgtcatatggggatacaggcattctcatgcgcttatgatgggaatgtaaaatacaaatttacataatggcattttaaaattttagacataggttcaaattcttttttttctgtttttaagacaaggtctcgctctgttgtctagactggagtgcggtagcacgcacaatcatggctcattgcggccttgacttctcaggctcaggccatcctcccacctctcagcctccgtagtagctgggtctgcaggcgcgcaccaccatgcccttttaattttcgttttttgttttttgtttttttgtaaagacggggtttcacaatgttgcccaggctggtctcgaacccctgggctcaagcgatccaatcgcttcggcctcccaaagggctggaattacagacatgagccaccgcacccgcctgggttcaaat

SEQ ID NO: 37487 - DNA, 506 bp, Homo sapiens
caagggaaccctggtggtaggggtggtttctgatgggtctagctagtgagagctccacaccttgccctttccctggagaggcaaagatgcacacactgcctcccttcccctcctgccctgtatacaggaccatagcaggggagaaagggaagggttgatcttgcctttcccttcaggattgtgtggctgacatggtgacggcagatgactcaggcttgctgtgtgtctggcggtcagggccagaattcacattattgacccgcattccaggatttgggtaggtgaggcagaaagggtagagggcttcctgagatagcttcaggctggggagtaggatttgatctgggcaaaacaaagttgggtgtcacccttgcagagttccgtgcccctctgtgcagctgtggcaggggatcatagcagcaggctatgggaacggacaagtgcatctatatgaggccactacaggaaatctacatgtccagatcaatgcccatgcccgggccatc

SEQ ID NO: 37488 - DNA, 1407 bp, Homo sapiens
tccaaaatcagtattctgttcactacccaaaggttctcaaactgcttctcagagtctcagtggtcccatgcggtgtctccaggtgcatttaggtaccaccataggtcccagggtactctgctccaaccaagaagctctgctctatccacataaaatgtatttgctaggctgagtgctgtggctcacgcctgtaatcctaccactttgggaggccgaggcgggaggatcacttgagcccaggagttcgagactagcctgggcaacatagtgagaccctgtctctaaaaataaaatgtatttgctgctgctaaaaaggtaagaccccagggcctaagtctccctgccttcccactggtcttctggactggcttcagcccagctctggggcgtgggctggaatgcctcccagctacgtggccactgctcattcatatctgtctgcacatcctggcagcaatgcaaaatgggttctgcacactcaacacagttcaaaggtcacctgtgggcagaatacaggcagctgagggtggtgtcggtgtgcaaggccttacccaacaactggggtggggagcaagatgggactgctccctgaacccccagcactgtccagcgatgcccggacacgcctccctgaggagcggcccagggagctgctgagtttggtggcaagcctcttggggccgccagtcagggccccctcttcttccacacaggccccatacagctctaaccgcagttcaaagtctggccccgcctcagcgctggtgggaggaagaaaggagggtggtcacaggaaagtccagggaggcagagggtaggggatgtgggtgaggcaagtgcaggacagctccacagagaaggccaggtgcccctcctctccaccctgcccccatcccagcttcctcccctggaactcgctcatccagaactggagcagagtggaggaaggaggtagccacagtgtgaggtactcacaagagcacattgctctgaaaggagatgtctgtgagggtcctgtccactaggatcatctctgtgtcctggatgtgttcccccagctgcagcagcaggaacacagcccagcggtgcaagtctggggacaaagggcaaaacaaaaaacacgtcccacgagagcctcctacttcagggtcattcccctgaatttgtcccagggtgtgtggaactcaccacctttgttcttgaaatattctgtgtccttccacatgagtggaatccggaggtctaaggggcagaggggtaagaatagatgttgagatggggcaggaggccgtgtgcttgggcaaggggtaccagcagctggggtagctgtgcttcttaccagagatgcagacccggccgcggcagggggagcgctcagcgggcgggccactgtcagaaggcctgtgg

SEQ ID NO: 37489 - DNA, 2823 bp, Homo sapiens
gactctggccgctccccagcccccgcccacatccctggcctggtggacagggaatctgtgtgcggagagggcagtgaggggcaggcacaactggaagggggcagggaaacgacgcctcatgcaggttctagagtcatggggtttgcaggaggttggagcttcccgagaggggttccagcttagtttgagaaagttgggaaaaagagccacacaggtgaggacctcaggggagagtgagcccagggaatgggacaaaggggtgagttggcaaagcagcccagccctagggccaccccttccaactcagggcccccatccagcccgctccaccctgggctcacaattacctcgcttttccagagaagggaggagagggagagaggaaggcaggggtgtgcctgtctgctgctgtccccgctcccttctgcaggccccttcccttccagacaggaaaccagccccgattccgagccagctgcagcctagcgcccccgcctccacgccaggcccacggagtcacacttcactcggcggccgccaggccctgcggctccgccccagctcctccgagctgtccccgaaggccgggctaatcccaggggcggccccagctcacaggcccctccccctggtcccgggcctcgccccttactcccccacgctggccccacgcgggttcctcgggcccagtcgcttgggggcaaggggacgcgacaaaggccccctctccccaggtccactagcttctgagtcagagaaggcccgggacgccgggacaagggtgtgaaagagcctctttgttctgggcaggctggagggaaagggcagaagccaggcctggaatcccagccgggaggtagagggggcggaaggaaggcccacctcacttaaccctttccagacccggaagggaaggcttggaactgggctctccttgggcgagtgtgagtctgaccttggggacagaagagtcttcggggtagctattcgccctctcagtccccgctcaaccacacaccttcagccccgccctagcccttagggcgttacaggtggggatccaacaggttaacgcgtggacggcggacgggggaaacgctcagcctaggggctggactcctcttaggccccagaaaaggaggcggaaattttgcgtgtgggaagtaaccccaaggagttaaaagccctgcaggggcatagaggagcctttgaattgggcttcggggaagcgagcggccccggcctaaagtcggggttgatgacagaggctggcccagatggctgcgacaggttgtgggatggggctggcgactggggaacaagcgggagcccaggccaagagtccgagcgcttggggcccgcctagctgcccaccgcccttggcccggggatgcccaagacattttggggttcaggcacattttaggagtcgagctggggccctacaaattgagaccaacccgggctttttccaggctcaggcagataatcctaaccaggccgcggaatgggcagcatggatccgatgaaaatgcagaccgtccacaccttactttttaagtcaacaactccgtcgggtttgtacccagaccgtgcgtctccgcccctcggcgtgcacgcgggcgagggaaggaggccgaggtggctggggctgcccccgggagccgcggaaggggaaggcagggacgcgagtctctcacctcgggcaggtcgctgaagaggctgagtcggaagcggccgcgtttgaactccatctccagggcggagcccctggccacggtgacccggctccggtggtttcgggagaacatgctggcggccctgcgactttgcctgctcagtgcgctccccgcgccgcccggcttagcctcctctcctcggcttctgtctctcgacgctcgtccgccagtccggccgggaatctcccgctgcggggctccaaaccccgcccccggagacgacacctgggccgggcagggcgcggcaacctcctcttccacccccgccaaaggcccagcccgtccggccagtccctgggcgccaagccgacctggcccgacggccccggagcccccaggggcgcactgcacctcgcgagcactgtgggagcgcgttctccctgcccgcgcgggtcgcgagcgcctacctggacttgggacggaccgagaagccctgccccgccagccgccccaacctggcaagcctggcttcccgggcgctgaaaaccccgtggctcagggatcgccgcgtagcacgctctggctctactcgggccctgggaccttgcccagtttcaatcccggcagcctccgaagagaccatttcaacatcccacagtcccaaatgttccttcttcgtccccctccccacctaggctcctctgcgaggctatccgcctaagcctagtggccacaactgatggggcggtgcttaaacacgtcgtgaaaccccagctctgtcactaactaaccgtgcaatcattaacttggtccagtcactggcctttctgagcttcagttttctcatttgttcagtgggaatactgtaattatctccactcctcaagttgctatgaggattacctataagaatgagggtaaaatgcccagcatagtgcctggcacaaggcaagtgccccatatttgcagtcataaagagcagctgcgcgcggtggctcacgcctgtaatcgcagcactttgggaggcctaggagggtggatcacctgaggttgggagttcgagaccagcctgaccaacatggagaaaccccatctctactaaaaatacaaaatttagccggccatggtggcacatgccggtaat

SEQ ID NO: 37490 - DNA, 646 bp, Homo sapiens
agggttcccttcttgccccctctggggaaagcccagtggaagagaaggaaatggcaaaggattaacttgctgatcacacataaacagatctcctgaaggcttcagaacacagaacttgagaaagggtgagactcctacatggcaggctggctggacccagagacataccagtcttgagctcttagagagtccagattagaaatgttttgctatggcaaatcatttcaacattcttttggaaaagctgactgaaaagtactaaagcaaaaggggaaatgcatcggctcctggaactgagccaatacaaacaaatgagccaggggtcaagctttagatgtggcttaacccactcattgagtgtcaggaatatccagtctcttcccatcacttggctctactttcctccacgttggcttcactctccacagtgtaacgaaattgctgcccaaaattctgggtctatatcttttcaggcttaaattcagctgaaaagagagcatctgtttcctgaggctcctacacgtctgggattcgctgtgagacatttgtgatcattcatccatcccaaaccaatcattggagtcagacggtggccagatctgaaccaattgctgtggctaaggaggttctaggtgccagctggcca

SEQ ID NO: 37491 - DNA, 1214 bp, Homo sapiens
agatctcaccattgcactctagcctgggcaacaagagtgaaacactatctccaaaaaaaaaaattaaattaaattacataaacatataactaaatcaattttattaaagcaaaggtgacaaatattcaaaactcatcacttcctaattattttactgcattttacgacgacgtcttgagtagtttacatctttagtatctgtatggagggaatgctatataaatgacatgacaatgcacatctctttccaactctgtattcagtgatgtctcatttgaaattggccatggtgggagtccttacacaacagaaataggtgaacataacaaatccagcctggtttttttcccccctggggagcttttgttaaacatttaccaacatgccactggtttggtgcacagtcttcccaactttatctttttgtttatgtctgtatctatatctccccagctatgaagtagatatgtgggaaaggggctgtgggtcacctagggttcaaatcatcttctatttctgcacagttccctactgtggacagtattgacagaatgagctctagcccctttatggcagttggagaacatttatccttcttcccactttttcacagcctaaaggtaggcacttggcctaacccaactaactggaatgttcccaactggactttgaatattgagggagtgcagacaagacccagccagagttcatgatatacactcactgtacctgcagtacctgagaagggggtagtggtgccagcagaaaatcctcatcagcatgttcaagccgcctgacttcagtgtggccttggcataacctcagccataagtttgtgctgcctggcctcctttgagtctcgcttcttatccagtgaaagtatgagatgagccccaaaacattttatccagggaaataaaaatattttatccagggaaatttgagtctcacttctttccagggaaagtacaagattagccacctagcatggtggctcacgcctgtaatcccaacactttgggaggctgaggcaggtggatcacttgaggccaggagttcaagaccagtctggctaacatggtgaaaccccgtctttactaaaaatacaaaaaaaatagccaggtgtggtggcaggcacctctgatcccagctacttgggaggctgaggcaggagaattgcttgaacccaggaggtggaggttgcagtgagccga

SEQ ID NO: 37492 - DNA, 1292 bp, Homo sapiens
caagctgcttaacatcccactgtatggatacaccaattcatcaggacacttagattgtttaaattctgtgtcaatctcattaattacttacaactcaacttttcttagcaatatggtgttccgcattgtacagctgcaccgtaattcatttattcatttccctacttatgaaaattgaagtttaaatacctaaactgcatctgctcttagggcactcgtgctgtttaaccatttcggccattttgtcatcaatatagtttatgtattcctccacccaactgtgagttcctcaaggacaggggcggtgttcatattcatctttgcatcctcttagactagcttcccgcacttggtctagtgtatacattcaccaaacttgtgttcaataattgactcatccgcgctgagttctgaaagctagcgtggggaggcggagccaggggaaagccctgcccatttgggctgtcccgacctcagagggaccggaacgttcgttggaaggatcctcgtttctcagggacgattttggacgcgaagcgtgccccgcacaaggatggttgccatgaaccggaagtaactggttgttttgctggctccagtttttccgcggggcggaaaaggcgtgtctgcgtgtgtcccaaccatttctagtcccctttcctcgcaggacctcatgagtaagctgtggcggcgtgggagcacctctggggctatggaggcccctgagccgggtaagcgcgaatagatcaagcaatttaggtcgtgttagaaaagaagtcccgttcttgctcctcggagagtccagggtacttcggccacaggtggcaaggagaaaggcggtgctgttgttatggtaacagcgagtactgcgggaagggtgggatccagtaggggcttaggttattcagggcttcccctgccaccctccggccaaacactgtcgacaggctttccttccacaggagaagccctggagttgagcctggcgggtgcccatggccatggagtgcacaagaaaaaacacaagaagcacaagaagaaacacaagaagaaacaccatcaggaagaagacgccgggcccacgcagccgtcccctgccaagcctcagctcaaactcaaaatcaagcttgggggacaagtcctggggaccaagaggtgaggccaagagggtcatagttttataaggggaactttaggagcagagatagtagttagaagccgactgggctttctagaagaccgaatggacactgtgacttcagggtccagatttaggcagcaagagtctaaga

SEQ ID NO: 37493 - DNA, 2390 bp, Homo sapiens
ctgggaaagctggtacagttttggtgcacaggtcaggcaggtaacattactgatgcttctccccttgagagataaggacctaaagctaaatgtcaggagatctgggaggaggcagtatttatgaagaggaacctatggaaggtgtcctggagagggtgctcattaattaatatcccgcctccgaaggcctgcactgctcaagaccctgccttccatgtcccttctttcccctcccccgatctggccgacctcgcctctccatcttcctccattttcagacagcaccccgtctctgtctctccctagcgagctctgctccagaaggcgcggagtcaaccttcccctatgctgccgctgcctgtagctgagggctgcccacctcccgccctcacagaggagatgctgctgaagcgcgaggagcgggcgcggaagcggcggctccaggcggcgcggcgggcagaagagcacaagaaccagactatcgagcgcctcaccaagactgcggcgaccagtgggcggggaggccgggggggcgcacggggcgagcggcggggagggcgggctgcggctccggcccccatggtgcgctactgcagcggagcacagggttccaccctttccttcccacctggcgtccccgcccccacggcagtgtctcagcggccatccccctcaggcccgccgccgcgctgctctgtccccggctgtccccatccgcgccgctacgcttgctcccgcacaggccaggcactctgtagtcttcagtgctaccgcatcaacctgcagatgcggctgggggggcccgagggtcctggatccccccttttggctacgtaaggcccttaacccggactctgcgccccgtcccatgcccgctcttgagtatcttccccaccctattaaattacatccggtgcttcggcttgtacagaactgggggagtgggatgttgtgggcagaccagtctccggtatacacgtattttgcccctgtcggagcttgcgtcgatgcctggggcttggaaaccaccgcaaaaaaccaggctgcaaaccagcggaccgacttttgggactccgcctcttccagccgggattacctggcgtgcttcggcctttggcgtcattccgaaaacataccgcaagccaatcagcggcaaccttgctcttcggggcggctgttcgttggttgatatgccagagcctgttctgttgtctgtattggctattgccgctgtcagtcagggccgtgggtcgaaccttcacctactctttgtctgtacaagctcttgttgtctgggtgagcggcggaggcgctgctgtggattggtcacagggagaaacctctgatctgttcctattggcccgtccgtcaagggacgatgatgattggtagggcagagcaatctgagtcctagttggtggagttctgcccggatggaagctccggccgcggagtgatggtggcctcagcgaagatgggccgggcagggaccatggcggtggcagcagaggtggcaggggcggggcggctggcggtagaggaggctgtggtcctcagggggctgtaggtggaggtatggctcgggccagcagcgggaacggcagcgaggaggcctggggggcacttcgggcgccgcaacagcaggtatcccaatagctccaaaacctatcacgacagccatttgtctctttcccctttccttgtcccttccttttgggggtgggggaggaactcacggagccaaaggtactgtgaagttcctaaacatgtctcttccactctttgtctaaactttgtaacgtagatgcagctgactttgcctgtagcctcatagaacccatcccatggctgcagtggaagcttgcggtggctctccagtgaccagaggcatagtgaggtcccagggaggctccctctgtcttgcaacagttatttgtgatctttttctatgtgcctattgtcacaacagagtccggcagcgtcttctcttgagggagcaatttggagaagagctggaacccagactcgcgccctggatgccatcctttatcatccacagcaatcccatctggttgggagcactgctctgggtctcacactgcccctcctctatcctagggagcctgaggcccaggggtggaaagatccagttgcgggtggggggtagtgaaccgcgcaggataatgaaagcaacttgctttggaaatgacctaccgctacccgttgtctgagactgagattatctcagactgtcttctggcttctgccaaaacactcccttaacagaaagcaccgaggggatgggggtaggggggttggggagagtgaggcttgagtgtgaaggaagtctcatatatgcagagctgaaatctccctctttgtatgtccac

SEQ ID NO: 37494 - DNA, 1787 bp, Homo sapiens
tacaggcgtgagccaccgcgcccagcctctttttcatttaattcttacagtcctgtgagttaagtgctattattatctacattgtacattttacaagcaaggaaatcaaggcttagagatggtaaatagaaatggttatacaggcagttgtttaaggcaggatttaagccaggcagccagagcccacttcatgctgcatttgctggcagcaagggaaggatggagggggtctgggctgagaaaagggtgtcctgaggccctgacctgaggctctacagtcactctccagctccagtcccctccgtgctgacccccaggcctcttgacgaactcagtggtgagccttaaggccccatcctggatgtgttggcgcccgaaggagaggccgtcgtggaactcccagccatagggacccacaccgtccccctgctcacacgtgtgcctgagcttaggagtccccggggtggtgccctgctgcgcccacatcagtcctgggggtagaatggccacgtaagtcaaagagcaggggacctgtccctccgggtctccgggtcatccctcttcataactctcctgatccattccttcccacccttgctctcgcttcaagctggggcgcccagattaggagtccgcctgcctgcccgccctggggcccggttaccggtgaggaggggcttcgggctgcgggtcttcatgccgaagtagacgtgagggcggtaggttccccagaagaggtccggggccacggcggggctggaggagtcggcaggcaacacaggaggcgcggagtgcagcgtgaccgcccgccgcgcacggtaccacgccagcacccagcgccccgacatacccagggccaaagacaggaccacgacggccagagccactcctccagccgtgctacgcggcccgccgccccggccgtcccgtcgcccggggcctccccgagccgccctctcggctgtccgcactccctctgccggcactgcgcggcgccgccgctcgccccgagccatcctggcactgaggtccgcgtcacaagagctcggagaggcggcagtggagcccgggtcctgcctcacctctccggctcccgcctctcgccctggcgaccaccgtccggttagcgacacctgccagccagcgcctgcgcctccgcctccgcctcccgccggaagtcccgccccgccacgttaggttaagtcccagagtccggaaccgctgcctgcggcttgacacagggttggtacgtagcgtctgtcctgggcgttggtccaccgggattgcgtttatctggcgaccccatggagttcacaggctcggaaaaaccaatctaacgttgggctgaggcatgagaatcgtttgaacccgggaggcggaggttgcagtgagccgagattgtgccactgcactccagcctgggcgacagagcgagacttcgtctcaaaaaaaaaaaaaaaagactgatgtggccaggcaccgaggcgcacatctgtaatcccagcactttgggaggccgaggcaggtggatcaccagacatgaggagttggagaccagcctggtcaacttggtgaaaccccatctctactaaaaatacaaaaattagccgggtgtggtggtgggtgcctgtaatcccagctattcgggaggctgaggcaggagaattgcttgaacctgggaggcggaggttgcagtgagccgatattgcgccattgcactccagcttgggcaacaagagtgaaactgtttcaaaaaaaaagaaagagagagagagagagagatggag

SEQ ID NO: 37495 - DNA, 2094 bp, Homo sapiens
gtattttctagtagaggtggggtttctccaagcaggtgatctgcctgactcggcctcctaaagtgctgcgattacagatgtgagccaccacgctcagcctatcagtgttctttcacacaagatttggtaaaagtaagagggctgggcacagtagctcacgcccaacactttgggaagccaaggtgggaggatcacttgagcccagaacttcaagaccagcctgggaaacatagtgaaaacccttctctacaaaaaaatttaaaaattaactaaacgtggtggcgcgtggggcgtgcctgtagtcccaacttcccagctacttgggaggttcggctaagcccaggttacagtgagctagaatcatgccactgcactccagcctgagcgacagaaacagaccagtcaaaaaaaaaaaaaaaaaaaaaaaaaaaaaaaaagaggtaccttgagtgagtggtaggagaagccagaagccaaattcaaaagggttaagcagtgagtgatagtaagaaagtgaaataaattcaggttcatccagacacctctctgatctagtcttgttccagaaacattgtggtagcagggttttaaactttattttgcgctccgtgacccttcagatagtgatttgaatgattaagtgaaactcttcttaggttaagtgtcctagtccacgctaaaatcatcttgttggtctctttggcgctgtcagcgaccagtatcagcgcccggcttgtccccgctgcccgccgcgtccctggcccggatgtgggaggcgaaggcggtgagcatttccagagcggtgagatgagcgccgcgcataatcaggcgatgcccgtctcctggggaagaaacaaacgagtgagacagggagggaccgcagtgctggggcttaggggcgcgcgggctgctcgctgttccctcctgcccgtctccaccaagcccaccgaacagcacgtccacgcagggctcggagccgtcatgcctcacgtccgcaatcactgagcagttgagattagtggagcggaccttctcactgctcaccgtctgcaggaaggtcctacggtggaaaaacagaggagcgccaagctgagggcttaaagccccggctgaaggaaggcgcaccacttcccgcttctacccacttccccttcgtacctcgtcgattccacgtttttctcgaagggacagaactgaacccgaacctgtttgacaggccgcagaccaagccgagccaaggcagctgccatggtgacctccgccccggaagaactcgtgcaggcggaagtgtcgcattgcgtgaggccgtgaatggctgcgcttctgcgggatagacttccggccgccggctgcttagcaggcctgcgaaccgcagctctgggcttcctagcccaggcggaggaaggcaggaaagaaagaggtggtttcggcacaacgcatgggggagcccaaagtaggctgtcagcaaatacagcctatcatgaatagtcctctcatacgacggtgaaaaccataaataaatggcgcaaaaacctctttgcacgaaaatacgcccgttttctgcagcctttccccttctgtaccctgctgggccacatctaggctaactcgatcttaaatcctggcttcttccaaagagagagcactaacacaagccgggatgatccacaccagaaggtaaacaccattcaggtaactgaagattaaacgtagtgagctctgaatagccaaagcttaaacgtgaaagtactacagcccaatattagtaaatgactgaaaatagtaataggaagggcagtacagggtaatactgtccttggggctgatccaggtatagaaatgcctattaaacctctgtggttctccatgaattagcgtagctcccaggacttaagttgaagtgcattctagccagttttctttttttgagacgaagttttgctcttgttgcccaggcaggagtgcagtggcgcgatctcggctcactgcaatctctgcctcccgggttcaagcgattctcatgcctcagcctcctgagtagctgggactacaggcgcgtgccaccacgcccggctaattttttgtatttttagt

SEQ ID NO: 37496 - DNA, 1971 bp, Homo sapiens
gggtccagtattggctccacaaggccccagcccctccgagccctagtccacagctggctgaacccgccacgcccccgaccaggcccagcagccctggtagcagatccccctcctcttggcaccgcctgcggagctggtccctcaacgccgatccttggagcgcctcgtccagccgacttgccacctggcaaccccgctcccccgtcaagaggcggagcacacgggacgtggggaaaggacgtgcggcccctgggacgtggctcaaggcttttctctgtagtgtgtggtaggcgggaagtgcaaagagcagctcggcgagttgggacgacaggcccgggctggcgggctcccggccgagagcgcgaagctgcatctcgatgacagcctccaggcactgggcggctagtccgatggggcgcgctagcagcagcggctcgagagtctccccagggccgattcgcagaaccgccccttgggaagggtgcagctgcaggtcgcggcaccactggggcaaggggctagggccgccggatggcgagccaggactcagggtcttcatgagtcgcacagccgactgtaggtggtaggcgcagtctcgggcctggaggagctgctcccgctcgcgatgcagccgcagcaacaccgcccggagacgctgcagcgcgggagggatcgggccgccacctgcgggcccccgcctccaggccgcagcatcagcctcgtagtcctcgctcacatccgccggcgtcggccaccacggcgtccctccagaagttccgctcggccagcagtgaacctcccagcgaagaccgcccgttcgacttctctcccactgctcctccccagtgcccccgggttgcgccctcagcgggggcacgataacgagtggaggcaggctacctgagcgagacgcctgggccatggggcggcgggtccagaacgaacctaacgattcccacttccctgcacggaccaacgcccgccgcagctcggacttcgccccatcgcaagagccgttttctccagtccgggagtcgcggggaccttcatggactctctcgtgctccgtaatgggaggcttctgcccctaacaaacatggccgcccactctgtcccaccccgccctttggctggtatcaaatactagactacctttcatttccgggtcactgtagatgcgatggcgccgattccaaagactgtggggcggatcaagctaggtgagcggtatgacaagaccagtgggggtctaggagggcagaggcagcccctcttgggtccacctgtggtctgaacgtttcgagtaggattttatgcagagggcggagagtcgagggtagagtggggaggactctagcccatctgtcccgagcccgctgacgaggctccgccttcctttcctgtagactgctctctacggcccagctgcccactggaggtcgctgctgcacccaaactttgcaaggaattcggtccagaggattacggcgaagaggtaaaagcgaccctcagtttcccccagtcctgctcattttggtcacgcctctttgaagtcagctgtgcagaaacccgcgacggatgggcgccagacggggctctggaggctttggggagttgtagtctccggccatgcccttgaggatcttaggcaagtgaggggcaggggatcaggaggatgatcctgatgtaacagatgctcgaagtgggtagaattgagcagacaagggtctctgagttgaggattagggagtgggtacgagttccttgggaaaagatggaggccgggcgcggtggcttgtgcctgtaatctcaacactttgggaggctgagacgggaggattgcttgagcccaggagttagagaccagcctgggcaacatagtgagaccccatctctacaaaaatgtttttaaaaaatttagcccgcgtggtgggtgggggatctcttgagcgcgggaggtcaaggtttcag

SEQ ID NO: 37497 - DNA, 1455 bp, Homo sapiens
gcagttaggaaggtgacacaaacccaccaggaaattgaattttaagtataagactgatgaaagtgcctagcagtattggagatgctgttaagccaggactatcttctgagggaagccttggatctaaaattgtttagaaaattgaatataccttagtcatctgaagtcctgcctacagatttttttttagcacgctggagtttctaagtttgtggcttctaactcaataagtccaaaagatcattggcttctaagcgtctcagtcagtcctgctctgtttaggcctgattaggcaaataggaatgtgatcattcctgtctttgaagcttatactccctgaggaaatgactcccatcaggaccacagaatgtgtgggccaggccttaaagagtcttgccttattttgtgaatgagggagaggtccaaagaagttaaatgacttctccagaatcaaacaggcaggtagtgtcagagtgaaaatttggacaagctggacatgatggtgcaaacctgaagtcccatctactcaggaggctcaggcaggaggatcgcttgagcctaggtgtttgggtctagcctgggcaacacagcaagaccctgtctcagaaacaaacaaaaaatagtcggccgggcacaggggctcacacctgcaatcccagcactttgggaggctgaggcgggtggatcacttgaggtcaagagttcaagacaacttggccaacatggtgaaaccgcctctctactaaaaatacaaatggtattgtggcgtgtgcctgtaatcccagctacttgggagggtgaggcaggagaatcgcttgaacacgggaggcagaggttgcagtgagttgagatcataccactgcactccagcctgggtgacagagcaagaatccacctcaaaagaaaaaataacctcagatgcaagtggctccactccagcacaatgccctttggaattccatgctgcctggccaatgaggagagcaatagaaagcaatcaataacaagtttctaaattgtgtaacacagataatgtggttgcaggttagttggaggaggcagagataattggagatgaaagggtctgggaaggctttgaagggagatagaatttgaactggaccttgaaggtgaggcaagatgtgagaaagaagctcaagagttaggagggattggagagcagctgggggaaggccccaaggctggagggagcctggtggtgggagggaggacagcagtgaagcaggggaggattaaaaggagggctggaaaggtcagcctgggagccttttggaaggctctgaatcgtaggctgaggaattaggttcaactctgcctatggccttggcagtgggggattattggatgtccctgagtagggaagtaatttcttagagcttagttttgtggagaaacagatgaggtgcagaggagcggccagccaggagctgctgt

SEQ ID NO: 37498 - DNA, 673 bp, Homo sapiens
agatagggctgataccatcttgtagggctgtcatgaggattacatgagttgggtaatgctaattgcagtgttacctgtttaaacaaaggagaaggatttggggaggctgagacctcaagacctgcttgactttgcaccctatccccaggcatctccgggactgctggcagctgccttacaacagagccaggaactggcaagtgagatcctttctctctccgtcctcaccccaccctccctggggtagccccatctgaaccttctcaccctctttcctttccagagttgggtaccagctttgctcaaaatggtttctaccatgaggccgtggtcctcttcacccaggccttgaagctcaacccccaggaccaccggtaggtgggggcttggccagggcagggcagagtgttgaggactcagacctttggccaccttctgtctttatcaggttatttggaaatcgttccttctgccatgagcggttgggtcagccagcgtgggccctggctgatgcccaggtggcccttaccctacggcctggctggccccggggcctcttccgcctgggcaaggccttgatgggactacaggtaataggtctggggctggaaacaggagagatttgagtgggatggagtggggagagggtctatgttgactttctagataagct

SEQ ID NO: 37499 - DNA, 3055 bp, Homo sapiens
gtactggaactcgagctggggcgaaatcggatccacagagaggggtaggagggtgagtgattaatgaggaagattaagagattaaaacttgttctgggttggggaggggacactcactcggctgtcctataggttaccccccaccccagcttggaagcacagaagctcctgggtgctcgcctcttcccacccgcgggtagaaccctccctgttcacgatccttctcaagagatgcacggaggccagccttcaccgctggccccgcggggccaacggttttccttttcaggcagtctcttgtgtttcccaccttctcagattcctttgattgtccattcagacatttcggggccctgcgctccctccccttgtagagatccccacattccaaattcgctgtcttgggaaggcaccccattcccgcttaaggatgcttcctcacacctcccctttcagatttcccattctcacccctcagccctacccccaccttatcttgcacccacacaccccatcggcgggttcctccaccccgggccgcccccgctcgaccccgttccccactggtggcacggaggcctgctcaataaacgacctttagtctcggattgccggcccggacattccactgaattctgtgaatgtgtagcagggttggaggaccctcggaataacccccttggggaggtggacaaggacaatctcagcgaagagcttgctcccctcctccccacccttaggaaacgtccgtgaaccggagtgagagggcagtgggagttcagggagcaaagtccaggcggaggagcgtgaggcggggcttccgtccgtcccgcacacttctgggattgttttctctttcagaaagcgctactgcggagtgaaccggtccttatatcttagtttcgtgactttgggggcggcaggcctgtgagttgttttccgccctggacgctgttttgcaaagatctctgcgcgcccaccgccaccctcccgggcgtgcgggccgggaagcagccagcggtgggaaactccgacgccctcctcgacacttttctccccccaactccccaagactcacttctagggaagtcctttttcccatcaagccctgggaaagactggccaggctgagagagggacccgtcctcctctgtgccaaaggcgggagcaaatcctggtgctgtcgcctttggatgtgagtcctggaaatggcgggggtgaggaaggtgggcaggggcaaggtttggccctcaggcgagaaccgacgccttgtcccggaagcgcagcacggccgagtgcgtccgggggtgcagacggcgccctggggtggtcctgccgccacctctcctttgactcaggagcgccgcgccgcgtccgggcgcgttctcagtcgcgcgaagccagagaggaccctgggcgtgattctccctccctggcacagacggagacccgagtgaccccggggtccgggtgggcgtggggaatggacccatagacccgggacgagcggcgcggagcccgcagctggccagcttcagccaccttgggagacgcagtgcagctgccgctgctgacagacaagaccaaggctcggctgggccccaccccagatccggcctgagcgccttccgcgctgctcggcctcaaggcgtgagtcaccaagggcaagtcccgtgacttggtcctcagggtctccggcctcggcacattaatcttcagacccggctttttcgacgccgagctgccgcccagccccaatggcagggccttccagggagtcccagtcagactgctccccagctcccgcagctgctcggtccctgcaaagcccccgggagcgtttctactctcccctgagcccacgccatcccgtcactcctaggaaacttttcgcgcagaaactcctggagaacagccccggccgccaggtactcgcccgcccggaccgcaaagcccacagagcttcaattcgcaggaaggggagtggggagccctgagctggggtgttcctggaagaggtcggggagcggggggagaggcattccaggctggaggcctggaaacgtttggaagctttgctaaccttggagaccatgtcaggaaagaagcgtacccaggccgtctgctgtgtgcccaccccgatccccatcagtgccccacgcactcgagctcttcttcggcgtctgcagcctcttcatccgcgcggagaggcggaggtctcccggaaacagtgtccgactgtggcaccccagagcgtccaatgcgagctcaggcctttcccgcaagtctggagttttcttatccagttgaggccgccttcgctgtactcactctctgcctcccaccccatcttctgccacccgacctccatctttgatggttagcgccttcagccctcaacagcttcgcacaaccaacccctagaagccgtggagtcagaccggccagggtgggacctaggttttaactcgggttctggctacacacgctgcgcctccatacagtttgtcccaggtttggcagcaggccggctaccttcaggaattctttgctttggcttctgtctgttcctgtctgttgggcaagtttctagctaccccactgagagaaccatagaacaaggaccctggcatggcatacagacaaggaatgtttgctgaattaatggagctggtgccttgcagcttcccttttgttccttgaagttgcccttgctctcctccacatcagctccctctcctcctcagctacttattccccaccctggcttcttctagtcgcagtccccaagtacttgctgaatcctgtatggacagcctaagcctccatttctgacaattcctgtggccccactccatttgttttttagacttctccctcctttttgtccccatcccccaagttataaaactataatgcaattctttggatttttctttaaaaaatcacacttgttcaatcctgcagcagccactgtccaactctagccttctcaccaccgctgaattaggaaacctcctaagaggcccgcacccgcactgtatgctgcagcata

SEQ ID NO: 37500 - DNA, 2041 bp, Homo sapiens
gcactccagcctgggcaagactccgtctcaaaaaaagaaaaaaaagaataaagtattagcccttcctcactttttgtccttccctcatctttggccttctgcctacgtgagtcctaccaaacccgtcacctcaagctgccactcagcaattagtcctcaagaggcccctcaaagtcaggttggtgactcactgtcttgcaagccaggcaccagcttatacacgatgtcctgcatgacccggtccagtttgaggttgagcagtggctgtgtctcgtggatcttaatgttgcacatggggcagtacttgctagtttggaggtacttcacaatacaactcttgcagactgcaggaaaagaaaagcagattctcaggccctctggaaactggattcatgggctgggtggggtgcctggatgcgtgaggcaggccgcacagaagctggcagtcagcttggtgaagactagggactggaagaactaggcagtctccaaggcactcacaagtatgaagacactctgtgatggtggtggcatccacgaagtagccggcgcataggcagcaaacaatgtgttcattcaagtctttgatcttcactcgaacctcctcctgaagatacaccctccgtcaccaatcatccaccctcaaaccccaacccgtgcgccttcccaccttgggggtcgcctccttcatcacactagacggccaagccccgcgccctgcgccatcagccggggattagctcctgggggctggcactccccctccgcccagcagagggctccgcgcacagcgggggcttccctcacgtggactcgcctgaccctcctttcccaggggagactacacaacgtcggcgacacaacgcgcaggcgtcctaaccggagtttggcaacccgatcgcaaccacgcaggcgcactgggcactctgtctctgcgcaggcgcactgggcgcccggccagccaccgcccgtcctttagcccgccccaattcgcaccgctggccgaccacagcagtaaccctgccgcccttgcacctcgttccgtagcgggtccatcttgtacactgactggagctggttccgaagcctcatcgcgatcgcaatctggcccccctgaggagacgccatcttaaaggctgatcccagccggccacttccggtgccgcctgcagggcgggacttgtctcccagcaacgaggttctaggtcttttcggattcgctcaccctctgtaaggccccgcccacgtccctttctccctgtgtgctcacctgagccccaccggcccctcccctgctcaatccgtaattaaggagtgggggggggggagcacagggaagggtcttatctcttcaacctcctgtagaaatcatcataataggccctacgcgacctcaagactaactttcggagcctgcgaaagactgccccctcctacccccaaaggcctggcagtctgtgcccgctacccgctcagggtcgtcggtcttctgtgacgacgaccctgctgaagaagcccctcctgggtcctctcctcgtaatgccgccctgtcggcgtccgcgtagcggagcttcgtccagatggcgggtcttctcccggcttcacggagggagtttcttgggctttgcagagtctcggagagggtgccgggggatggggagtgagagacccccagggacttggtagtgatcttattcccccattctcccccctgctgccggggatggggggggcaggccctggttaatgatgatgatttaatcatcggcgcctgcggaggcctgggacagactaatgcagagcagatgccgaaggaggaggggaggacgactaggacactgccacacacagacaggcttaggcagcgagcgcctgtagtagcataggcccagtcccgcacttggggactacgcggggtgctcgctcgagagctctacaccgccggctctgggtacttaaaaagggataaatttgctatgaggtattaacatcaaatgcaactggagatacgagaagggagagattccaatggagacctcaa

SEQ ID NO: 37501 - DNA, 2360 bp, Homo sapiens
gcaactgtcaaactctacaagcacataattgaagaatgaagggattcaggagaaagaacttaaagtggacagaaaggaaatgaactggagatgatggggtctaagggccgaagaaagttgtaaaaactcaagggcccacaagcttgaccacctacccagctggcgccccatacctgtgctaaacccacctgaagcgcaggagcccctcccggccattggtggcctcttcctcagggaatagcagcagaggagtggggggaagcctcgtggaagcacagaatctcttgagtgactccaccaactccccccgcccattcatctccatgaagccccgagaccagcacacaaagctggggggactattgagtagaggctgggaaccaggagaagagaaagcaagaagaaaaatattgaggaaaatgaaaaaaaaaactgacatgttgggtagaggatcggggttaggggtaaggctcagtatcctccatggggaacgcgagtggggacaggggggccttcagctgggccccagggaaccgccccgtggcgctctcggcctcgctctcactcacggtgctacaggtggtaagcaaattgactatgttgtggtcgaaaggtgtcacatggttggaaatgaggaccctgacactgtgatcccggagtccggagtcctcctgccgggccacgagccctagcaccgcacacatggtccgcactacgaatctggggacacaggaggtggtgactgtgtggcctcgggccagacccagctctgacactccccgaacgcccgcgtcggaacctgcgaaggacgctgtctggcagcgcgcagctgaccaggaagacgtggatcccgagaaagaggcgcaggacgaggaggcagaacccgactggcgcgtagagcagcagcacgagcagtaggaagcagtcacccggaagcctgggggcgagaggcgaagtggtcaggcgccgaaggccgagagcacgcggggatcggtctcttcccgccgggtctcttaccggtgcgagtcaaagagccgctccggccccggccctgagggaagctccataactgctgcttcaggagcgcccggccgtcgccgccgccgccattttcgcgcccggccgcaggggctcttgggaaggcggagtctttgggcatccgcccggggtgaggggacccgaagtcctgaggcgcgccggaagggctagcggtcccagcataccccgcggccccttgggccgtctcacaactcgcgtccggcggagaccacaattcccggcattcgtggggcagggaggagtcggcctcccggaatcctggtcccggcgtgcacttctgaaggacttcaggtaccggcgtgccccgcgtcctactgtccgcctgctcgcgtcctgggtgccgcctctgagtagggcgggcgaggaggcagccaaggcggagctgatggctgcgccgagggcggggcggggtgcaggctggagccttcgggcatggcgggctttggggggcattcgctgggggaggagaccccgtttgacccctgacctccgggccctgctgacgtcaggaacttctgacccccgggcccgagtgacttatgggacccccagtctctgggcccggttgtctgttggggtcactgaaccccgagcatgcctgacgtctgggaccccgggtccccgggcacaactgactgcggtgaccccagataccaggacccgggaggcctcagagaactctggaacccgttcgcgcgcgtggctggcggtggcgctgggcgctgggggggcagtgctgttgttgttgtggggcgggggtcggggtcctccggccgtcctcgccgccgtccctagcccgccgcccgcttctccccggagtcagtacaacttcatcgcagatgtggtggagaagacagcacctgccgtggtctatatcgagatcctggaccggtaatggtgggggtagaccgggaggcactgaagccacaggctggagggcgggcgggtaggaggggtcagagcctcctcttatctgtgctttccctccatttcaggcaccctttcttgggccgcgaggtccctatctcgaacggctcaggattcgtggtggctgccgatgggctcattgtcaccaacgcccatgtggtggctgatcggcgcagagtccgtgtgagactgctaagcggcgacacgtatgaggccgtggtcacagctgtggatcccgtggcagacatcgcaacgctgaggattcagactaaggtgggggctggggtaggccaggtctggttggagctgcttatttgctcgcatcttcagatgacaggtctcttttacccattctcccttaggagcctctcccc

SEQ ID NO: 37502 - DNA, 690 bp, Homo sapiens
atggcagtttctcaaaaagatcaaagtagatgttccagggaagggagacgttaagcacaggcagtttccagggtgatgcgtttccctggaagccggactggaccccagggctccagcgcaggtggagaggttgggcctcgccaaaagagatcctgggaaacttccaggacttccaggagccccgagggctcgagcgttcacatacgcgccccgccccggggcggcccgggcagagagactggcgcggtctctcctggcgcccttcggccatcgcgcgccgccgtccccgggcccccggaccctgggcgcccagcctgcgcgggacacacccaggcgccgcctcccaggggcggccgcgtccttactgaactcggaaatcgctggccggcagcgccagcgctggaatcgcccccgcgcctgggagtggcctcgcgaggccggcgcgcgccccggggccgaggaatccgcctgcccgcccaggcgtcggccacgagagagcgggagcctcgctggtccccatttcaggtactcccttggggcacctttcgtggtcccacaagatttcccaactctccagctttgcaacggcctccatattttcccgcgcgtcccgacccccgggtcctcccgtgccccggacctgctcagatgtctcccaaggctattcatcagggagcaccccaatcccgg

SEQ ID NO: 37503 - DNA, 1209 bp, Homo sapiens
ccctgggctctttaacaatctttaagaccgtaaagggatcttgaggtcaaatttgagaaccaaagctgtgatgcaacctctttttgaacaaacgtggatgcctcaccaccacaatttcatcttttctagcctccatgactttttcttgtttcctctggctgggctgaatttcttcatttctgcctgccaaaagccctacccctccttcaagagcatctataactggttatccttgaatttggtccagatttcgctgcctccttggcaccctcttccacgatgctgggccctccagggccgggcctccctcggacacgtgccctcgttagccttggaatatgcacactctgttttgacggagactctcttgcgagcctggtctagatttctcccctcaccagccaggcacaggcaccaatgggaggtgcctgggctccacaggcccgtcggggccagagggtcgccggtagcgtcaaccaagtgcacgacagcccacgggtggctaggcgcgtgggaagagccggagcccgacccccgcccacccggtttcctggcagcgcactgccgcgtaggggcggagccgcgcgcctacacagggtgtggcctccagcccgcgcgggaaagggcctgcgccgcatgcgcgcgcacagtcggcggccgcgcgcagcacgctcaaggccgggatggcggcggcggcggcggcaggaagcgggacgccccgagaggaggagggacctgctggggaggcagcggcctcgcagccccaggccccaacgagtgtgcctggggctcgtctctcgaggttgcctctggcgcgagtgaaggccttggtgaaggcagatcccgacgtgacgctagcgggacaggaagccatcttcattctggcacgagccgcggtgcgcctgcagcgcgagggcatgcgggagtgggggaggtggagtgtggggcggggcctcggggcctcccgcgggcggggcttagggcggcgtggcccgggttttgagatgtgggcgtggacccggaaggcggaggaaaggggccggggacctgtgcgagttttgttaacactcctccctcttgttgaggacctggatagtgagtgactttaatttgtatctccagggcctcgtacagaacttgtaggagtctttagtgaatgagggagaatactgggaagagggtagcggaatggatcttcatgaagtccag

SEQ ID NO: 37504 - DNA, 1263 bp, Homo sapiens
catttatttgattttcttcactaaaaacaatggttatttgtatcttgaatatttaaatacatatttgaaattttctttattaatttcacttataatcagggagtgttccccatttcagaatagattttcagtcactgagtctacacactgcatccaaattttattttagccacactgcttttccatttccttgtgttttctttttatctcagcccgtacttacttaaagaagcattgtcttcctgcatcccaagtagtatttaattcatgagtatggggcaggaaggaggaagtttggaggggagagaaaaacagggccatgtacttttcagccttgacaagatcacaagacacatggtaaacacaggactattcaatgagttaccactttcagtggtcacaattcagggtcatgttgactgaaatggaaaattgccaggtacctcctgtgctgatcagagatccgaagtgcagtgctgtttgctctcatgcgagacatatttttgtgacagctgattcacaggtatcctttgggtctttggaaactacagaccctctctgccagccccacttcatttgggggatagcttcactacagagctaaggaaattatgcttcaattgcttgtgaaaacgatgtctgaatttcaaacctctcttccagctcttgtgtcctttctctccaatgttgccttgaagcaagagcaaagatgagattcctctaatgggtgagtgcctggagaaggaggccctggacttccttaacggggaagaggagctgactggtgacctaggccttcactgatctaagaaggcagagccctggacctgaggcacaagcagactacatgctgcagcttgcccagaacaagaccctgagcagtcctttttttttctgaaatcaggttgcgcgtcatccaagatcctcttacaaagagaagccatgaacttccttggctcatggaaccctccacttggctcagaattgccactgtaaatcataatgtcaggtttgcatttcaactcttagaccaccatgtgtcaaccctgcctagagaattagaaagtaaaactagtcctcgcccaaaggaaatccaattgaaaccctagtcccttcctttttatacaatatatccagagacatcaggcaaaacaaaacaaaacaaaaacaaaagaaaagtatcaagaaattaaaaactcattcaagcaacagaggaacagtttagtcattcaaaccagtgagcattttcatgtatttttaaat

SEQ ID NO: 37505 - DNA, 2632 bp, Homo sapiens
ggagaaaatcagccatcttactaaagagtgcaactttgaaccaacgaagggacaaatatcagactcttccatactccgcatgccttctgtcttcatctcatctacagcttcgtcaaatacctcagaaaggccccaaacacagaacatataaacatatactctctctcccacacacacagtctcacacacaggcagcctgtgtgaggttaactgcatagaataaccaggctgaggtactccatcagccccctccttggtcagagttaatgcatagtgacagaagccaacagtagccctgggccacttcaatcactcacttgagcagctaaacattttctgcaagacaaagctcttagaacccttcatttttcaaattagagaatgacaagcttaactcccaacctggagacctttcatctcaaagctcagcaaagcagagcagtagctttgattacgtagtgtgtctttactgagaataaggccagagatggccacccaggagacaaccttggacccagccccagacctcagtcctggcccagtggaaaccaggcacctacctgagacaaaggaataggccgctaggatgttgctgagcaaagccatctccacgtgctctgggctgtggctgaggggcagcctcatgggacatccagaggggacctcctggaggtgcttggctgaatcaacgtggccactctccttcttctcttctgtttgggaacataaagtgagtgataagaaacattctgctgtcctgaggccatgttccaggtagcctggactcctaaagacatatttttgcaacagctgatttgcaggtgtcctttggggctttggaaactacagaccctctctggccagccccacttttttgggggtatagcttcactatagagctaaggaaattatccttcaattgcttgtgaaaactatgcttgcaaaaactagccaggctcctaaagaaagaccagcgagctctcccagccagtggggccacaaagatttggggtcttgtgctctttgttcaagcgagcttcctggctttcaaggaagtagaaactccttacatccctgattttcctgacctttctcctttctctgccctgtatcttcctaattcccagtaaacaattcccccttaccacttctggaactctttatttgattctccctggttcacctttgaggcacagcccatcgggttcaaatcatcgtcacattcatcactgcgttttaactacaagccacagccctctcctctcctgctgtgctttcccgggagcctgcactgatgacacttgtgtaccttgatcagtttgcctcatccctcaggtcactaaatgtgtgcctttggcagtggttcagagctggctatcccagaactgccaaagcagttctcattctaaaatatctacaggaatttgagagctcgagctgctccctgcctctagctccatgactccacctgtgactgtgatgggccagtagaacacacacatggcccagactgcccatccatagaaccatcccaccagggatcagaacagggacttgggatctcagtgctccagcctctggctggaggagcacatcctctccccagctgctgcagcacaagcctggcattagcattgcccagttactcagcaaaggctttacagagagctcctgggcacgaagtgggagagaggtggcagagacccaattcgatgctgctatgaactgctcatgaacagctcattcgatgctgctatgaactcaaggcaggcaattgagtcacagagtgtagaagggtgtcaaggcttggagaatgaacctgggatctcagtgggtcacagatatgagtaacatgggccacaattagaaggcctggagagcggcagttccgtgaggtaaatagaatgggctataacagaacactctctggctggtagatttcagcaggcttcaggaaagaccaaaacaagaaaacaccaaccaactcacaggcacaaagaaacaaccataaagtccttggagcggccagaggctctgagagtgacaggagaaggagtgggagctccagggactttgaaaagagactggctgctgttaagggacccttgagccgctgagccagaacacagcgcctctttcaacagtcatttgtgttcctaaaaggtggcaactggatgatacacgtgaatggtgagagccatcaaactgagttcagaggctgttctacagatctgaggacttcaagacccaggaaaagagtgaagctactggaatatgtctgagtttgtagtgagccatgtgtatttcaaaaccattccctccttcctgtctccactaatgttaccagattgcaagtcttatcattttatttctgggagttttgcaacaatctcctacctggtctttctgatgatacctccttccttctcaatatagcacccattcttattaacagggtcatttttctatagtacaaatatgatcacatcactccacaacccaactctaatgaatttccattgacctcttaacacaatacacatccactttcacaatatctgacctctgccttacctcctaatgtatctcctatccaagctgacagtcacacacatatacacacagataataa

SEQ ID NO: 37506 - DNA, 592 bp, Homo sapiens
aatttgtacaccaatgttcagagctgcattattcacaatagccaaaaggtggaagtaacccaaatgtccatccacagatggatgaataaataaaatgttgtctacacatacaatgcaatattacgcacagccttaaaaaggaaggcataagcatggattaaacttgaggacattaggctaagtgaaataagccagtcaaaaaggacaggtattatatgattccacatgtatgaagcaccaacagtggtcatattcatagagacagaaagtagcggttgtcaggaacaggagcagggaaaagataattattgaacagggtacagggtacaaagtttctgttttgcaagatgaaaagagttctggggaaggatgatggtgatggttgcacaataatgtaaatatacttaatgccactgaactatacacttaaaagtaatttaagatgacgaattttgttatatgtattttaccacaatttaaaaattgtgttggtgaggtaaaacagggaattttgaaggttactttatttaaagaatcttgcaatcaaattttggttttaagttaataagaatgatggcagagttatctttta

SEQ ID NO: 37507 - DNA, 1708 bp, Homo sapiens
ggttctaaaacttgtttggccccagttggcttctcagactctgaaagaaaaaagaagcagcacaaaaaccatcatatacccaggagatcacatcataccttagacctggtatgtgtgtgaacccagcagagaagctttggtggctagtgtctggatccttggaaggatgaatagcatccccagagaggagaaagcccattgacagagtgtaatctggaatttgaactagacagccagataaaccagtctcccagggtcataccagaaaggatgcaagaggtaaaagatcaaagaaacatgcttcctctctgctcctgtcagccaaaatccacaaaacagctagtgtgggatgtcccaatctggcccctcatcagtgaagtttgcaggccagcctctctggaacaggaagggagggaattctgtttccttctagcaatgcccagatgggccatgaaatgaagtctcacacagctctgtaggaactagaatcctggaaatgctgatatgtagattccgacaccctatgccttccttgctaaagtgtcaaggcctctgctaggcccaggtaggaaatctcctctctgtgtctagcttcacttagaagcttgcaggaagaatgaaatcagtcatggagctctgagcattgagctgtccccacttcacgtgtgcacactcattcattcgtcatcatcacacccttccaactactgtggcttccgacttctgcttattgattactttatagagacacatctcagctatttcttccccaaaatggattggtgtcactatcctacgttaattttacaggtcaagaaaataagggcaagaaagaaaaggaaactggaagcatgggatgggtaactgtctacagactcatgtaccaaagtgcagaagtaggtctttgaggcccattgaccttccactctacactggtgaaaactatcaggcactgaccctaggacagtcacagggagtctgaagagcaaaagctcaaatggaaaaacagtccttatatcaccggctggggagaggatacacatggccccagagaaataactgagctgagagaaaccccgattttctttgtagcactgataagcacctggggatgatacatctaacatgccagcctgccagccacttggcttccactgccccatcaaccttcccctcccaaccatcacagtgaatcatttccagagatgtatcctggaccttgtcatcacctggaaaggttttacctctgaatactgggttgtgaactccgtaagggcagggaccatgccttaattcttatctttgttctcagagtttcccacaataagtgcatagagctaatgctcagggactgtttgctggatgaatgactcacactgagaaatctcactctccaatcggaacctctatcttacctctctgatgtggtttggctgtgtccccactgaaatctcatcttgtaatatagttcctataatccccaactgttgtaggagggacccagctggggggtaattgaatcatggggcagttacccccatgcttctgttctcctaatagtgggtgagttctcatgagatctgatggttttataaggggcatttcccccttttgctcagtacttcttgatgctgccacgtgaagaaggacatgtttgcttccccttccaccatgatcctaaggcctccccagccatacagaactgtga

SEQ ID NO: 37508 - DNA, 1904 bp, Homo sapiens
tgtggttggcactcctctccttccaggacatcctcatttcctccatgtcccaacgcgctccgtactgcgtgccaacacctccccttacccctcaatagtaggggtggggacccccacgcagacctcccagatagagcagcgtggactgtctgcgcgcccctctccaaaagcaaagcgtcccactgggactttagggggcgccaacagcctttcactccctgatgcactcggctttcggggtcctgggggtcgccaaatgcgcgcggcgagttggctgcctccgaaacaaaccaggtaaatagtccacggtgcagcacgtacatttctggcaggtccgccccgcgcaggcttgggatagaagccagtcaggctcagcccagctcccagaggcacaggagagaagcgctagatttgggaacgacctgctttccgaagctgggctgcagaggcagggagttgagagttgttctatccagaaagaagcagggggggcgagagaagaaacaggaaagtgggaggaagaggaggcaaaaaagaaagcgctgggaagcagagttccctgtgggacccagcctacaacacctgggcagggacttgggaacaaagcagctgcttcaggtcagaagtgctctgggtgtttccgaaaagagggcgcttcggagaagccggagcccgctggggatgccgggcgcccccagagttcagggagcgctctcgggcacctcttacctttgctggggccccggcgcgcacttccggggactgcgcttggggcgcgcggggccgagcagggggacccggagctgatcactgaggggcggacacgacaaagcgctgcccgggtcttgggccggcaccagtacctcggaaaggaatcccggcggaggggccgccggggtcagggctggcctggggatgtggggtcccggcctgggtgctcacggacggcggcgccaagccccgcagaagctgcaggagcccgagtcagtgggaggaaaaggttgtctcatttccttcgatctcccccctcctccacccgcttggctccggacctgccctccctctcccccgcccccttctgcaagccagcggcccatgtgggcgcccgcaagacgcgaaacctgaacggctgcggcgtgcggcacctccctccgcgccaagttagttcacgctcccaactcctgcctgcctccccgcgctgccgactgtccgcaggaccggggaggttccccatcggcagtccccaacctatcccggtcctccaggctttccccctgctgggacgagcccagatttgaaagcagacctccaagcccctgccagcatccatcctctcattcctgtcccgtcgcctgctttgagcctgtattcagctactcaactcagacaggaaataaccacttactttgttaaatttgatcaacttttttttttttttttttctgagtgggaagttaaagcctgatgcataatctcgaaggaatgttcatttttatcggaagaaatgcagctgaggcctctgtttggcctttctctttcagggttggggttttgtttgttaaaatcaacaagtattttattgagagtgatgggcgctcagctgggggctggaaacgcagaaacaactagagggacaccctgttcctatacaatcgtcataggggaagagtgcagggagagaacaggtcccgggttgcggtggtctcttaagagatgggtcacggagtgaaagagccttctacagaatcaaaataaaagcttggacagagggaagacggaataagaaagccttcaggaggcggtctagcaaagagcacagccagggcagtgagtgatggtggggaacagggaggaaaatattgtgccagtccgttaggaaaggagaggagctcctagaagcagtg

SEQ ID NO: 37509 - DNA, 1814 bp, Homo sapiens
agtgaaggtgaaacccttagactcctatggtttacccaaaaatgatgagctgccaaaggcaccacaagatgcttgcagtgagaatatgtcccgatatgtcctcacccaaaatcatctggcactatgtaacccgtgtgtctatcaatgcagttcagcttaactgtcatttcctggagactgctcgcccttcacagagaactgtcctagacaccataggcaaccttgctgcacgatacactcagctctcagctggggcatgttctgaaatcacaagctgggctccagatcagaccaattgaatcagaatctctatgagtagggcttttttttaaacctttccagataattacaatgtgctgttaggattgaaagccacttctataggaaatgcagagacaaattccaaacagtaaggagctcagtctagtaatagatgatcttcaaacgtcaccaggaaaaggagaacatcaaaactgctctcctgtgtgcggagtattaagacaatgtcaaacagacaaaaatccctggacttttctctgccgtaagtgactgaaatcatcctcatgtggtaggatgtggggattttcctaccccacaaggtaggaaatctggttttgtcccaagaaagtacaaatgattgaaaccagaatccttgccttcttccactatggcactgctatttacaagaagccttcaaacttccagctcttattaattccagaagtagtaaatgatctccaggagtgatggagcaaggcaggcatgtaaagcaaataatgaaagacaaaggaaattgcctcatggcctgatgagaggctaatggatgtgcagacagagacaccaatgtgtcaccattaatgatgtcactttaggaaaatcaggaggccgaaaattttttttcatgctttgccctacagttatttcctatctattcatcttaacaaaagtgaatttgaaaagaaaatgtatacttgtttaaaatgttagtttggagaaatgaggacaacctttctctttttctctctctctctttctctctctatctctctctttctccagttgtctcacctttggtattacatttcctggcaaagtaatgggacttctgttaaggtccacggatagtcattaaccaagtggcatttacattcattcattccacgacagcctgctgaaatgaaactagtcatttgatagtattagctactaacatcgcctagacaccaaaggtcaaagaatgcagtatgccttatttatagtccaaccttttgccaaatttttataaggtctaatggatgcatttaattgccaaataaatcaatgttgacagttataccccctctgcagtcctagattccagatgtagacaaccaaattataaaaacccacgttctccaggccttgtcttttttttcagaaagcaaagttttacctgtacaaaggaatatgagaggatgccaggagcacacgtcagtcgttcaaaagaacttttcatggaactaagacctctagggaatataagccacacagctaagtttccacatgttctcatcacttctctcacctttttaaatgtaatgtgcccgaaaaggatgaaatattgagtaaaaagcagcaattaagtatcctctttatctgttctattgtggagtgggggtttatcttgttgaattatttcctcacaggccctagtcagaagaatagagatttaaatactcctggatcaaacactttgtcttgcttggggcaatagagtagaaatcaaaatatttctctagccagttgctgctgcccaatacaacatttcttctgat

SEQ ID NO: 37510 - DNA, 1302 bp, Homo sapiens
attgtaatgttcccaacataaaggtaaatgtttgagttgacggacatcccaaccaccctgatatgatcattacaggttgtataagtgtatcaaaatatcacatgtatccccaaaatatatactatgatgtcccaatttttaaaagaaaggaaagagagagactttttaataagggaaaaaagagaaaagctagaggggacctagaccgtccagcgttgctgtgtggtgctgtggccaccagaggacagcctaaccacacatgctgtggaactctgccttccagagccctgagggtgcaatgttttccacacagctgagaaacaattttttttcttccagccacgtggaggaaaatcattgtcaaatatattacattatctcctacccattataagttgattgttataactgtttcctgtgagttagtctcaccattttctgtcattgtaggtatctgcttaatatgaaatcaatgcatctttttagtcattttgtagagaaaaatgcaaaggaagttggccagtgcccagccagaaaaggaaagagccttagccaagtaatttggggaatttccaggcccactgatgagtccattctggtgcagacataaatgaaggaagttgtagacaacagttgtcaagttctctgattccattgatgaaatcctccctaataggagacttagcttgttgccaataaacacttgaaacctatattaaactccctttgttccatgttcatcaagcaaccccttccatatgtgacattaaattttgccttccgagagagaaagtcgtggtcacaaagacataaatgttctggtattctggtcagcatattattttttgttcacttataagttaataaactagcatttagttttgtcatatcaatttcaaaaatttggttcatgtaagtctgccctaaatgatgtatctatttaatgctgtgctgaaaatcaggttctgggcttccaaaatcaaaagtcagacccaaggccatgacaaattctccaaagtcaatattatctgtgaggccttgaagtatatattttgcctggatgaaggaacttcatgttgccacataagctcacccccaccacacatacactcctttattcactatctattactatttaataaattgctcctaaattaagcagcttaaaacaacaaacatttattattgtacggttctgtgggtcagaaatccagaagtggcttagctgagtgattttgactccaggtctttcacaatgctgcaatcaagaggttggctggggctatagtcaactcaaggctc

SEQ ID NO: 37511 - DNA, 1929 bp, Homo sapiens
tatgggccagcagttctgtcaggaactattctattctcttttctgtgcattcagcaaagaattagaaaaattagctgggcgtgatggtgcgagactgtagtcttggctactcgggaggctgaggtgagaggatctcctgacatcaggagttggaggctgcagagccatgatcgcgccactgcactccagcctgggtaacagaggaagaccttgtctcaacaaaacaaaagatgttagtgagggcccaggtaggtgctaggtgctgggataacatggtgagcaaaaagaagactttatcccttcccttgcctcattatagtataatggcagatttaaatactaatctaataattacacaagaaagaattgcaaatgagatcagagctgccaatcgaaggcacccagtgggaaagacggcctacaatgggattttcgcatagcgaaagcttgtctgagaagatagagtggattcatagggggaggaaaaagctttctaggctgggagaacacccctgtggaggggtgtaacttggcgcattacgaggaactagagaaacgtgcacttttcctaagacatcaggaaaggagcgaggagagacttatccattttgtcccatagcagccgccatatggtggcagacagcaacaacctcgtcgcactgattactgggagctgtagtcttgacgtgagctagctggcatggcggcctgcattgcagcggggcactgggctgcaatgggcctaggccggagtttccaagccgccaggactctgctccccccgccggcctctatcgcctgcagtaagtggagccggacttgcgagctggggcgcgttaggggcccagggtcaggatgggggaggcgaacctggagatcagaggcaaccccagcgttggtcccccgtgggacgccgggttgggggagattgcggggctctgcgggatctcagggttggcacgagagttctgacctccgtcgtccgctcccgcaggggtccacgcggggcctgtccggcagcagagcactgggccttccgagcccggtgcgttccaaccgccgccgaaaccggtcatcgtggacaagcaccgccccgtggaaccggaacgcaggtgaggcactgccctggcgctaggccggcaactggggtcggtgcgcgcgtgagcgcgttcgcgttcgaggtcccggctctaaggtgggggctgcacctccccctgcacgagcaggtgtgtaggattcaagagccagcgcaccacactgttctttctttctcacttctccccaagccagcattgaacttctttgcagttttattgagtcagaacttcaagtaggggttccccatattttaaactcttttctctgtggtatttgtcctgtaccagagtttttctctgaggtatatcctgtttatacctgtttacgtccaagagctcttcttttctctcaaaagacccttaaccctggataggaatcgattggccaacttaaaaaatttgctatggtttaggttggaagttttggcagacaaagcacagtaaaactggccactaaattgtgtctgaaacttactcatcaaaatagtgtgaataaaaacttatatgaatggtggtaatcttggaggtacatgtaaatttaaaggacttaaggtctgaaaagagagctatgtagcaacctttttaaaaagccagttttcagaggaaaaacctgatatgattataggctttttgaaagggctgtagattattgattggattacttctgggatttttaatttttttattttttaaattttttttagacagagtctctctcagtctcccaggctggagtgcagtggtgattttagctcactgcagcctcaaatttctgggctcaagtgatcctcccgcctcaggctccagagtagctggaactactggtaccacg

SEQ ID NO: 37512 - DNA, 2858 bp, Homo sapiens
aacttttaagaagggttagtttattacttgttgagctgtgttatattaaagcacaacaccctcaatgatctaaaaatgctattaagtactcgtcttaatcatgtatctgtcagaggctgtattttcttcaaatacttcaaccaaaacaaaatagcacaagagattaaaagcagaaacacctatgacaattcatctgtcttctattaatattttgccagacattaaagagatctgtaaattgaaaacaatgctactcttccttttttggggtaatacttttcacaaaaatcttacttatccttacatgtaatagattttttgtaagtgaattaataaattttatttttagtgtgataaatattgataggtataacctactgaaacaaaagctctttggaatccttaatcatttctaagagtctaaaagaggtccaattcccaaagagtttgagaaccactattctagaaggcaagagaaaaggaactcctgacttcaactttcatctacaaagtttaaccagaaaacaaatataaaaggtcatgaaaactttagacaaatagaaggtcacaagaaagaccaagaaatcacgaagatcataaacctggaggacattatgttacatgaaataagacaggcacagagagacaaacaccacatgatctcacatatgtaatctaaaaaagtggaaatcagaaatcacagaagcagagagtcgagtagtggttagaagggactgagtgaggttgagggtagttgggaagatactggtcaaagggcacacattttaattagacaagaggaattctattctacaacacggtgactaaaattaataacaatgcattgcatacttgaaaattagtaagagtagatagtaagtgttctcaccacaaaaaaaagtaagtacctaaggtaaagcaaatgttaattagctccatttagtcactgtagacacatttcaaacatcatgttgtacactataagtatatacattttttacttctcaataaattaataaaaatcactttaatgacaataaaaaataataggaagattttagctctcaagactaaccaaaaaccgtattcctcattaagctacaattccaactcagagcagcacattttatttaaacaactttatgctgccttacacctgtatttaagaactcaaaggtacttcaaaatgacgacactatatctaacaccattactggtaccatctacagtgtcatgaatctctatcatgcttctttgtgttgtatatattactattagtttttgcaaataactggtgaaaaaagaaaataaacaaaggggaatgtcccaaaacctagattcctgtactactctggctaaatgttttcaagaaagataagttggtcaagtgtctaaaaggtacatataacttctgcccacttaatagtattataaattattgaactttgttgtgacagtttaggttcttcataaactttgataactgtgttagttataactgatggagtcaactgatggtgaaaacgaagagcctcccaactgtacacgattgttttatttcccccaaggagtccaaaaggcagatgcagatagcgggcaagtgctcgagctattttctcgctcactaccttctggataagtctttctggataagactcagcatggcttgtggtcggcagcaagttatagaacccccagagaaggatccagagaccccgcggccccttcccgccctgtgccgtcacctccccgcttccccgcgtctccctggacacctgagccttcgtccgcgcggggagccgctttggtggcacgccgggagctcgcccagacccggccccggccacgagggccccgaacccggtggggcagtcccgccacctgcgcgcggcctcctccagagggcggctcttcctccgcagaacccgggaccggaagttccctcggcgccccaggctcagcaggcgactcctcggcgccatcgctgtcgctggaatcagccgcgcgctgccgaaaagtccttttcggcctgtgagccatggccgaggcccgagcgcccggcgccctagaacccgctgaaccgcaagccgcagcttcagtgcccgccccctagggcgcgctcccgccgcgcctggccgccgagtgcgcgcgcccgtcccgcctgccttctgctcaccgctactctgtctgcgcctgcgtgctttggctccctggatctggtaggccgagttctgttctggggcctgagtttgcaaagcattccctttgccaggttaggttgcgtggactgacaccttagagattttcacggcctatccggtctgagtcccacggagagcagaactcacgtgctgtccttgtgcaaaccccatccagaaatcaagcgttatgctttccgtcctggactggagccagatccgttgtcttttactttctggagagagtgccccctccaaccaagatttaaaacaaacgaaaccccagcagtgtgaggctcggggtaggaggagatgcctttgagaacaaaaccataaagtctgtacataaacaatgcatacagactagcaaaaatcaaatgacttcccccaggcagcagggcttcaagagagcctggttaaatgttttcacccttaaagaaactatctaaaaacaaaaagctattgtctgacgcaaatttgttctatattcatcaagctctgtctactactgtatctgtatggtagaaatactatataatgttgagctactgcacacctgttatcaactccatgtttagtggcgtcatattgagaggtgacagcgggccagctggagttccgggtgggcatgggcttggcgggcctgcactcggagcagcc

SEQ ID NO: 37513 - DNA, 525 bp, Homo sapiens
atcagagcctgtttcacgattttcacatacacttatatctcttacaaattctgtttcccatcctatatttcctcagcttaaaggtgggtgtctttacatgtctgaatgttcttcaccacaggagtatatgttcccagaatgctaggagagggatggggtagtaatagctgagggtgtccggccttaaatttcagtctcagtgggttgggcttggcttctcttccagcatgttgggagcattgccctgaactttagctcctttgcccagggcacagggggcacagagagcagagtttcttcactgatgttggaatctgttcatagtcttctagagctctatacccccaaaggactctttttaggtaaaaacgtattaaacctgcctggttggattccatttaatttagacaaaattccagcttctctctcaatccataggaatttatctacatctaaaagtttcctattgaaaacactagatgcatgggatttgtatttcctatttattccttttcagtacatctg

SEQ ID NO: 37514 - DNA, 480 bp, Homo sapiens
attaattagttgttaatagtaatattaattagtagttaaaaagtaatatgagtaagataacacttccctgaattgtatgtccttctagcaaattattgaacctaagggggcccataaggaccccccaaatttatatgcagttggtcagaagtgagagaacgtctgaaaaccagtgaatttgtagctggtatttgaattgaggtcagtcttgtggggactgttccctcagactttgcactttagccaaactcattgcagttggtggcagaagtcgggccaacttggcagtctggatgactgtgctgttaacttcatgtttggctaattcagggaaatttctaagtctgttggccagctatagtactacatcgttccttaactagcatcctaagtattttctttaattcttttctgtgtgaatcttctctgttgtggatgccatgtttttgttttctaatttatgaccttagtagattccag

SEQ ID NO: 37515 - DNA, 2438 bp, Homo sapiens
catttttataattcttgcaatatttcaaactttttcattatcattatatcccttgtgatttatgatccatgtctttgatgttatgattctaattgttttggggtgtcacaaacagtgctcctataagacaatgaactgaattgatacatgtgttctaactgttccacacacaggccattccctcatctctctccttctcttcaggcttccctattccttgagacacaatagtattaaaattaggctaattaccctacaatgacctccaggtgttcaagtgaaaagacgagtcatatgtctctcagttgaaatcaagagctacaagtgattaagctttgtgaggaagtcatgtcaaaagtctagataggccaaaatctaggcctcttgcacccaacagttagtcaatttgtcactgcaaaggaaaagttcttgaaggaaattgaaagtgctattccagcaaacaaacaaatgataaaaatgtgaaactaccgttgctgacatagagaaagtttagtggtctggactgaagattaaactaaccacaacattccttatgccaaaacctaatcaagggcaaaacctttctcttcaattctgcagaggctgacagaggtgagaaagcagcagaagaaaagaagtttgaaactagcagaagttggttcatgaggtttaaggaaagaagccatctccacaacttaaaaggtgaatcagcaagtgctgatgaagaagctgcaacaaattatccagatctagctaagaacattggtgaaggtggctatactaaacaacagattttcaatgcagacaaaatagcattctatcggaagaagatgccatgtagtactttcatagctagaaaggaaaagtctattcctgtcttcaatgtacgtgtatacctaacaaaagctacctacagctggatgatcaaggttactgttgacagtgattagtcacattgatactatgtacccttgatattatgtaatgagaaaggcacttgacctctgttggctcctcctagaacaaataatcccagtgtaatcatgagagaagcatcagaaaaatctaagagacattcggcaaaatatctggccagtacttctcaaaactgtcaagatcatgaaaagcaaggaaaatctgagcaactcatagccaaaatgctcttaaggagacatgactactagatgtaatgtgtcctactagatgagatccaggaacagaaaaaagacattaggtaaaaactaaggaatctgaatacttcatgagcttcagttaataataatataatgttattggtttattaattataaacatttactatttaaagtaaggtactaatattaggtttgggtctctttgtactgtcttcacaacattattgtaaatctaaaagttttctaaaatagaaagtttattaaacatccttttagtcatgtgtagtaatgcaatctgaaattgatcaccctttctataaaaatagtctgacatttcaaaaaaaaagagcatgtagcataattagacaaaacatttgtgactataagtgtaagttcattatcaaaataaaaacagagttttttacgattggtcatccaaagataaaaagcaagaactcaggggttaaaaaatgtcgcataagaaaaagaaacagcaatcatgtgtaagcaaaaatatagcctgtgcccagtagtgatattttaataagcagaactaaataaatcgagtgttatctttgtaattggtaaataacatttcccgataaggtcacaaagagagcacctaaaattccacatgactatcttacacagaagttcagaatacttcctaaacatttccccaactgatatttccatgaacccttaacttacttatgtactattaaataatgaagctgggcatctaaaatgatttttgaagcttgaaaataccactaacatttttaaagatgattgctcttaagtaagctactctatgtctgttgcaactgtccaagtctcaacgctggggatcctagcttgagcctgatcagtccaaagtgagtctctgctctgtaccacagctggctctgcgtgctttctttattcactgcactctttctcacccttgcccttgtcacattcactttaaagccactgacaataaagcttatcaacattccataaaaatgtcataaaatacatgcaataaaatactgagtgctgtataaaaatggttagtgcttttacaatggctagaactaccatgaaaattggaagtaaaaaacaaaacaaaagaagcctggagcatatatataaatatatataaagagaggctgggtgctgtggctcacaactgtaatcccagcattttgggaggctgaggaaagcagatcacttgaagccaggagtttgagaccagcctggccaacatagagaaaccccttcgctactaaaattacaaaa

SEQ ID NO: 37516 - DNA, 481 bp, Homo sapiens
gcttgtgccttctgaatagcctgcttgcctgccaggaagttggtcttagctgcatcatcccaatcacaggtagctctcttctttgctaacatatgaaacagttttatcatttgaaccaaatagggcacaaatgcctgccaatatcccaggaggcccacaaaagtttgcagctgcttcactgtggtggactggggatacgcctgaatcttatcgatgatagcctctggatggcatttgtcttacgcaaccagataactcccaagaatttggcagataatccaggcccttggaccttggatttgttgatggcccaacaacatgctgccaaatgttgctgcaagaggggcactgcctcttttaaatctacaagagaaacagaggttaacataattatcatcaatatgatgtaataggcagaccacttctggacatagccaggtggctaaatccatgacaactagaccatgacatttcgtggagc

SEQ ID NO: 37517 - DNA, 2391 bp, Homo sapiens
ctttgaccatattaactgcaagctgcttgaagctacactcataccttactaatctcttcatccctaacagagtgccagatgcttggtaaaaaccaatggatatttgaagattctctgggcaattgaaagaaggaattaatgagcacattcgataagcactctgtaggctgtaatagacaatcacatgccttttattatttgtaatttataataatgctcctgtgcacacattttatccctgttctgttatcattgttttaacagatacagtaacgaataggttggaatggtcacaaagcagagtatgtttcttttactgggaaatgttgtagacaatgtgtgggactttatgtccaccctccaagtagagttgaaatggcatgacaccacccttttgaggattccactctacttgggaaaacaggaagatccagcccagcattaggaggtaattccatataggtgtctaagtagtacagaagatagagatagaaagggaaatttttgacttgacttattgcctagggagaaagggacaaaaaagtttaagctacagaggaatgccaaagattatgtttctgacagttgatgaacacacattttctcaatttttgattctaaaactatggagaagaagtggtgaagcagtgttttgaaataaaactaaaaatgattccaggagggagcttcaatgactaataatcaaagttaaggctcagatgcagttttctctcaacaacaaaatcataacctcctgagataaatcatagtttattgtaaagttggcaaattacagtgcatactgggagataaagaggaaattagctttgccttttcattaagtagctggagccaaatataagtcatagtgtttaaacaagagagtggctcagcagatactactggagcaacatcaaatacccatccccatccctcccctcccttgcgctccaacagtcatatatgctaatagtggactacgggatcacattagtgttcactttccaatccaaaaccaacattagaaatccttgcctttaggaagcctttccagaagcttctctttcttggtattaaggaaaatttttataagtgtgtctaaataaaatatgtatgtgttctcaaatccataatttgttttggcctcagccttagaaatttgagtatcagttgagaaattctgctcctgaagcaggatatttccctgaccgctttgctggactcatgtcacggttgttttgtttactcagcccgccgctctaaactccttacaggagggagtgtgcatgagcaaatgaggcaggaactggagtgcatgagttcctgaaacctctagccactttggtgctggcatgagtgaactccatgtgggccctacagcagcatctaggtgagggtgcctgtgactccccgaagccccagggagcatattacagtgctcttttagttctgccatccgtgaacagctgaagtgttaacagctcagtgggccctttgactcatcatgtgaggtggctgccctctgccagcgagggcaaagggccggtgtgacagccttttgtatgcacactagtggctcctgaactcttgtccagcatccaggaaaaataaggtcacacaaacaaattaaagcctggtaatctcagcggaaaggggaactgaaaaggggacggggattggggcaggtaattttcccttgaagaacctggtctccagccggattcttctgcaaaattatgccgtcaggctgtccctctgaagtcaagccacttctctatgacatccagctgcttctcctctcctgtccgactgagtctgggatgtttataggaacaggatgggaggcggggcaggcatgggtagtttatgaaaagccaacatatgagcaggaaaataggaatttaagatctcactttgggctgcggtttcaggcttttcggcctgagggtggagctttcaccaccctaacactttcgcctattttcctggagaacagaatgcaatttttaatgtagacaattttttctgcttttccaaaaaagaaagccattttgaaaagaataataatctctctgtttcttttttgatagatgtagatatgaaatatatatgcatatacaactttatatattcttagaatagcatgttccacagactcttgataatgtacaatattttgtatttggtataaagctttagtcttaaacagaaaaaaacataagtaatatcagcactgaataagaaaatagaagagaagttctgcagctcatagaaaggaagctccattgaaatgttgtgctaaatttttcatacaagcctattttaatttaaaattaccttttttcttcctgaacctcacacccaactcactcaagcaataatcctttaatc

SEQ ID NO: 37518 - DNA, 920 bp, Homo sapiens
caaaacatcattattcattatcatcactgcatttgcaaaaatgtaaatcaaaaccacaaatcaaaaacaaccagctcacactcactaggatggctataatttgaaaaaaaaggaaaataacaagtgttggtgagaatgttaagaaactggaacaattacacattgctgtggatggagaatgtaaagtggggcagcctctatgggaaacagtgtggcagtttctcagaaagtgtttaaagagttaccatgtagtccagaaatttcatcactaggtatatgcccaaaataattgaaaacatatgtctacaaaacacttatacatgaaaatttataacagcatttttataatagccaaaaagtgagaataatccaaatgcctatgaactgataaacagataagcaaaatgcggtatatccatggaatgaaatattattcagctataaaaaaagtgctaagaatgccatgctaagacatgggcgaaccttaaaaataccatgctatgtgaaggaagccagacacttaaaggccacatatcatatgatttcatttacatggaatgtccataataggcaaattcatagaaacagcaagtagattagcatttcctgtgagctggaaagagggtcagaaatgcctgttaatggatattagggattttttttaggaggctatgaaaatttctgaacttacagagtgatgattgcacaactctgaatacacaaaaaatatcaaaggttttatttcgtaaggtgaactttatggcatgtggattatatctcaataaaacttttaagaaacaatagacaaacaaaaagaaaacaaaaagaacaccaatatcaatgacaagaagaattatttcttacccccaacttttctcagtccaggcattattcttttttgtttagctctattgaaatat

SEQ ID NO: 37519 - DNA, 900 bp, Homo sapiens
gcgaaccttgttgactgcactgaagggaaagaaaaatggacagagggtgcactcactgctgtctccagagacaaaaggagcaaacatgctctggcataacccttaagaaagtgcactaagggaagacaattatgcaaaagtgatcaaaaacaaagtactctctaatagtggcatttcctctggaattttgtagacagagatattattttgacagagaagactatcctggtatccctgaaatcaaacatgtagggtaattttatatgtaaatgtaattatagatgaattaaaccagtcatgtgcacaaagaattttagggtaatactggctggagattgtctgtaaagctggctgggcagattcccgggttgccagtgtatgaagcaattttcacgatttagcaacacatcaatcaccgttgctgttcctcgaattccaaaggttgctggccaaatgatagatgacttatcaagatgatctttggcttccacttttatctcatttttgttcccctggacattgaactctattccctaaattctgtctttatggcaattttttgaaactttttgagtattacaaatcagacaaacatgaaatagttgagcattgtagactcttaatggaaattcaaaaataaattttcatgaaagctatacctccctcctgatatagcattaataattataacttaaatgatttccttttaggacactaaaatgtttgaggtgagaagtcaaaacatttactcttgtatttatgaagtgaacagaaatattggtccttaacagtttggttgtacaggcattgtcatctgtttaggtagtttgtcatgatgatgaggactaagctctgttttttttttaacttactcaaattcctttctaaggagtctgagga

SEQ ID NO: 37520 - DNA, 833 bp, Homo sapiens
tttcccaagtatcttagttcagcatttggaaacagccttgcccgtttctttggactaggtatgccccaggtttcttaaacaattatgtgaatgatagatcttaggaaggagatgatgattggggaaaataagttcaagcaactgaccagtgatacactccctttattcagggtgggggtgggaaatgcccccaggtaaagaagggaaggcaagtagcctattcttatattttaacttccagggaaatcagttaatgatatctgttaagagaaacatactgtattggatttccttggcatcatgtcttggctaaggaattacttgcaataaattaacccagaatcaatgaatgctcattgaaacaagagctagagtttagacttctttcttcaggttgggttttgaaatatgcaaactgtttatcgatttttcatgactgtttaacgaagttgaaggtctggtcagtccctgcatttttctctgtctctgtctctcgctttctctttctcttacacacacacacacacacacacacacacgcacacacacacacacaggtaccctcttatttttttgcctaagctatagggtctatacatctactcaaatgactaaggcttcatttccaaaacaaaggatatgattaaaagagaaactctgtttgccttacctgaaatctcaggcaagttatctcactatcttatttaatttttgcctatgagatgcctcataatatttctaatggctgtaaatacccccttagtataagtacctctgaaggtgatgtgaatatgtgtcattattttattgctttcattataaggtggcaaaat

SEQ ID NO: 37521 - DNA, 421 bp, Homo sapiens
aagtcaaagcaaaaacttcaagcgaagtcagagagaaaactattgcaaagagttatacagaaagagatgagtttttttaaacaagcaaactgaacaaaggtacgtaatggggcagagtttgtgttccttggttgacatcccatgggtattaaccaatatcatgttagttctttggtccattcacctttggctataatgcaagattaagatgatagtttcaacttgggaaactttggagtttgcgagtagagttatttgtatgcatctatgtgccctttggaagaatttgtaaatgatttgcttaataacttctaaaatctggctttgttctgacattgctcttaggtaattggttgttacaagagacaagaaagagcaatagtgaaaataaacacaggcacaaagcagaagcattttcttc

SEQ ID NO: 37522 - DNA, 1112 bp, Homo sapiens
gaacaagttccttaacatgagaattcacagatttgggtgtctgtttccagacctacgatatctgtcaacagaatactaatccaagaagatattttgacaggagagagaatagtgaccccagaaaaaaaggcaagtaagaagagagggaagtccttgagtccaagtgacaagaccatcagggcaagacagggtacaaggggattcagtacctggttcggatactaaatctgcaaacagtgagcatccctgttgtttacagaagcacatgtcccggatgcaggtcaaaagcctagagcaagctagatctgagctgtgcatacattggcagacacgtgtgagtggcccagtgccccagggacaaggttcttttcttagctggggaaaaacaggcaccggactatctccaccgaggcctcaccaaagcaatcagtggagtgctaaatacctatctgacaagtccaaagtctaggtgaagaaacatggaaatggtcttttctctttgtgttttggtggtagagaggggctgaaaggacaaacagtaaaataaatattttaaaagtcgcaaaacattaaggaaaattctgacccattagatacaaattcataattaaaatagcctagcctcactgcttctgcatgtcatcaattgtaagatgcacattttttttcacattttaatgtccctgaaattggagttgtctttgcagtaatggtggccctcagtccctcctagccagagaatagttacagcaaaattgtcattgcccacatgtcccaacatgcacagagatactcccattttctttactcatgtactgagtttagttatgcaagatgtcttcaaaccagaaaaatgtcagtaattgttgaagttagataatggattcacagagtttattattttatactttccactcttttatatgtttaaacattactaaaataaaaaggaaaaaaggtctccaaaatatgcaatgattcagcattaaaacaaaatgcttattgtgttttcagaaagggagaaaaatagagcagtgaggtatcaatgtgatattagtaaaacaaatgcttgacattgaaggaataactgaaattttacattttcttagaaa

SEQ ID NO: 37523 - DNA, 1989 bp, Homo sapiens
cagacttcaaaccctgatgtggctgattccaaagtttctttctactataacctacctgacaagcacagagactttgaatatggcaagaattttccatagtcagcgtgtctcaaagactagcaaccttgggtactaagttttcgggaacggatgtgtccacaaatcgcctggtggagacactgcaaataagctggtttaggtcccagccaaccataagcttctagtagtctatgcggctatgccgaccccactccgtgtgcagaaaccatctttccctgacatacaatcctgcagagggggaattcgaagtgcaggacctttccgtactagggacagcctcatcccccaacttcctactgagacactcttcctctacctctcaacccagacccttaccttccccaccaagttcaccttggacctcttcatccccaactccaaataaggccagtctagacgccacccccatcctgtcatttgtcaccgcggggccgagagcaagctcccaaatttgcagggctcccggacccgaatcctggctcagccacccaatatctccatctgccagcggcctaagtcatgccccccgccccacgtatccagcaaagctccttccaccgtaggggtccccgactcgaagccggaatcccaagcggctcccaggcccccgccgaggtccagccctgagggcccagccgcggcctgggccaggaggttgggtccggcggggccaataacccgcgggcgccaggaagacagtactggctggactcacggaggaagctgcgcgacaggagacgggcggcggcgaggccgctgctgccggagaccatggtagcgatgtcagcggcagcggcaagggttgcggtcatacgccaatgacactcccaggcccccggggacctcccaggggcagaggccggaggaggcagagggtggccacagcagtcgcctgaacaaatttccctttacagaggattcttcacgaaacagcgggaatggcaggtgaagacaaagaggcatcctatcggagaggcagataataactcggctccttcctagaaatgtgggtttgattaacattaattataacagcagctgagggaaaaccccacgcgagactggccagcgcgtggcattgtgggcaatgtagtctgacggccgcgactggttcgtagcttttgagtgaggcggcgggaagggagcgagggaagagcggcagtgagaccggggagacaagggacttgaagactaggagggaagaaacagcgaggtgaggtgcgaagagcagtgccagaactttgtatcccaggcccatctccttcccccttcgttttcctcgtttgctattagagagaataatatttctcaccgcgtacctgtgcctggacccggaagggttgccgctggggacgggaattcgaactggcactggtggcctgtgaagggaaagatgtgatgagaaagaccaaaacctatcttactgacagttaacttcttggaatgtgaatttttttagttaaataatcatgcagtctttgactagcactaagtgcatgagtgtttattccctgaggatcctaagggctgaaattcgaggtcaaatgtgactttgctccctgattggacaaacagttccctcttctgtaacagctttagaaggaacctcagagagtcccagagtcaaaaggtaaacaagagatgaagtaatctgcgtctctgccgaaaatcgtgctcctgagattcctcatcagaattgtcaataaaattgcaatcctaatttacttaggtagtcattataattggcactgagctgtgggatggatgagtgggattaccccaggagattgcccaatacttcctttatgatccaaatattgtcattaacaggttggacttcactgcaaataaactcctccctcatggatcatgttcttgtgataactaaattcctcagagttaaatagtatcagtggtttccagatatat

SEQ ID NO: 37524 - DNA, 515 bp, Homo sapiens
cataagcccaaatcctatgacaagtcctcctaatatccttttaccaagagaaaccttggttccccacagagtgtggtctcccttgttggaacaagtggtaaacccaattgcgtctgactacaggtatgtcctggttatctttggcctgtaggcattgaccctgtccttcacttttgttgaaaacaaagaattggagatcacctgacttgaaaaagtatttgttaaccagtcagtcattgcaagcattcctgcgttcatgatcaatatttggaactgctcctttgtttggcaccctggaggtttttgcatcctggggcaatgcaccacagtaagatctggtttggataagagcaaggctgccagtatcatctgctgagcctctacacctgtggcacgcgttcaccaagtcaccagccgtgtcagggctggatttcaaaccccccactctcctcctcagccaggcacaaactgcagagccaggagtggcagagaaagagggtcatttttgaagagca

SEQ ID NO: 37525 - DNA, 961 bp, Homo sapiens
atatgaaggttaagccaagcagcttcagggcgctgttaatattttgataagagcaggtgaaattaaactcttaaggaagagagggaagaagaaacttcaaataaatgtgcccaagttcctggtccggtactccctggcggatccgtcccccgaaagctcgcgaaaatggctggcgagaccccagaggctctctcggacgcccttgggctggcggagggcaaaggccagggcactgagtcgcttggagcctgcgggctgcgcccccgcgggaaaggggaacccgagggcacggagaggagagcgagcaaggagcgccgcggtgctaggtgaaagcccagccgcggaagtcggctcggggtccgaaagcgctgcttcgcggggttcggagggaaaccatcccaaggaggtgcagagaggccggctctccagcacccgacgcgcgccttacttggggcttgagctcgcagttggcggtgccgggcgccccgcgccgcgaagctgcgcccgtgggcaggaggcagagggtctgcagcaggaaccagctccagggactcatcctcctcaaggcggctccgaggcccggaacgcggagggaaggagtagggcagaggtggccgcccgccctggctagccggggccgcggggcgcctccgggcggggctggggtgagcccggcagcagcggccacgtggggccgggcctcgacctccctccccccaccccacccccgcaggtcagccccgcgcctaggcggcagcggagtcccgaaccgcgtttctcccgcccaaaccctgccggggccgccgcccacctcgtgtgaccgcaagaggggtaaagtgaagttccagcgctgtcctaaattcaacctaaaatcgcattggttcctgcgtttacgtctgtgcttatgctgccgattgtgaggggagggtgcctcttgattgaaagaggcagacaaaataaa

SEQ ID NO: 37526 - DNA, 1976 bp, Homo sapiens
cactcctacaatgggttaataagaaaaacaagaacgtttgtaggcatgtgggtctctattatcctcaaggttaacttcaaggaggaaaaccgcacccgctgatacagtgtttctaggagctcgacgagaaaaggcaaactgcgagccttctcgggacgccctgttcccaccacagcccttcacacaatgcgtctaacagcatttaaggaacacccgccacgccaacgatcctgctggaaccgcccagttcagggaacaggggacgactgaccagaaggcaaccgcccccaacctgagcaaagagcgctggaaacctattcccccctccccctacacccccccgccccccgctccactacgggaccctcggctcgaattcttttagtgcaggaccaccttaggactcagcctccctaaggagaggaaaagtgggggagggaaggggactctggaggagcaaaagcaagaggcctgggggcgactggggtggggcgtctcctagagcgaggattgctgcagagtgcgcgtgcacgcccgcacatccacacccacggctacacatcatatctgcacacgcacaaaaccacacaccctcccacgccggtcccatatcctttctgcggggtgagcagcagattcccggaaagggggaaatgtagccgcaaaagcaaagccgggggcctggcgcccactctggcggcgactacagcccccacgctgggcacactgcgagctgggggtgcccggcgcgggagaagccgcgcccagccgggctggtagcccagcggggggcgcggcagggcgaggagcagcccgcgctgctcccgcccctcgggtgccagcaccgcccctgctgcggcgggtgaggggcggggcggggcgcggcgtatataaggctaggggcgggcgccgctcttttgtttcttgctgcagcaacgcgagtgggagcaccaggatctcgggctcggaacgagactgcacggtgagtgcggcgccggggcggggggcccacccagggtgtggtcggatccggtgcaccgggcgggcgcgccgcaaccgcgacaggcgcccttctcggaccggacgcaggggccggcgaccacgccctgggaccgagaagaggggtgcgggacgcgcccagatcctcggccttggggctgctcggcacgccttggcgcgagtgccacgtcgagaggcgtcggcggggagcgcggaaggggacgctggcccccaggcccaggtcaagcgccttggtttgcccactaggattgttttaagaaaatggcagacaaaccagacatgggggaaatcgccagcttcgataaggccaagctgaagaaaacggagacgcaggagaagaacaccctgccgaccaaagagagtgagtgtgcctcggtctcccgcgccccagcccagcccctcaccctgctcttccttgcaaacccactcctccaccccccaccccgccgttgtccccggtgtgggcggccccggccactctttcagtttcacaaagcgccttgtttctccccagccccaagcttccttctaaatccccacacctcgtgggtgcctcgcccacaccgggaagcacctcggttgcgggtgggggttgcagctcccctccagcgcccgcttcccgctctccacagccattgagcaggagaagcggagtgaaatttcctaagatcctggaggatttcctacccccgtcctcttcgagaccccagtcgtgatgtggaggaagagccacctgcaagatggacacgagccacaagctgcactgtgaacctgggcactccgcgccgatgccaccggcctgtgggtctctgaagggacccccccccaatcggactgccaaattctccggtttgccccgggatattatagaaaattatttgtatgaataatgaaaataaaacacacctcgtggcatggctggcgtggtctgagtcttttagttgagtatgcgtggg

SEQ ID NO: 37527 - DNA, 1851 bp, Homo sapiens
cgcctggtcgtgtttttgtttcctgagacagagtctcactctgtcacccaggctggagtgcagtggtgccatctcgactcactgcaacctccgcctcccaggttcaagtaattctcctgcatcagcctccggagtagctgggactacaggtactgcgccactatgcccggctaatttttgtatttttagtagagatggggtttcaccatgttggccagcctggtctcaaactcctgacctcaggtaatccatccgccttggcctcccaaagtgctgagattacaggcgtgggccaccatgcctggccagacagtccaatatttttaaatcagccataaatctatgcaccgaataatgtctctctctctctctctgacacatacacacatacacacatgcgcacgcgtgcacacccacacattgttaccacttagaagagtgccaggcccagatggtttcacagacgattgctttcaaagctgcaagaaagcaataacttcaatacctcaaaatttgtttcagtagttagaaaaggacatatgcttcctgtgatggttaattttagctgtcaacttgacttgattaagtaatacactagtctccccttatccatggagggtatgttccaagatccccagtggatgcctgaagccacacatgtaccgaaccctgtacacacctatgataacgtttaatttataaattaggcacagtaagagattaacaactaataataaaatagaacaattaaacagttgaacacaagcactgtgatgctgtgacagtcactcgtaactgagatggctgctaagagactagctaacgggtgagtagtgtatacaacgtggaaacactggacaaagggatgagtcacatcctgggagggacagagtggaatgccatgagatttcatcatgttacacagaacgatgagccatttaaaacttacggattgtttatttctggaatttttaatttaatattttcagaccaaggttgaccaggagtaactaaaactacagaaagcaaaactgaataaagtggggagtcgagaacctagagagctggtaaagcattctttctaggtgtgtctgtgagggtgttttcacaggagattggcatgtgagtgggtgggctgactgaggaagatctgccctcagtgtgggcggacaacatccaattggctgtgggcccagatagaaccaaaaggcagagaaaaggcaaattctttttttctctctcctgaagctgggccatccttcttcttctgaccttggacatcagaactgcaggctccctggcctttggactctgggtcttacattagcagcccccaggttcttggcctttggccttggactgagaattacactatcagctgccctggttctgagactttaggacttgaactgagccccactgtggtattccacggtctccagcttacagacagtctgtcgtgggacttttcacctccctaatctcatgagccaattcccctaataaatcccctctcatatatctatatacagtcgcccctcatatctatgggagatgggttccaggttatgttgcccaggctggccttgaactcttgggctcaagctatcctcccatctcagcttcccaagtagctaggactatcatattctttttttttttttttttttgagacggagtctcgctctgtcacccaggctggagtgcagtggtgcgatctcggctcactgcaagctctgcctcccgggttcatgccattctcctgcctcagcctcctgagtagctgggactacaggcgcccaccaccacacccagctaattttttttttttttgtatttttagtagagacg

SEQ ID NO: 37528 - DNA, 832 bp, Homo sapiens
gttgtattaaagcttaagcatcatgagaggatctgatgactcagggagcaatttcttgagcccatattgtccacctgggaagaaattgtggctgaggagtattcaggagcagctatgggggagagaggggcagaaatacacctcaaggtaggcctctactgggttcaggaggtcccggggctaggcagagaaaggcaagcttgagacccaacagcgccacccaccatgcataaatcggttccctagtcatcaattcgcttatgaatacggaggccccggaaaggtgaagggtgccttctggtggccagctgtggaggtggcctcggagaagggtgacccgagtgacaagttgcagtgagcgctggctgcgtgcccagccgcgttgcacaactcccgggccaccagggggcgccattctcacacattccagagcaaacggtgctccttggagttgagcggcgcgacggtcctgcagcagctagcctgggatgtacccacagctcaccggggagtccgggccacacgtcagctggatcttgaatgagatgaagacggggagaaagggccttccggacaaagggcttacgccctggataaagggcgtggaggggcgtggcacgttcagtctggacacagcataaagtgcattggagagaggcgggagacaggatggaaaggagggtgggaagagctatgaagctccccagggccttgctaacgcgtttggactttatcccgcgccagactttttaaaggtggtaagtagtttacagatgtgcgttttgaggccagcacattttgttgttgtcgtttgtttgtttgtttttctttg

SEQ ID NO: 37529 - DNA, 1317 bp, Homo sapiens
tagctgggcgtggtggcacatgcctgtaatcctggctactcaggaggctaaagcaggagaatcacttgaacctgggaggcagagattgcagcaagccgagatcgcactactgcactccagcttggatgacacagtgagactctgtctcaaaaaaaaaaaaaaaaaaaagaaaagaaaagaaaagaaatgcacagagcatcatagagtccagggcaggggtccctgaccaagctcgggaatggtgggggatggggtggggacatcagtggagttttttggggttttttgttttgctttgtttgagacagggtcttgctccgtcacccaggctggagtgcagtggtgtgatcatagttcactgcaaccttgaactcctgggctcaagggatcccccggcctcagcctcctgagtagctgggattacaggcatgagccaccacacccagtcaatagacttttcttgatgtgggtgacacccaagctttaagtttgaagactaaaggagagctggcacaccaacagtatacgaggggaggggaggggagaggggaggggagaggaggggagaggggaggtgagaggggaagggaggggagggaggaggggaggggaggggaggggagaggacacagcaggctggtagggcagctttgaatatggctcagaggcgaggcgagcaaggtctgaatcacttctgctccaagtccaggcccacattacttcttatacggacaagaggccagtaactgctctacccacacattctcctcccctaccatcagaaaaatctccctaaagctcaaatttgacttcctgtctcccctgcttgctaccctctgctggttcccctttctgatctgtggtgtctcagctccacctctgttcataaacttcatatggtgccttcaaaagtatttccgtctctggaccttcatccctgcactactgtctgcctggaatttcctgccctgccttggttgatgaggtggactcctattcatacttcagagtgactcagatgtgacttgttccacaaagtccccacccacttgcactcacctccgtggtgcacgtattccagggccgtgagcttcacctctctgcacgtctccctcctgctacagctgtgagggtgcagacctcctctgctggcaccagggcccggcctgcagtgggcctttggcaaatgaggaactagggctaccggtaggtgaaaatgcagctaatgcccaggaagctagaagctgttggaacatttctgagaccctttagacctggaaatagctctatgttagagggttgctgatagagaaggct

SEQ ID NO: 37530 - DNA, 2758 bp, Homo sapiens
caatctccaggctcagccagtagctgggactacaggcacccaccaccccgcccggctaattttttttttttttttttttttgtatttttagtagagacggggtttcagcatgttagccgggatggtctcgatctcctgaccttgtgatccgcccgcctcggcctcccaaagtgttgggattacaggcatgagccaccgcgcccggctgggaatgtgatttattaataagatcaatgaattaaaacattgaagttgctctcatccctgcttccttccttcctctaagcatccagagagccctctgatcctttgggatcacagacatgggatatttttactctccagcatgaacacataggtggatttactgtgaaactactgaagcttacacttcagggtccctggcttcctcaaacagggcttccaagccctatatctaattttgcacttctttcttaagagttgcctgtaccaaatatataagcctcagggccccaaacctggatccagcctgagtgaatgtttttttagagccaggtctgatagaagcctgtttttaaggaattaccaggaactgagcatgctgtttttggccctcaggggtttctctcagaactaagaatttgggggctgtcctcagtcacaggtgcagcctgaagtctgttcccgccatgttcactctcctctatttaccatcacctgcccctgctgcgtcttcctttaaaatacagccctgggccctaagctttgtgctgattcaagctctttggaattcaagacatccaggaatccgacgctccaagaattttcccaacgacctctcagtgggccattcaggcaggaaaggatacacacattcctaatggggccaggggctgtgacttagcctgtgtgtggctgagagcctgctgaatacaaggtgctggcagttggcagggcttcccagggtggggacttcttgctgagctcatcagcaggcccagctctgtacccatttgtccagggaaaaaccaacccctaatggaactgtttgttttatactctctcatcgaagtcataaatgactcacaactagaatgttattaacgtgagaacagaggcctacctggcagaataattggttttggtcatttgctcagagtgccaggcaaatccacaaagcatatcaaattacaggttagaaacctgatgaataaacaagaataatactgtgagttctcaagggtacgtcctgtacctgttttgcccactgtcatatctccggcaagacacagtgaatacagcccctgacacattggaggtaatctataaagagttactaaatgattaaagaaaagggatgagctgttcttagtggaaacacccatttctcctaagatgaattcgcattcttttggaccagttctttctaaattaacagcactacccagtggtatcagagcatctatacctttggatattacaacaactctataaattctaattgcttcttcttttttttttttttttttgagacaagagttttgctttttcacccaggctggaatgaagtggcgcgatcttggctcactgcaacctccaccccaccgggttcaggcgattctcctgcctcagtctcctgaatagctgggattataggcgtccgccaccacgctggctaatttttgtattttcagtagagacggtgaagccatgttggctaggctggtctcgaactcctgacctcaggtgatccacccacctcagcctcccaaagagctaggattacaggcgtgagccaccgtgcccagctgagacgctataatttctaacctatggcttccccttttctggattccatgcagtccacacacaagcattctatgactcattacctcctgagcatccagcttcttaactgttacattctagggatcttttccacagtatgtttctaactccttgatggtttttgggggagacctgggtgacacacttggaacagacctgctccaggggcttgttactttgtgtgcatcccgctcccttcactttcaggtgacctcattttctaatcttccttagagcaaccaatcccccatacactgtctccttcttcagagaatctttctatgtggatttgtgctttttaaattggcatatgagttttaggcacagttggaccaggaaatgccttcctgaggaattcagcagcttctagagataaaatgtgatagagcaaattatgagtctgggaatcaggacatctgggttccagttttgtacacatcattcatttcacaaataagcacccaaagcccactatgatagccaactgcagggctgtgctacaagtatgtaaacaaagacacctactcctgcccaagggcagcccagtgggggaagtgaaaggattaaattgcaataatagagaattgtaaaaggaattgggagcacttagtgaggtggttctacaactttattgcaccatcaggatccccacgggtgttctttcaaatgccaatctttgagccccatccttcagagatcctgatccggttgatctaggaatgctcagggacattgaatgtttattctgagcaccttccctcctccctccactcccctcctggtgattccactggaagtggccccaacccacactctttccttcaagaaaaggttcacaaaggcaggggtctggagctgattttttttttttttttttttcccaagagacaaggtgttgctctgtcacccaggctggagagcagtggtg

SEQ ID NO: 37531 - DNA, 2671 bp, Homo sapiens
tgggattactatggcaaagaatgggcaaaaatctattgctcttgaaacctaccataaaatcccatttggaatgcttgtaacaagtcatattcctttcttgacatcctcattatcaagtattattaaaagtatttttctgccaatttaagaggtgaaatggtgtctccttttaatttggatttgattcctagtggttgagtttgtttcacattcttatttcagctcatcttctagaagtcatctatagctactgtcagtttctaggcttccaaggacacccttcagcctactgcaatgcagcttcttaccctactcctccatggacagatgacatccatttctgaaatccaggggccacacttcaatctatctcatgaggtatctctgcttggtggacaccgatgttctcccttcctgaagactctgcttctctgacttctgtgagcatagcctcttctggtcactcgttctctggcatagacttcttctctgtgggctggcagcgaacagtggggccttcagcatcattattgctcaggtcagtacaaaggaccacataagggagtatgatagtgaggagccaagatcactccacatctcgagaagagatgatagcagcctggaatggtttggtggccatgggaataaagagaaagggactgatttgacagatgtttaatgggtaaacatcacaggatttggcaattggctatggaagataaatgggaggaaggagtctaggatgactgttgtgtttcatcttgttggggggtgacttgactaggctgatgactttgctcaatccaataggggatacaaaaacagcaaagacatgaaagagaagatgatgatagtggtatcccagaaaatgagagggtaaccaacagcaccaaaagtcaggcaatcagataaaccagtttctaagctgaggaaggggagtgacaattctttcaagaagattgtccacagagagaaacaatagggtaataaccaggagtgcagggttgaaggggcgttttttggctgagggcaacggaccagtagaggctgagcagctgaaagtacaggtgccaagggggtggctgaaggagtaagatcccattgatgggatgaagtgggatcataacagatgacaggttgaacagaaaggctatctccatgcatgaggcagcaggatgcagatgtacacactcccttggaggctcacagtgggaagtgaaagttcctgcattttgaactttcctccctctgtgaattaggaggtgaggttatctattaggcacgtgggtgagtaagcagttggaaccaagtggtgaatgtttatagaagagggttctgaccaaagacaaagattgctcaatggcactgaggtccaaccgcagttgaatgccctagattcataacagccacaatctgtacacttctatcatttttagttgttatattctacaccccaagcagatacacacagggataaactgagtcaggcaattcaggcttggaagcttgcaaagctggtagagtttgaggatgaggggtttaaggagctgagggcatgaatgagaagtctgagttgaccacagggcaccagttgcataaggtagagaatggggttaaaaagggaaaaacaaaagaaaaaaccggctgggcgtggtggcttacacctgtaatcccagcattttgagaggccgaggcggatggatcacttgaggtggggagttcaagaccagcctggccaacatggtgaaaccctgcctctactaaaaacataaaaattagccgggcgtggtggcaggcgcctgtattcccagctactcgggaggctgaagcaggagaatcacttgaacccaggaggcggaggttgcagtgagctgagatcaggccactgcactccagcctgggcaacagagtaagactctgtctcagaaaaacaaacaaaaaccataacagcaagtgcaaacatcaaggattaggccaggcgtggtggctcatacctattaattccagcactttgggaggctgaggtggaagaatcacttaaagccaggagttcaagactggcctaggtaacaaagcgagacccttgtctctacaaaaaataagaaaattagctgggtgcagtggtgcacgcctgtagtcccagctactcagtgtccactgataaataaagatgattgctcgagcccaggagttcaaggttgcagtgaaccatgatcgcaccactgcactccagcctgggtgacacagcaagacgctggacattaaaagaaaaaaaaaaaaggtttagtggtagagagtaagaaaactgaaaaataggaagttacaataagacagattattagagtttcgagcatggtcacaagagaggaatgggtggttgaagtggaagtgcacacagatttgaaaaaaatcaaggccttgtaaggccaattgtaaggccatacttgaaaacattcagggtggcagaatttgggatgaagactgcaaagcagaattgaggcctcagtgactcctgcatagtgactgtgagattgatagataacagagaactggtgaagtaaccagatggcatttgggccttctgaccctttccagacttcatggaagtggcagaaaactgtagccaacatcagggcctcaaattgtggttccaccagtgactagctacatg

SEQ ID NO: 37532 - DNA, 4815 bp, Homo sapiens
ccgctaagtgaatgaaggtcatgaaaaccccaaataaccataatatttctgcttactcttatttaaagaggaaaaaaaatggtttagttactctctccttactcttgcctgactgaaaaaaatgaagtaactgtcgaaaacaaagttatctgtttagttagctaaccctctgcaaaaccaagcaaatgaaatctctatatttactcttagtccctcctgcagttcagtactgttgtaggctttcctatctgctccaccattttatcagactacagcactgataatgccttaatctctatacaatttatttatagacatcacttacccatcaggagacaatgggatcagcgttgttctccccatttttacagcccaagaaattgaggctcctgatacccaggatcacatatgccaacaccgtaaaatgctcagaaaggcatcgacacagagctttacttaatacccttctttctactccaccacaccccatttacggccaggttggatctctttctacaagagaaatggaataaatttgtgcaggagctccatacaggcaataaaaatatctctggtgacaaagtcctcatttaaactccagtttgtttatcactagttactaccaaatacagtcccttgggagttctgagtgacccaaaacctacttcctggacttcaagatgagcttttagtttctttgaaatcaggaagtgtcttaaaaccagattcaatgaaatacggtaacaatctttttactgtgtcctgtgctaggtattttatatgcattttagcacttaacctccaaacctcttattattaaacctctgttgttacgtccattttaaagatagaaaagtcagggcacagagaggtttagagatcacacagccagcaaatggtggacagtataagagtaacctcaaagcaagcagtaccccagattccaatttcagttgacttagcctggtaacagttcaattttatgcaaaacccacaacttcaaatggaaaaagataaattaaaacaaccacaaaaaccagacaaatggaggctcagcaggccttgtagctcatccacggttacacagaggatctcagagccaaaattccatggccgatccgtcttgacttcaaagcgcgatctatttccaccaaaccacggaaccatcgacacgtggtaaggggcagtacaaagatttgttgaattaataatgcctgaaaacaaattgacaataagaaggtaaaaatggaaaacacagataaaatcggaaaagcagaccactttcaggaaacaaaaaactccaaattttcaaggcagggcattcacggtgagccaaggcgctgggacaaagtttgcgcgggtaccgccggactcccgggctgcccggcgcggagtctttaacggagatggttcgcaaggaatcggcctcggagcccggcagcctcctggcttccctcctgaccaccagtaacccggccgggaaacactggcgaagaccgggggccagtcgccttccctttctgggctgttggcttaaaatacacacaaacacaagtccccaggcggtccgcggcctctcagtggggctggagctcgctgcccgaggcccgcccggaagccatgcacctgcggacaggagtctctccgagtcgcagctcgccgccgagaagcacccacctcccgcggccggcgcagcccaaggccctggcccctatagcccggcctaggcccgccccaggcggggctaggggcggcgtggcgggcgggcgcccctcgggccgcgccggtgagcagcgggagccggcgccgggcatttcctcttcctccctacgcgcggcgcggcggcggcggcggcggccaggccgaggctgggcacgggcgcccgatcgcggcctgctggctagcgcgggcaagcgccgcgccccgagccgccgtcgccgcgtcgcccccgtcgcgaccgccggccgcggggcctccgggcggctgggcccggcgagggcagcgagaggcggggctggcgtgcgggcggcggaaggaggcggaggaggaggaagaggaggaggaggaggcggcggccgggagccgggggagaggggcggggggtgggccgggggaggggaggagcgggatttgcggagcgccgcgccgctgccgggagccggcaggcccgagagtgaccggagtcacggcgggcgccggcggagctgcggcgtcggacccgcctcctggaggagctcagccccgaccaggcccggccccattcccgccccgcgccgcctccccgccgccgccgccgccgccgccgcgggagcgctcccctgcccaccccgcccccgcggccgagcccgggagtcgagtgggagtcggccggccggcgcgggcagcgccgggaccccgcgggggacactgcagccggagcccgggaggggccgcgccgccaccgtctgaactaggatgtcccgacatgaaggtgagaggagcccccgcccccacccgcacctcccgggcctcggcctaccccgcccgggccgggcgcggcggagggcggccgggaagcggcggagactttggccgagcccgagccgggcccgaggcgctggacccgggagcgagcgagcgagggcggagagccgcggcgccgctgccgccacggccgcggcccttagctgggcctggtgctggaggcggggcggcccgggcggccggagggtttgcactgtcatggggcggagggggaggggaggcggcggggcccgttaccggcgggagctcggccttcgggactgataccggacgccaaggcccgcccggccggttcaggagccgcgggccccagcgcggcctagcgctcccgccgccccggaagagcccggtgtggtcgcagagccgggccgcgggcggcagcaggaggcaaaagagccggcccgggacccggcaggcgcgtccggtcgccgggagacgacggcgagtgtccccgcctgcgggcgaccgcggggctggcgggaaggctctgcggccaagggacgggaagccctcgccgcctggagcccgccccggcctcgcggctaggcctcggcgcgtccctgggctcgggtaaccaagttcccggggtggatccgaccccgccgcagcaagcaaactccctgctcagtcacccaggcggagcagggctcgctccccgcggccctggtgccctcgccggcatgtgctgcctaccagaccaggttttggaaaatgacgatggtgaggtctgttcatggtcgggggtcgttttggaccttgttttgccattttaaaacacgattggagtacagttgcaaataagcagacagctctaagcccagtcccagggcacaaagagacaaatgtttagggtcgatgtataggctttgagctggtaagaaataagttaactttaatttattgccatatggtttagaaaaggaggagggggttgtgttttctttgtttcactactacaggtttttggataaaaagtgttaagagtcttggcgaaaagtttgtcctgctaaggttaatacaagattgtagaagtggcttgaaagtttgtgtactccggattttaaaatcctgtataggtgatgtaggagtggagaaagtttagtgagtcagtttagtgtgtgcttagcactatgggaaggatattctttgggaaatacggaccttagaatttcaaggctgaaaaactcagattgattaaaattgtatttagaacaagtttcaaaattcgcattactaattgcgacgttgaaattgactcaacattctgtgttcaacgattctgtattttaaaagttacaaaactaatatgaaatatactatattttcttcgcaaagcatttgttgagtacttacagtgttcaagtgttgggcattttgaaataatgaggtacctagcctcattgaaagggacacagaagtaggaagctatgcctcttttccccacttcgtctgcttaatcgaaatgtatccttatctctgtaattttaagaactcgtaattaaagttataatcagttttcaatttgggatattaaagtttatcttaaactgtagtcctgtgtacattgaccaccttcaagacaaaacaaaagtgagcaatggctgcaagctctcttactcttgaaaactgggagggttagttagagaatcacagccatggaagagtgtttcagacccattctccttggtctaagaaagcatacagatagttccagacgagcattctaattgaagtgtcctgggaagaaaattccttcacccccagtgctctgttagagtaattaaaatctcatatttggaacattcttgaatgtaacatatattctgtaatttaagcccatttccccccatttggtgctgtgcaaaggtgtgtggttatgaaacttatattaccttttagttacttgaatattgctgaacctcagcacactagtagcacacctttcctagtaacttatgttaatgtcagtaaatagaacatacctaatgaaaaaggaacatacctaaatacatctgttgaagacttatagtacaatattcgacaagtgattctctttcaagggtctagtttatggcctaagacaggaatagcagtctcacgaatcacatttaactcattagatacatattttgtggaatattagttcagactgtcattattgtcatcagtaagactttgacctatcagtaaatacagtgtttggcacccttgctattagttcttttcttacctttgccttttttgggccaaagaatcccatttctttcagcatttctttctttctttcttttt

SEQ ID NO: 37533 - DNA, 1885 bp, Homo sapiens
aaatccaaattcttttggaacccaagaccgcgatttttcgatttaggacctagtcccaaacaatgaagaaaaggtgatcttcaagatttcagcagggaaatctgtatatctgtacaaggttgaaaacctgggccgggggtcgcgttggaaccccacaggaaaaaggcgcggaaagccgccgggcattttccggggttccatagatgtccccagtgtcctagtccgtgcatcagctcgcgcactcggagggactctaggcagggggagggccccgcggccagtatgtgcgtccgaggctttcccgcagggggcagtgccgcccgcccgcgcgccgatacggtgggagggggtgggaacctgcgcggagttctggaggttctttgggagaaagttaggggatgcggaggggtgggcgcaagacttccaggactccagggaggccgtggggagggccgccgagggtgcagtgtgaggcgcaggagggggttgggggcggtgcacgttgcagggagacgcagcccctggaagatgcgagtgtgaacgtgtgagtgtgagtgcgtgtgtatgtgtgtgtgtgcgcgcgcaccgcagctctccgggttccgcgaggcgcgcgggtgtcagcttgcagccggggctcctccctccggcccccctgcccagcccggcggtccctcctccctccctccccgctcgcccctccccggcgggccaggggctgggacgccccggcggagcaggcggcggcggtggcgagttggggagccctaggctcggcgctgccggaggggcccgagccgagccgcctgcgccccggccgggcagcgccgggcccgcttcccgcggggccacgccctgtcaaactttgttgcggcggctagcgcagcgggcccgcaagcgggcgggaggggcgccgggccgggccgggcagggcgcgggcggctaggggctccgagagcggcggccccggcccgcggccccaccatgccccagctcggcggcgggggcggcggcggcggcggcggcagcgggggaggcggcggctccagcgccggggcggccggcggaggggacgacctcggggcgaacgacgagctgatccccttccaggacgaggggggcgaggagcaggagccgagcagcgatagcgcctcggcgcagcgggacctagacgaggtcaagtcgtccctggtcaacgagtcggagaaccagagcagcagctcggactcggaggtaaggaagcaccgcggccacccccgggggatcccggccctgcgtccgctcacccgctcttgcctttgtgtctcctccgcaggcggagaggcgcccgcagcccgtccgggacactttccagaagccgcgggactatttcgccgaaggtatgtgcccgctgggacagccccccactctcgattcccgctgcgctccgctgctcagcccgggcggcccaccgtcccccttgcttgggtggacgcacccttgccctccgcctttattggcggcagcccccgtggggcgcgcgtggggggcgctggggtccccagctcccgcctcgagccccctgccgcggcgctgtcagtcccgggggcctgggcctcacctcgccttggtcttgttcgcagtgagaaggcctcaggacagcgcgttctttaaaggacccccgtaccctgggtaccccttcctgatgatcccggacctgagcagcccgtacctctccaacggacccctgtctcccggaggagcgcgcaccgtgagtgcccgtcgggcgcgccggggagggtgggaggccgcggcccgcaggatgcgcccccgggcttggccatggagtgggggatggggccttctgcgccgatcccaagcagaacttgtttgcggagttgaacta

SEQ ID NO: 37534 - DNA, 1033 bp, Homo sapiens
cataaacatgaaattcacaaaagaacaactataaatggctgcaaatatgtgaaactatgtttaacttcccagggagtcaaaaaatactaattaatacaagaatcatctttggcccaccacattatgattttgtctgaataagcctcttcaatgctggcaaatatgaggtaaaatggctgctccggctgctctttttggctggtcttaaggggcgcaaatagctccaccccatttggaaagcacttggcaatggctgctaagactttagtgtttttcatagcttctaacctgctaagaagtagatacttgttcccattttgctgctgtgcaaacagacttgtagaggtcaagtatctcgtacaaggttacattgatggtgattgatggcgccaagatttgaacttggttgtgagtccaaagtctaggtctcccattctacccatgtgattttacacacatgcctgatataattagctcctcctcctctccagagaagggcagctgacctttgtttcccagttcagaaatcctggtgtgagttatcagctggggttgagggtggatagatttgttccaactttacacattggacctgagaatgtactttcctgaataaacagttgtagaagcgagtgacagttgtggttgaagttgttcccccagtgcagtgccccagaggggttaatgacctttcgtgggctgtcccaggaacttcatccgaggaaaaggtgcttacctgctaacatttgacctgtttggaaattggggattgtttttcctcattgaaattggtgagggttggaagaatacgcaaacgaatgtttggtgtggaagaacgctggaggagtaaacttactatactcacaatttggattacaacatagtttggttaacccagctctggtgaaccaaatgtacaagtattatttccttatggttcatcttataaaatattttataaattggttgctttctttaagctctccacaaatgaaaaatcagtcccaaaaatctataaaagactatttcagcg

SEQ ID NO: 37535 - DNA, 1073 bp, Homo sapiens
ccactgtccgtcataacttcctgcaccctcccttcaatatggacataaaatcgtgttgttccctgagatatgtaagccacatgtgcacccacatttgcatacacactagtgtagggtgcaggaccccttcttcaggctcctttatcaggagcaatggccctgtatagaggtggctggtgtgacccttattctcctgtgttcttgttcacctgtggggtcggagagctctcctggaactgcccgtctatggagaggcctcctcagacatttcccatctcccggtgcccaggagttgttgactttggccagctgctgggcctgcaggagccgcggggaagggttctaagagacccttgaagctctgtggctggaaggcagctccaggctgcctggctgttcttttgtgttgagtatttcactggccccagataagcgcttcctgttcctcactgattatacacagatcctgcttcctttctcctcaatacctgggatgctttccagcttctcctcccataggggaaagtccgtaaactttagaattctcaggcctgcttttggtcaatggactttctgcaaattatgactgtttttgccatctagtcacattcttggtgaagccttcacctctgtctaggagctgagttccgctttgtgccagccaggagagatgcttctatgacctggtttctgcccctccttctcaccagacagaacatctgtatctacctcctggcgtaaatcagagagaataaatagattgcaccttacaggtcagttttaatcaactgttagtagctgcctcagtgttgaggattctgaggtcttacccacctttagcaagaaagagtgccatggtctactagcagtgtctgccacaagcacggagggatgggactgctcctgtgccccatatttgctatcccaagattccgagatcagttggaagtttctttattttttatttagagacagagtctcactctgtcacccaggctggagtgcagtggcgcaatcacagctcactgcagcctcgagctcgagggctgagtcgatcctcccagctcagcctc

SEQ ID NO: 37536 - DNA, 749 bp, Homo sapiens
ccaccacgcctggccgagcattgggaattttaaaagctctctggatgatttcaactctgggtgaatcacactttgcagagtttgattcagtgggtcgcggtaggtcgagcctgagaatttgcattctaacaagtttccaggtgatgcttatgctgctggtctggggactgagctttgagaaccactggcatagggacattgtctgcactagtaatggtaaacacccagttttagcattgcaaattgggtcactctcagaagcaaactggagagtttcatgtcaaattattgattgctgagccagtgctggatgctctctgaaagaacatcaatagctctgccccagctttgagctgagaaacctgacgctgcttaacatgccaattctcaaaaatattcattggaatttcccttttacaactgtacatacagccaggcacggtgactcacacctgtaatcccagcactttgggaatctgaggtgggaggatcacttgagctcaggagttcgggaccagcctgggcaacatagtgcgacctcacctttactaaaaataaaaaaaattagccgggcatggtggcacatacctgcagtcccagctactcgggaggctgaggtaggaggattgcttgagcccaggaagttgaagctgcagtgagccatgatcaggccactgcactccagcctgggtgactgagaccctgtctgaaaaaaaaaatttttttaaataaaattctacataacttct

SEQ ID NO: 37537 - DNA, 991 bp, Homo sapiens
gtgcatgcagtggcgcgatctcggctcactgcaagctccgcctccccggttcacaccattctcctgtctcagcctcccgagtagctgggactacaggcacctgccaccacacccggctaattttttgtatttttagtagagacggggtttcactgtgttaaccaggatggtctcgagctcctgacctcgtgatccgcccacctcggcctcccaaagcgctgggattacaggcgtgagccaccgcgcccggccagcgactgcatttatagaggactcttaagatcagggagaagcccatacttctctagaaataaggaaggtgttttaattctcaggaggtcaacaagtcctgaggacggacttcagttgatgcatttccctttgaactggactctgccctcgatttcataacacagggcacggggttagctgtggtaggaagagttgtctccagccactcctaacccagggctcaaagaccagtgtgtgagcctcagggggcgtgtctctaagctcccggaaaccaagccaattttcgcatgcgtgttcttctttgctttttttctggtaagaggacccacagttgcatcaaactttcaaagggacctgggacccctcagaaaagatctagaagcactgttctagggagagaaacagaaaaacagagtctgaagggcagtggagggaggaggccttccaagaaggcctggacacccgacctggaggggaaacgcgtttgtaggggaggaagggctccctctgcctcctcacgggctcccacggctgtgatctgaattatctctccacactctccctgagggatcgagagcagtaaagggcaacgtcctgtcttctctctgatctgggagcccctgagaagccagcattcttctctcccagcttacctcttcctttggctgtattttccagggtaagaaaaagaagaggaagagagaaaagcagctgtcccagacacagtcacagcagcaag

SEQ ID NO: 37538 - DNA, 1171 bp, Homo sapiens
agctactcgggaggctgaggcagaagaatcgcttgaacccaggcagcagaggttgtagtgagccgagattgcaccattgtactccagcctgggcaacaagagcaaaactccatctccaaaaaaaaaaaaaagaatgtagaaatataggctccaccccacatctaatgaatcagataatgctttttatcaaaattccccaaggtgattcaaatgcctattaaagtttatggagcgctggcagaatgcagaaagctcaggactgggagactagggagttgctatcaggtcctgagtttgccactaacttgcagtagaaacttagcggaaaaaaaaaaaaaagagtgtttctgcgtgggcctatttcctcatctgtgaagggaggtagctgctgtagagtattccaaggtctctgctagctctaacgtcacagatatgtgtatctagatgtttctagtttgttgtctaaaaagggcgaatgcaacagcaacagcaaccgcatccccagaatcagccactgctgcttcatggcaaatgcaagcccactactgggtccatctgacgttgcctatccctcctatccctcccatggacctggctcctccttccttaccttctggtccaaacgttggtagtcactggcctttggccgccgggtgactttagatctttttccttccaggacaaaagcaatgatctgaggaaaggaaaaagaaaatgattaacaggtggctctgtaatgacatagttcagtctctgaactcagaggcagtcacctggtagcatatttgttaatgaccctgactgtagaaagagcagtacactcacagaggtctatttaaactataaccattttaagaaagacagagcctaattacatcagaatcctttgtattgcttaataggaaataacaaatagaaggctgtctgagctctagcgtgtgggaggaagtctgtttgatttattcaaaggtacacagtcaaagatctatcaactccttcctagagatatctaggatataggacattcctttaaaaaaagtcataatcagaatttcctatctacaaatgtactttttcaccccacgatgctacatcaactacattctttatcaatctcatttcatgactaaggttaccctgcataatggacacttggacatagaataagaaa

SEQ ID NO: 37539 - DNA, 3423 bp, Homo sapiens
ctcactctgtcacccgggctggagtgcaatggcgtgatcatggctcactgaagcctcgacctcccacagtcaagccatcctcccacttcagcctcctgagtagctgggaccacacacgtccaccaccacatctggctaatttttttattatatgtagagacgaggtcttgctatgttggccaggctggtctcggactcctgggctcaagcgatcctcctgcctcggcctcccaaagtgctgggattagaggcaggagccactgcaccgggccaggaatgcacatttttactaaaggtcttcccctttattctttatagccataggccttatggccagaattggactctccaattttaagcaggttacagaaactagcttctaaatgttgggggctcaatatgaaatgcaatcattttgtcattagagtggttgctaataaacagaccaaaccctgatgaaaaagtaacaggtgtacgtgtctgtgcaatttctgggctttcttctaattattattaattgcagaagtccctgggctctttggtcctggtatcgaagacgcagtaattgaaaccattctttgtgccactgctgatggaagagagaatgttgggaaaggaagctagaaatgacatatcgtctcaagaagggaaataggatggaaggtacgtgctttaactgtcaagtactcaggtcctctgaggctgtgaaggacctaagtgcaaagttatgggaggagattccaagtcaggtcagatcctaataatgtcctaacttggctcctaatgcagtagcagaggacactcagagtaaacaggtgacaggatgaaaacacgattaacaaaacaagagtaaagaggcctaatagggcctgaggaaaaaactgaagtttgttttaaagtccccagtgctcacgggcatctagtgacgggatacccacccacacccaagcttccagggtgctggaaaccccactcccctccggaaggccgctgtcgacttaccttccgcttgttgtgatgagcgatatagaggacagccacaagaatggctgcagtcaccagatatgcaaagaagtggctgctctccgcgctgccatttccagaaccgttcggataaaggtcatccttctcgctacccgtggaatccgaaagtgtcccttcacggttctcactggaggcagaaccggacatcttttctttctcttctttgggcggtgagccctcctcgggtcctgtatcatcatcttcagcctctttgggctccacatcctcagtaggctctgaagacttaacttcctcctgcgggggagaaatgaggtcagtttcctccccagattcggttttgaaagcatgaggagaaagcttccctttgtcagcaagctggtttgtgtcagccttggggagctccttgttatcagaagggttggagatgggcttggaatggtctttccgggaaggctgctctggaaccaccttgttagggctgtcttttgaggtctgctcctccgcacccgacttgctgggcccgtctattgggccctgctcctctgcaccggacttgttagagccgtcttttggagtctgcttctccgcacccgacttgttagggacgtcttttggggtctgatcctccgcacccgacttgctggagccgtcttttggggtctggccgtccgcacccgacttattagggacatcttttgtggtctgcgcctccgaacctgacttgctagggctgtctttttgggtctttgcctccgcacccgacctgttggggctgtcttctggggtctgcgcctccgcacccgatttgccagtgctgtcttttggagtctgcagctccggatgcgacttactagtgctgtcttttgtggtctgcgcctccgaacccgacttgctagtgctgcctttttgggtctttgcctccgcacccgacttgttggagctgtctttttgggtctttgcctccgcacccgacttgttgggggtgtcttctggggtctgcgcctccgcactcgacttgctagggctgtcttttggagtctgcggctccggatgcgacttggtagagcctccaggccgttggctcaagctggggtgggtggagacgtttcctgcagaaggccgtactccagcttcttcttgcttgacgctttcggtggccaagagcggcacggctcctgaaatagaaaaacgagttagcaccggagaagggcaggcgggaagaaggaactcctcagaactggaagagatcgggagcagcgggggaatggggattggggggtggggcgggagacgatggcgagcggagaggtgggtcgggtagggaagaagcgagcctagaggtgacctgcccaggtgagaatgggggatctgggggcaagagtgggatgcgggatggagggtcttacccgccgctgcgacgttcaggaggaccaaggcaaccacgaaccgcatcctgctcggatagcgcttccgccctctaatgctctcgcgagatccgcgcgcggggcccctctccagtcccgcccctgctgcgcgcgtctctcagtctcccgctgccgccaagacgaagggcgggatttagggggcagctgctgatgtcggcgctcgccttcggctgcttcgcttactgtcgccgagtgggaggcgagcctcttcttcctggtttctcgtctccaccacagccacaacagtctggccccccgtttttcgtcccctccgcctcgtacttccgagaccttacaggcagagctggagctccctcgcctctcgcactggccgcggaagtgaggtcactaggggcaggctcctcttggccaccaccatcgtgtgcttgcgtttctatcctctgcttttttcgtggttccctcctggccgtacacaaacgtgctgtgctctggtctctcccatgtgggaataaatccatccgatcacctgcaaagcgttgccttcgcatcctggccctcctccttcccgactccacggagacggtgtccttccaggtcgccaaacatcttttccaaaaagtgcatcctttttctgatacagaagcagaaaacaaagcctgactcctacccttccgggataatcactattaatgttttagtgtattgtctgccctctaaacatttgatgtttttgaatagataatacattataatgtttcagaaatgaaaaccggattttaaagtaaacagactttagaaaagtcttcctactcctccacaggttaccgcttacattagtttattatgtttccatttagttttgttaaaaaaaaaaaaaaaggactctttcccttcttaattagtgtatttctcttttcctctatgcatatttattttctccccatattgggataatcaggtaagtggttttgtatctcaccgtttacagttactgttatgtttatacattaaa

SEQ ID NO: 37540 - DNA, 2215 bp, Homo sapiens
ccagttgcaactcactaaattgatttcatagcccactaatagatcacaatccggtttgaaaagcagttaagctagtcatctcatttttagaccagcccaggtaggtgctaatggttatgcagcaaattagtgacagagtccaagctaaaactcagttctcagaagtccagatgattagtccttccacttagaacagtactgtctccgattgtgtagcaagatatgacacggagaattctaaaatttacaagtgagagggactccgtagatcaaacaggtgatccattattttttaaagcagcagaactctttaaactctagaagcaaccacaaaatatgttttaaagatgagagtggagagcaggctctgagcctgaggcgccttgttgaacctctgccaatgtttcagaactagggttcaatccttacgatttgggaccatgcaaagcctgttaaatcaccggacgggcaaaacgcaatttcctacgcatttctgtgctgctcccccacacccctgagctcgcatgggagggtaggtgaaaaagttaaggtcctggaaccaagtggaggaatgagtcacggggattatcagttccacgagccacggggattacaagtggcagggcgggtgccaacaccttgcaaaccaaggacaatgaccacacccttgggactactattcccggggcctactagggcaaaggctatcgacagtgttgcacactaaagcggggctcctccacgtgcaaggaagccctcctagtactttacatatggggaaactaaggcccacgtctggtagcggctgccttggcaaaatgagaacccaaatctgtgagaaagcctcgagtgcagccccggaccccagggtccctcctgctaccttgtttgagaaccttcttcctggcctccttgtcagttaccaggggcgctgggggccgtttgacatcttcggagaaaggattcggggagctgccagagaatagtcccaagtaaactttgcagaggacggccagcagcagcacagccaggagcagcaccagcggaagccacatcacgccggcgtcgggtcgggtaaatgggacagctccgactgcgctcagcctctaggactgtggctccgcccgggctagttcgctctccagtcaggaggcggaggcagctttgagcactgattaaccagccagccagcgaagagccaactctcaggtgatgattgaccctcccggctctccgtacttcttttgggtttccattgcctactgggaaatgtagttctcggggccaggggagccggcacggaagcggctgtgcgcatgagcagatgaggcctagccgaggcggcgggacccccaagtttggaaagctcttttaacggtgagaacgcgttaacacttgccaaggggagtggttggtgcctgtgcggagctagcagccggcctgaggagggagggagaatgtgatccggtggaaattatcactatggggcgagacaaggccgagagttgtaagactgaaagagaatcccgactgggagacaggagtcctgagttctggtcctggctctgccctggactcgctgccttgaggtgttaaattgctttcctcgtcttacgcctccaggctatgcgaaagttctgtccaaaggctgctcacagcccctgtctgactggttgtcatgatgaattgagctctctgttacctgcgcatcacaaccggtgagcgtctgtctctgtgcccctcaaagtggcccatagttttgtcctgggggcccgcctgggacggagtcctctatggcgggtccctaatgacaccccatccgtggggaacctgggggacggggagccgcccatggacaagcatggtgaaaggatcagctaagggcccatctaatttaaattcctatgcagagaatctaacctccagcaagcagttgaagaatcataccccctccttgcctaaagagggtgcataatgaatacttgattggagaaggatccatttttacaggaaggccgtttccttaggtccaactatcaggaatttgcctttgagtacttccttgtttaatggaattgttgctcttttcttctctgctacagatagtaactgtccctactgaaggccccaggagtgctccagccaggtgtggaaagctggtcacgattctatgctacttggttcattttctacacagcaacagaagagccctcct

SEQ ID NO: 37541 - DNA, 2459 bp, Homo sapiens
cccggccataccctcccttttgaggtgaggctcttgaaggcccagacctttcctccagtgctttgaggtctgatcctgatgataataacacctcactcataacctggacttcacagtttacaaaacacccctcctcctcaccccctcccaaactcggtttatttttgtcgttaaagcagagttgtaggccagggtggaccataggttttcttggtcacgagagacttcctccctccctgggctcccctctgtagtggtgccaaataaaaatctgatcagtcaagcctgtaaggtaactagcgctaatgtgcagagccagtcctgggcaggcctgttcattattttgcacactcttacaccgaaagggcccaggaccctcgcctgacccagccttgcctgccaggcctgggctgggtctcccagcccaaattctcacaagagggccgactccggccagagcgcgcccctctttgtgcctcggtttgcccacctagaggtcagtcccgcaggcgtggcgggtacatctcagggtcggcagaaagtgccaccgggagcccagccggagttgagggcctcgcgccgggcccactgtccagatccagggctcacgagaaaaacgaggacgcaggagagccacacgccaggacgcgtgtaaggccccaacccggccccagcctgggccctagacccctaagaactacaaatcccagcaggcagtgggccgcggggcggggtctcggaagctgcggcctgtggtgcctttgctgagcccaggtccggagggccctcggggacgggagcaccacaacagacccccggacacacttacacacacagtctcacaaacacacagtcacacacgcacacacacacacgcgcgcgcgcgcgccttttggcccctcccctacaaactacaaatcccggcaggcagcgggccgttgggcggggccttgggtgctgatccggacgcaaagattgcgccagccagggtgggatcccggtagctaggtgggggctaccctgctggggaagagatggccttctctcctcgcaaacccagctccccacccctgcacgcgcccctctgccctggagtcgctggtccgagccctccttctctgcgaacctgagccccgccctgccctccctacgaggttggggccgtgggagatgaagatggtgggtggggggttgggcccacagcctgctaagcaggcagagtggcctcctgaacccttcctccatcgcctagagcaaactcccattcctggaaggaggagcagcccagaccctgagactggactaggtctgttagggtccctgtgtggccggcaggactcgtggtgaagcccggggaaggcctgggtcctccaggtcagggatgtaggtcccagggtgtgcaggccgcggtatctgaccatcgtcggcgccctgcgcccaggcatcaattttacatggcagagtcaaggtgaggttaggaggctgccaggaggtaataaccagggcgctcgcattcagcatcctctctctcaaagcactctcctcacacctcagggtcaaatgtcagagctcttgtcctaacttcccaggttgcccaaggagcttctgaggcgctacagaagggacttacccagacccttcagtgcaagccaggaactcagggtccggcctgctcggtaggatgagctgtgctgaggccctacttcatccacccttctgggccagggcagcctctttccagaggcctcttctcagctgatttctggctcccaagcgggagactcaggttacacctgtatcgggagcagtgacaccacagtggccagcaacacattggactttctgtctccaactccattttcagcttttacacttcctgatctgggcatatactgctacatactggatcatcaaggaaggaggaaaatacctagtcaatgaaggtttagccatgaccttgtaagtcagtgagatttcattcttgtgtggttagttcgaggcgagctacttcctagaaatatttcatttgatctctaaacacctagaaacagctccaaaagggatattcaaagtagattgcccagattctcttgatagcagatgtggggttcatattaactggtcgcgtggtctctaagcatgcctatttctgcctgggaagttctcaaaggtttggttttctgagtgtttctgttaaaacaatcagccttttgttgagtagcccttttgcccctagagaggagagataggtaccatagaaacttggagacagctattgactcagtccctggactctttaataagagcccgttctgttttgtttgtttgtttgtttgtttgtttcctgagacagagtctcgctctgtctcccaggctggagtgcagtggcgcaatctcggtccactgcaacctctgcctcccgggcttaagcggttctcctgcctcagcctgcctcagcc

SEQ ID NO: 37542 - DNA, 2626 bp, Homo sapiens
gttggccaggctggtctcgaactcctgacctcaggtgatcagcccaccttggcctcccaaagtgccgggattacaggcatgagccaccgtgcccggactgagcccattctcttattattagaaatcttattatcagaatgtgagcttctgcattccagggcttcgcaccagaccctcaagtcagtaatgacccttgggacatgcagtgtgccaaaagctgttgaatgcccattcctgctccctgaagatccaaccagcaatcagcagggtgcagttaaagtcacagagcagtgttgttaggtcattacagggaatgtggctaaggaagggcaaagcccagcaaaacttgtcctaacttcccacgttctttcgctctgcgggccttgccttcatttaccttcctgataactaaagcctgggtcggtggtcctccaggccacgccccttccaccgtcagcctccgggcccaggaaatgagcgacaggctgccatgcccctcctcaccaccaggggtcgccctctcccgtggaacgactgcttaggtccccacagtggcccgggacggggtgaggggactgtggctttggctctgtgtacatcatatggccttggccagcatccattcttctctggcctcggcttttctgttggtaaaagggagggagggtgatctcagggccctccaggcccatcaaggaaggaggtggggttggagacgtcggggagccactgtgtccagtctctcctaacggggagggtagaagaccagctgggaacaggagaagcttggctcccaggctctgtgctgaagaaggaagcctaagcagggccatgttacatttggtggaggagggagagtgtaggggaggaacagacgccggccgctcccgctaaggaaggcaaattgaggaaaggacccagtggggtggggaaggtcggccagaggtatccagagaaccagagaaagtgagtgtgagggagtccttggtgatccatctgcgctggggaaaaaggttttcagcagataaacagccgggacctcgggggattgtgcctcagcctaggcccggtagtcgaagacatatggacaggaaatgggcaagacacgggcctttcagagaagagagaccaaagatgtttgcagagaggcaggctttgcgcaacctgtaaagaatgagtaaggtttgaatagcagctacaacaaatattgattgagagcctgctgtgtgccagactgtgggcccggcacttggaatttggccgtgaacctagcagacacagtggctgcccatttacatagcgtgcagtcgagtgtgggagtttacagtctagctgtgaaataaacctgtaggtttaattatggtgggagctcagagagcggggtaggagactgtcctggtctgggacctccactgctgaggaagggtcacctaagctggggcctgcaggaggagggaggaaaggggccaggatgttccagaggaggaatagcaaatgtacactccagataagaagggcctggtggagattagaaagggtggaaagaagccatgtcacactgtgtttgcaaccactctcccccacacccaacctcacctgtgtatcctgtgtacttggtcacctcctgggctctcttgggggcagaatctgggcagcgggggaatggatcaagctgaaagacagctaaagagactgtggctgagtgcaggataaagagccaaggtggaagggagagggctgggctctgggagacggggacatctgtgaagaggatattgccattttgggggtaacattttttgaagtatgatatacatatagaagagtccttttttctttctttcttttttttttctttttactgttgtgctgcatattaagaatgccctcttggtcgagtgcagtggctcacacctgtgatcccaacactttgggaggctgaggcaggaggattgcttgagcccagaagttcaagaccagcctggacaacatagtgagaccccatatctgtttttaaattaaaaaaattaaaaagaatgctctctctctttgtcatattctgtaaagattgagtaaatatctagaaattccactaaaatttccttaagtcaacaggacacagaatggtctgcctgggcctcagtcacattggaggagcagagagagaaggtgagtgtgagggagtccctgggaaacaatggagggactggggatggggaggtaggaggggcctgatctttccaggcatcaagaagcatttggtttctgttcaaggagccatgaggagtcactcaagggttttaggcagagccgtgacacaaccagagatactacgagcaaaggttccggaacagggcagggcaggacaggtgagtgggacagaggcacaccacctgggtgggacagagggaagaggatgctgctgtctgggacactgtgccctagaggctggggaaaaccaacctcaactttcagctcccagcctaaccctaggagaacctgagaagaactagtggaatgccttccggaaaaacagagacaaactacacaccagacttttgtttgtttgttttgttttgttttgagatggtgtttcactcttgtcacccaggctggagtgcaatgg

SEQ ID NO: 37543 - DNA, 648 bp, Homo sapiens
tcctgactttgtgatccacccaccgcagcctcccaaagtgttgggattacaagcgtgagccaccacgcccggccggattaaagttcttaactgaaagtaagagaaacagactctagctagtttaagctggaaaataaattattaaaactattctgtagctcatagcatctccagcagggctagagagttagccaggaataatgtcccaaaggtcacagccaagccagcctggcagagccaccctggacactgataccactgtttgccaatgccattgatttgggccctgggtggtggcactaagggctcactcccctaagcctctggaaacaggatttggctgtcaccaccctcccagggtgcatttttcttggtgcctgatgcaggttcagagtctggcacggggcctctggctggcagaccctgcacctcagcggcaaggggaggctgggaaggcctcacctggcttctgcaattggaaacgaggattcatgaggcggagaactccccaaatgtaaagcatgtttagcagccaaaaaggatggcagatgtccccttctgttcttggtgagcccagccacccacatctccgcggctcttcctccacgtgctgcgctctcccacctctgagacctctgaccacagcct

SEQ ID NO: 37544 - DNA, 3049 bp, Homo sapiens
aaacaggaaggaagatatctagaaaaatgtcaaaagtccccttgccagagtcccacagttgcctcaggaaattgctcccagcatgaggctcatgggactcacggatgccctgcctccctggccagctcttctcctccgtggcggccatggtccagcacttcatgtggcaccctctgccccttgtggacagacacagcggcagccgggaactcacctgcctgctcttccccaccaagccttgaggccacagcgaagtacacaccgcctttggccccagtttgcttcttgtcccgccccaccttgggctgtcttcctctctccttccccacccctcctcaccctagcctttcccagtgcccacaagcagcattaatggggaaagcctgcctggaggcccagggaagggtcctggagaccccaccccatgctcacctagagccttccactgccctctctgttgcctctccaaggctgacaccctcttcctggcctccaggaatgcaggtgtctgcccagttcactaggtcctggatgaaggaaccgtggtggcctagaccagtcaggggacagcacaggcactgctggaacagcaaaggatcctctcacatctacttgtgggcctagggcaccctgagagggactggcctaccttgcacaagttcacattcaataaacatttgttgaatgaattattgaatctgctaaatgaagcagaggtgtcctgcacgagggaggccccacggttctcaagtgtcacagggcagactagcctgcagttatggagatgcaggagctaggcccgggcagaaagggccagccgtttctaccccagattggggcttttacttttagatgctctgtgccgagcgaggccaggctgagtggctgatttttgttttgatttgtgggagttggagtggggaagggagggaggcgcagtgctgtctctgacaccctattaaatgaggagaatggagtccattacctactcctccaacacctacttactgtaccttgctcccgggggagtgatgagcctgattttgggagcttggtgttgtctagaggaggggagacagtgggccccgggaaacaactagatctgatgctccagtctagagtcaaagctagggaaagctgaacagtggcgctcagagaagacaggacagcgggcgagagcttggggggcgatgggaggtggagaggcactccaggtccccagggggccaggcggagctgcgggacagggcgcagaccccgaggcccagggagcaccgggtggccggcggcctgcaggctggcgagggcgtcgggcggcgcagggcaggccagggggcgggggcgtctggggccctggcgtggcgcccggaacaccccgtgccggaagctccatgtgaccgtgactccgcagaagccgcgagcgcagcgaaacaaagggcggctctgcggccgcctcgagctcaggctggcaccgagggcccggacccccatcccactccgcacccccgggcctcccggcccttcttgccctccgaccccgggctctggcagggccgggaggcgcaggaaccccgcgggggatggggccggcggactggcactgaagacactgggatgcaagcgggaggctgggggcggggggctgggggcggggggcggggctgcagggcgtggacggtctccgtcagtgccggctcctgcggattaccgcctcggaaccgtcatttcttgcctgtaataaggggaagataatcgtccctacgtaatcgtcctccggttaggaggcttaagtgagacatgccacgtaaagggatgcctgcgtaaaggggtgcctgatggggagaaggaaacaccaaattcgggccaattagctgccactgtcaaaatcgctgggaagacacagttatcggccagggcaccaggaaggggcacgggctggggcagccgtcataggggtggggtgcggggggcgggtggacaccggtgtgtgtatgtgaggaagggaccagcagcggaggcctctagcagaaacaggagaataggagaccggcaagacacgccttcagccccactggcccagccctggctccctccagaacctggcctccgtcctccacaccctccccagcatcatcccgcaggcccgcaggggctgtggaggctggggagcttggcaccttgggctgggactcagggtacagtcagccccctagtatccccacaacagctctacaggttccacttccctagaggagctctccactctgtggccacaaaggcctcgggactcaggggcctgttgttactgagccccgcagccatgaggcatttggtgggggagtagaagttacagcccagagctcctgaagttaatggcccaacagggactctgatttttcccagcttagggactaacttcaaggaattagcctccattcctcccctccctggggagaaagagaggaggagcagctaggcagtgggacagtctgtaacccgggcccttgagggcaaaaaggaacctgttgcctgcccagtacctcctcagcttgcaggcctgagcagatggccccttgtccagggagccttcaccactcccccagcctgggcccaggtacttaggccgtcgtctcttcactcccaggacagaccggctactactgcccactattggatattctgggcctggaatacagcaggtggcgtgtatttattgaaagagtgatcaaataggtcaagtctattctggattcctctaaagctgataacattcttttatcagggcctcctttgttaagtgaaaagtccaatccagtgctgtccaatagaactttctgtgatgatagaaacgttctgtatctgcatggtcgagtacagtagccaccagccactgggggtcattgagcacttggaatgtgactaatgtaactgagaaactgaattgttcattcacgatttaattacttttaaatagccacatatggccagggttccaagtctcatgccttcgcaagtgtgaggggcagtggggaaagctggagaggtcggc

SEQ ID NO: 37545 - DNA, 3185 bp, Homo sapiens
ataaaagtcaaacatgggtttcagacattctaatgtggatttgcccagcttccatgcagccgggaagttggagggacagaaggtgggagatgaggagcaaaagcacaacaggcaccagggtaggggctgggtggggaaagagcattgaaagagagggaggttctggctgagtcataatagcatagattcctaggacatctgagctgctgggctctgagactgccttgtcctgtctcctcacattatagatgaggaaattaaggcccacggaggggagagcagtctgtgaatggaggggagagggtaactccatttttcctctagcagctcctcagctaagggaaagtcctgcctgtgggaaggaatcaaggaagagagattgggaaaccgaggccagagcactaagttaggactgaccaggacaagggccccaggctcccatgagcccgtgttcctgctcccccgcctgctttctgctccagtcccttctccggtctcccttcctttgcctgtagacctcagctctgctctcaggacatcccagatagcagccctcatgctcagaacacacttttcttcccagggtacatccacttttgcaccccaagaggatccggagataaagaaggtaccaggcaattccaaacactggggctgggtcccagggagaacaactgagccaggtgtctcacctgcgaacctcctgtcaccttcagccctgagatgcaatggcaataatccatggccactttggaagcctctctcatacactgtcagcttgcatctgcggcacctgcagctgttgctgggggctcatttttatatttaattttttagagacgaggtttctcttgcccagaccagagtgcagtactgcaatcatgactcactacagccttgaactcctggctcaagcaatcctcctgcctcagcttcttgagtagctgagactatagggcacaccaccatgtctggttgttttttaaatattttgtagagacagaatctcactatgttgttcaggtgggtctcgaacttcttggcctcaagcaatcctcttgccttggcctcccaaagtgttgggattacaggcatgaggcactgcacccagctggaagattgtttttaaagcagtgatgtcatggccagagagaaaccagccccacagttcccagatcagcctgggagatgtccacaaacttaggaaggcttccagcaaagaggccttgggcaggctgggtgatctcccaggccctaggctgtgcctgcccttgattgcacagaatgttcactgcctgggaagctgggagctgggacagctgggtgacctggaaatggaggggctgaggagctccaggctggcctgctcctccttgccaccctcttcctgataacaacagacaaggctgggaggctcctgggagcctgctgcctaattcccagggcctggcagccagccctgcagctgatgcaaggccaggggtgggtgagctcagcctgtccccagcacccagagcctcttgcacctggtatgcccttgaaaatgcatctgttcatgccccctctgcctcagcctcctagggtccagctctattccttctgaaagcgtaggagggccacctaaggatctggaagcaggccttgcttgggggatggggtgggaattaggcagcaggttcccagaagcctcctggccttgcctgttgctatcagggagagggtggcaaggaggaacggggcagcctggagctcctcagaccctccatttccaggtcatttctgagcatctctgagtcaaccccgcacctctgcatgggcagcctaagagcagtgcggggaccacagccccgcctccagggacctctgcagtggaatagaggggcagggctccctgcgggctctgcccctcagggtctgtccacaccagcccacttcctcttccgggagaggtcagacagcccctgggaagtctccagaccttcttatcccgtgagaagatggactttcctcctctggctctccccttttactggacatgcaggcccaatgtaggaaggctggggcctgtcactcttcaacagccctcaggtgtcatcagctcaggaccaggattcattcagcatctacttactaagagctctgtaatgagaatgtgacaaataataactcgacgcatatcaaatgcatgcctcatcttacaaagtgctcttgcgattagtgttttgagggatcctagtgacgatgctgcaacgtagggaggccctaggtggagaaactgaggcccagggagctgaagtggcagcaccaggagtcacaccacagggtcttcccatatcctcctgctactttagtcctgccccatacacacgcactgagcaggaggcaggcttcctgccacatgctcgactgtcacaggacaccagctgggacagggagcagagaacagtgtttcccatgggcagtggtagatgtaggaggctgggagaccaggacttgtggatttagggtagttgcatgccagagccacagctgtctgggagggactggagacaggctgaggagcagggagggtacctggagcactggagctgtgcctccctttaccatagctgtttgcttagacaatactcaactgtcctgctgagctcaggctggcatcggtaggattgggtctgttgcctggggattgaggctggctacaggaccggctcctccagttctggccaaggaccagtggccgtggccatcactggactcctcgctgatgccaggattgaacaaggcctttccagtctgcccattgtatctggggcctgccctttgtcctcaacccagtctgaccgtctctgggggaccacgcacccaccttcatgactcccggccaaccctcccagcggctcttgcagcatatgcaactactgctgctggtgagctcaggcagctggactcatgggcaggcaagaacatggtgtcctgcgctggagggcaggcacaggctgtgccaactgcacccacctctcccagacttaggcctggcagggaggcctgcagtgtaggcaagggctcgctggaaagagcgatgaggaggcccagcctgctgagcactccaagtcctccttctactctcctgtcctttcactgagaggagatctaaagaataaagtttagctgggcgtggtggctca

SEQ ID NO: 37546 - DNA, 1838 bp, Homo sapiens
ttttttgagacagagtctcactctgttgcccagactggagtgcagtggtgcgaccttggttcaccgcaacctctgcctcccaggctcaagccattctcctgcctcagcctcccaagtagctgggaccaccggcatgtggcaccacgcccagctaatttttgtatttttagtagagatggggttgtactgttggtcaggctggtctcgaactcctgacctcaagtgatctgcacacctaggcctcccaaagtgctggaattacaggcttgagccaccgtgcccagccagacctcctcttaatccctgtgtttctaattccacataatttactggcccccttaaggtctgtgtccccaagtcaagagcctttcggatttagttccttcgaggcccgaatccccagtttcctgctcaggctggtggtcaccctggctttaaggaggggaggaaggggcctatgatctagcaattcaatattcagctgtttccacccccaccttacacacagtctctggtgccttcatggagtctgcagacgtgtcaaaccatatcttcctgcgctttgctaccttagttgcttctctcagctactgatgtttcctgactcacgtgggtgacggtgaggataggccctttctattccttcactggcctttcagtagggttttgggtgggggaggataaaaataccacctcgtttaactggaagttgcattaattatacaaaggtctttctgatcattgctcatctttgaaagagaccagttattggttaaaaattaatctagagaaagatgaggcaagtgacctggaacagaccacagttttcagctgactttttttttcaaacaacctatcaccaaatgtgttttctcctctgtcttgggccatatcccttcttttcaggatgtaggagggcagtgtagcaacagactctaagatagactttctaatgattgctgttccctcaggccctctcctctggctccctctccagcagcagttttctcagctgggaggctgagacatagatggttaacatggatctacacataacttctctgttagttccacctctcccactccctgcagcctgcagggtggagctgacttctctggagtcattccagctgcttgccttttgtggttctaaacaatggatcgttaagttgggccttccagagcagtgcccttatctatacgtggcagtttggaattgtgccgccacctagcctttgaagctaaagacaggtacaggaatgttcagcactgtctgtaatagcaaaaagctgaaaacatgcaaatgactgtcaccaggaggatgagtaaatacgtcacatactcatatcatcgaacacaattcttcagtgaaaatgagtgaaactatcactgcacatggtagtagttgggtgtgtgtgtatgtgtgtgtgtggggggggcagagtctcactctgtcctccaggctggagtgcagtgacgcaatctcggctcactgtaacaatcgattctcctgcatcagcctcccgagtagctgcgataacaagtgcacgccaccatgcccggctaatttttgtatttttggtagagatggaatttcaccacattggccaggctggtcttgaactcctgatgtcaagtgatctgcctgcctcggcctctcaaagtgctgggattacaggcagcgtgccatcacacccggccgcagttgagtcttaaaaacacagttaagtgaaaaaagttagtcacagaagactatatacttgactgaatgatttcatttatataaaatgcaaaagttccctggaactgaaacatattgtgtgggaaaatatacacga

SEQ ID NO: 37547 - DNA, 945 bp, Homo sapiens
ctgatctcaggtgatccgcccatcttggcctcccaaagtgctggaatcacaggtgtgagccaccgtgcccggccaaaaaatacttttatcactccctcgctgcagctgtctatgactttctccagggggtaaataattcacatacacagcctgtgaaggcactggcattatggaccttgggtttccaaataacactgaagaaagcgagtccatggaaaactgataatcaagaagctttattacttccaggattgcttatttttaaaacccctgaaaggaaaatggctttaattcagaaactggcttgtggagtggtggtggggcagcggcgaggcagggttgatacaacggcaactggaggaagaagttactgtgaggggaggcccacccgcatccggtgccccagtggactggtgccacctcagctggcatgacacctgctagagctgtgggtatttctcctattcaggagctctgggtctgttgatgcccgcatatgtgaattgggccccagggctctatgccacggcctggaagaggcttcatgtcagaacttgatggatgggggtgggatgggggtgggagggaggtggggcaggcactatgccaggaaaggtcaacagagtcttgttgtgcctgggagggaatttggactttatcctgagacaaatgaggaactgttaaagggtttcagccaggaaaaggcaggataatttttttttttttctgatagagtcttgctcggtcacccaggctgaagtgcagtggtgcaatcgtagctcactgcagcctctgcctcctgggctcaagtgatcctccagcctcagcttctcgaatagctgggaccacaggtgcatgcccccacgtctggtttattttttattaatattgttttgtaaagatagggtctcactgagtgcccagtctagtctcaaactcctggtc

SEQ ID NO: 37548 - DNA, 845 bp, Homo sapiens
tagtcctggctactcaggagactgagatgagaagatcacttgagcccaggagttagtgagctatgatcatgctactgtattccagcctgggagcctaggcaacagagcaagtgcattccagcctggatgacagagcaagaccccagctcaaacaaacacacaccaccaccaacaacaaaaaaccaagaagcctcaaaattcccatctagttactacatataggtcaaagttcagtatctttgggtggcacaaaggtcttctgagctggtgacttataaactaaaagacaatccatccaaaatagggactgagaagaataggttaacatgattacagctctcattcggcaaacggaggagtgggaagcatgcagttatcactgcaccaagtccagctggggaggagtggaggcttctagccactggtgtcactggcaccttgggttcttgtaatcctcccaggatagaaataaagagagatcaccagacacagcagcaaagaaaaagtttattttagcttgtgcacaagggagccagcaacaagaaaggagaaggcacaggctcctccccaagggtagtctgtgggttagtctttctataaggaagggtcacgtcagggcatgtagaggagggatttttctagtgcttgtgcagtgctaaacatgcttcttcatacattgtatgtagcattagcattttaaatctctacccctgggcattatttttagcattaaaataagaaacaggtaactataggttgtagtttaagtctaacggcacatacagggccccagagaaatccctagccccctgaaataggagcttgtgattaagggttaatggctt

SEQ ID NO: 37549 - DNA, 703 bp, Homo sapiens
ctctatcatcccccagactggagtgcagtgggatgatcgtggctcactgcaaccaccacctcctggcctcgagtcatcctcccacctcaccctcctgattagccagaactataggtgcacaccaccacgcctggctaatttttgtatttttttgtagagacagggtttcaacatactgcccaagctggtcttgaactcctgggctcaaatgatccgctctccttggcctgccaaagtgcagggattagaggcgtgagtcaccacgcccagcccattttccttttcctgtccataaattcctctctgaccacatggcagcatcagagtccctctggttcagggagttaccggattcatgaatcattctttgctcaattaaactctgttaactttaatatgtctaaaatttttctggctgggcatggtggctcatgcctgtaatcccaggcgggtggatcacctgaggtcagaagttcaagaccagcctggccaacatggtgaaaccctgtctctactaaaaatacaaaaatcagctggatatggtggtggtgcctgtaattccagctacttaggaggctgaggcaagagaaacacttgaacccgggaggcgggggttgcagtgagccgagatcgcgccactccactccagcctgggcgacagagggagactctgtctcaaaaaaataaataaaattttctttta

SEQ ID NO: 37550 - DNA, 741 bp, Homo sapiens
gcaggcgcctgtaatcccagctacttgggaggctgaggcaggagaatcacttgaacccaagaggaggaggttgcagtgagccgagatcgtgccattgcactccagcctgggcaacaaagcaagactctatctgaaaaaataaaacaaaaacaaaacgtgtaagaggaaaggtctcatacttactaatataaacgaattgagaaccaaatgctccattcgcctgtcctgctgctctggagatatcacctctcccctactgcttttgaggcccaggttttcagttattcccagtcttctttgtcctgtcgtccttgccttccctcaagcactcatgaccaaagaataagtaggccaaatagataacgttctttaaaaagagtacagagttcctgacctattcatctccactttccaaataccttttggcttcagcttatctcatttttgcagctttagcaccgaatgaaaactgtgcatgaaggagcaggcaggttctcgctttgtgaagcgtctccttgtgcctcgagctgggggaagggctagaattgcagtaacagcaagagcacccaagaaatcggtctcagtttccttccccattttcagaggacagtggagatctcaaacaaagccagctaggcacagatttctttagagctttgggttctttcctctaccaaacattttaaattgtcatgtaaattatacatttgtcagctttatcctttatggcttttggttttt

SEQ ID NO: 37551 - DNA, 983 bp, Homo sapiens
cagcaccctatggattcacaaccacagattcccactcctcacactccagctacaaaaaaatatattgtatagacatatatatgtgtgtgtatgtgcattttttaaaaagcattcgtgcttatgcaatattaacccactggtatttcagagatggtgacagaggtcccatctggcacccttagtttctttgggaatcagcattcctttatcaactcaccctgcagacttggtttagcagcagaaacctatccggctctcccaggcaccggctttggcccttcctgcacagcctcggaagtgcctggatcacctccatcagcagctatcgacctctgtctgaagtccaagttgtttgcttacctttcctgggctgagtcattaaaggaaatgtattagtttactttttcaacttctctattctctagaatttagcttccttattttacacacgaaaggataaaggagttatactggatattttgtagcagattgggggtgggggggcgagggtcgggggagacagaaggagggcctaatctgcaatagaaaaagagagaatgattcttgtattaatgtttgtttttcatttatttatttttcctgcatgatcatgttcaccatcatgtcctgaaaggcaacacctacaggcaaagaagatgtggaagggcctgcaccacctgatcgccatcatccctgccctctggggcctggcaatccagttgggcagcctgcacagaatgacctgtattttctgggccaggacagaagtcaagaggaaggggagatgcacaaaggccaaggtagtcagagaaggtttagatgagaagaggccctgaaaggtggttgggacctggaaacagcagagtggtgggttctgggcagggagatgcccaaagtgcagctgtggcagggcatgatggctcacgcctgtaatcccagcactttgggaggctgagatgggtggataacctgaggtcaggagt

SEQ ID NO: 37552 - DNA, 3419 bp, Homo sapiens
ccatatagatttttctgctgggagataatgcactgaccagcctacacacgcattttgttccagttgacaattttattacacattgtaagttaataaattggcattctcctttaaaaaataacaaaaaaatttaatagtcttatacagttactttcccatgaagggttagcttgaaaagtaaaaagcaacgaataaaaatatcatcacctattgtctcttttgtggtcgaaccttttcttgctgcctgctttgagcgaccgtggatgtggtcactgagtctggggaggagccctttatcttctttgtggatgcccccagcacagcccaagtgcttcctttgtttcccactgagcctttagcaaatcccacctttcctcctgcaccgacggagaggattgttcttgggaatgcaccttgttctactgccgccagcagtaggcagctggagactgttactaggggtctccttcacctccccagcgtaaagtacatcccatgctaggagcaggccgttccctgagaacctcattaaacccggcgttcttgtcacgcgctccgctcagggccaccaggccaccagcccgaccagacctgcaccgaggcccagccccagaacaggctgcagagacccccgcccccaaggcgggctccctccaaacgggactccatactccttgctggctcaagttttgtttcgctctttttccctgtaattcctttattgggcaaaactgggacaaacgcaggtggacattttaaagtgaaagcttcatgaaacagcccattccacgccgtcaagagatctgcttaagcacattcaagggaacgaatagcccccacccaccaaaaaagaaatgttcgttccatattctcctgaacagaggattgaaacatcgattcccccccccttcaaaggaacaggaaggccacggggcaaggacggacttgggagcggcctcctttctctctggagggaaaggctggagcgctgcctccacttttaagtccacgaaccacgaagggtgaggatccctcagaaactttagcgcaggggagcgggcaggagggcgattgtttaaatcgatggcagcaccttcattaatctgctttccggccatcttcagcagagccattcaccaggaaacgactagaaggtgggcctgcgcccctcagatatcccggggccggcaacgagccgggcagggacgccgaaggaaggccgtgaggagccctcgctggccggccaagatggccaccttcacatggccgaccgccaccggctccctgccacccggcatctagaggcgggacggccagaaagaccccagccgcagcacaaaacctccgcgattcccgccgcctccgctgggggacgcgacctccgggaaagctatcccggccaacggtcggaagggaggtgccatgtcaccgcacaggggagcgggtccagcaagccccagtcgctttttctcccacatcaaacaaggaagagcaatcccccacgtctcctcgcgtctgcatttttctcctagctctagcggctcaagatagctgaacggtctctggagggccggattgccacggcacctcccgcggccgcgcagtgtggttcagcccggactccgcggggcgagctgcccttcctcccccgacccccgcgcaagtggtgcattggcgcgcggcgccgaggggcggggcccgagccgggcgcgcgcgggcgctgctctataaataccgggccgcaccgcccgctgcttcgttcgctccgcgccgcccgcctgctacgagtagaacgctgtccgcagcttgcgcatttcgcagccgctgccgcctcgccgctgctccttcgtaaggccacttccgcacaccgacaccaacatgaacggacagctcaacggcttccacgaggcgttcatcgaggagggcacattccttttcacctcagagtcggtcggggaaggccacccaggtgaggggacggcctgaagcgaagcgtggggcggggcagaaggcagcgccaaggtccggctggctgcggccggccggtggtggggcccgcgcgggtcgtcctcgtccgccgggtgatggaagagcggcgaccgcgcgctttcctcgtggcgccgccagggcctggcgcgtggccgccgctcctcttccccctcccctctccacccttcccttcccccctcccttttcattcggtcgcgcgcctaggcatgcggaaggttccagaaaacgtgaagggcgggggctgtggtcgctagtgagttctggccgggaagggagggcactgttaacccctcccggccctgccgtctgacaaacctggagtgggcgacccgccccgcgtgctcgcgtccggccctcgggagcgcgcgccccgcattgcagcggcgaccacgtgtttgccgcatgtggtatctgggcgagggggagccgtgagcctccccggctgtcctggccctcagtttgaggggtggggggcctatgccttgggacgtcgtctggctccactgcctcagtggttaggtcttgactacacactggagaatacgcacatgcccttcggcggatatggccttgcctccaaggtgacggcctctgactaaatatagctcatgtccaagaaggcagtccttatttggaccccttgtgaaaaggatgggaagcatgaattaggagctgccattgctttgggttcgcatttaaagtcttcggtgcagggttttacttgaggctttgtccgctcaaccgccattatggggatcaattggcacgtgaaggaggagtaaagctatatttccaggaactgaaaatctcagcctgagcatatcggctagtaaagatgattatttggctcttttggctgtttctgcccttaggatgaccgcagtagttatctatctggtggctttagggtctggtcagtttactgtgcccatgatgaaatcccacaagtaacttagtggtatgagaggacaaacccaggatcttgatgagtgctgaaggttagctgttacaccagttagtagtagaccgaagttcagagcctgcagtctggcttccacattatgtttggattctgttttaggcggttatagaaaattcagaaaaacgaacttgaattagggagatatttgttctccctcctaacaatagatgacaaagcagggagacatggattcggaatacgtttgagcatcttctacactgttgagcttttgtttcctgcgcaactcctaacagcaaaatcagataattgccattttagtcagaaaatgcttttcatttaattgtttaatcgaattatcttgttgctcattataattggtgttccttaagattagggaaactggcctacctgtggcctcagttctaccagactcccaggtgcagaggggtttggtacagttgtggaa

SEQ ID NO: 37553 - DNA, 2855 bp, Homo sapiens
ctaggttctaccttaactgtgtctgttactcatttgttaaagtgctttggggccataggtacgtgcctataatcccaacactttgaaaggctgaggtaggaggatcactttaacatagaagttggaggctgtagcgaaccattatcaagccactgcactccagcctgggtgactgagactttggctcttaaaaaatgctatcatatgaataacctgagaatactatatgtgtatctttaaccttgaattgtaatccataattagccataattcaggaaaataacctcaatccctagacccagtgggtgggcattttttaaaagcctaagcaagatttagtcctcctagtccacttaagccaaaattcatgtgtccttattgcagcagccattcaatgccatttttaagttttcaactaaggttgagggcttcaaaccattgaaggcataaaaaccgctaaaagtattaacctggaagtggtaatgtctatctaaagtcctggcaatttaagcctattaatctgcatacatttttaaattatgagcttagttttaagggttgtatgatgttttcatctgagaagttctgaaacgtgatttctagtcaatatcttgcagagataaataatgcaaattagctgaaaatgctataaatttccaaaggcttaaatttcatttatggcaggttgtgtagaaaatccgcagaccacactgctcttgaacctaggagctacatgcatagagaatagccacttggattacatttctaccaacatctgaatggtggtccagcttgtcctgcaaatgtagagccaaggagtgcttgcttatgcctgtttgcatggagacttaaaaacttggaaatttggaggccaggcggagtggcctgtaatataggccactatatagtaatataggcgtgagcctataatcctagcactttgggaggccaaggcatgcagatcacgagaccatcctggctaacacagtgaaaccctgtctctactaaaaatataaaaaagttagccaggcacctgtagtcccagctactcaggaggccgaggcaggagaatggcgtgaacccgggaggtggagcttgcagtgagctgaaatcgtgccaccacactccggccagggtaacagagtgagacttaaaaaaaaagccgtggaaatctgggtatggtagcttacacctgtaatcccagcactttgggaggctaatgcgggtggatcacctgaggtcacggtttgataccagcctggcaaactgaaaccccgtctctaccaaaaatacaaaaaagctgggtgtggtggcaggtgcttgtaatcccagctactcaggaggctggagaatcacttgaacccaggaggcagaggttgcagtgagccgagatggcgccattgcactccagcctgggccagagcaaggttccttctcaaaaaacttggaaatctgttgggaagtagggggagggcaaggttaaaacctatgcaggtgtgtcaattagacttgttccaacttgagaacctgaattttgcatgtaattgaaatgttccagaacaagtctggcagtttcataagggagtttttagatgccaatacattgcagataaccatattggctacattaggggaatgagcatggataggtgcctccaagttggtagaatagcatgagaagttttcaaaagtaaccgctttaaggttatgttcagtatttgctaagtaaacaaagattccccaaccttgagggagcttgtggaccaaggggatagtgttgtcctgcccagcctaggggaaaagtatcctgaaggttaataaggtggtggaggaacattaggccacagggagcagagggaaagcataacagcaggggatgataagggtgattatagtttagaaagcatgaaagtatgacttaaggaaatgtctttaggttgaacattctgtatataacctgcctttctaaagtttcaaaggggatggatacccatcaggggcaaagatccaaatcctgagggtagaatgaggaggatgtatactaaagtcttttggctaaaaggacattgatagcccatttttagaatggctacagttgcaacccaactctaccccactgaacagcttttattaccagtatttacatgaccactttttctttacacctcaccctaccccaatatcttccttgggaaaattggtcagagaggtggtatactaacagtttggggaagggcagcatccttgcccatatttagaaaaatactttttcaagtgtcttctcccaagtaactcttgggacttttgttaccagtcaagtaggtacagtgagtttggcaaacaacatagtggcaaagtatcttctattgtgttactatgagagaagatctgcaaaaggattgaaaatcagcatccctcccacccattcttacaaagtaatcaggggaccctgtgccacagccattgcttgcccatataataccttgaatgaattagagattttccaccaaactccatttggcctcctcagtggtgggggagggtggcaatctgcttgacaactaacatgtcggccctgtcctggtctatccctaactagatgctaatacaaaggttgaaaatacagatataggtagtaatgaaaacagatttggctgggcacggtggctcacacctgtaatcccagccctttgggaggccaaggcaggtggatacttaaggtcatgagtttgagaccagcctggccaatgtgggaaaccatgtctctactaaaaatacaaaaattagttgggcgtggtggtgggcacctgtagtcccagctacatgggaggctgaagtggaagaatcgtttaaac

SEQ ID NO: 37554 - DNA, 3030 bp, Homo sapiens
actgttagggtcttgacagctataaagatccatcctattgagcttcagaaagtgctctgggaggccaggcacggtggctcacgcctgtaatcccagcactttaggaggctgaggtgggcagatcacctgaggttgggagttcgaaaccagcctgaccaacatggaaaaaccccgtctctacttaaaatacaaaaaaattagccaggtgtggtggcgcatgcctgtaatcccagctactcgggaagctgaagcaggagaatcacttgaacctgggaggcggaggttgcagtgagccgagatcacaccattgcactccagcctgggcaacaagatcgaaactccgtctcaaaaaaagaaagaaagaaagaaagaaagtgctctgggagtgcttctcaaccttttctgcttcctggcacactccaaaaacagttgcatttcgtcaacaccctgggaataaacagaagaggctactcagatcaggaagccagcttgagataaagcagggtttctcaacttcaggactagtcacattttgggctggttaattatttattgaggggattatccaatgcactacaggacatttaggagcactccctgacctctatagagatgccagcagccacctattcttcctcccccaagttgtgacaactaaaaatgtctctaaacattgccaaatgtctcccagggagcaaaactccctccagttgagaactactgggctaaggggactaatatctctgcacatctgtaaaccattccaagcacaccatgctgcggcctcagttaagaagctcttgattagggagtcacagccaaaaggtatggtccctgtggccccctgctctgtttctctgagtcttctgggcaacttcatgccacaagcaaaatgggtcactgctgcctcgcctctacatatcatatagcatttctagctgggtacggtggctcacacctgtaatcccagcactttgggaggccgaggcaggcggatcacctgaggtcaggagtttgagaccagcctggccaacatggtgaaaccccgtctctactaaaaacacacatacaaaaaaaataaaaaattagccgggtgtggtggtgggcgcctgtaatcccagctactcgggagactgagggaggagaatcgctttaacccgggtggcggaggttacagtgagccgagatagcgccattgcactccagcttgggcaacaagagcgaaagtccgtctaaggaaaaaaaaaaaagcatttctggccaccaagtaaatcctaactgtaggagacaaagcaggtttaatcctaaacttcgcaaagacctcttcttttataccaatgtcttcagctctgaggaaaagggagctaagtctacttgcaaccaaaaaatagagattgtcattctccactctcaaccaaattgctcccacccataaactggactcaccaaaaagaaaacgaaagacagctaagcttgcagggtccgttggtcgattcagcagggtcaccagcctccgccaactggacaaatctgtccactcaaaacccaagagtttccctattcggctgtcctgcctgggccctgagatcagttcagccttgtctttctgtactttatctgcaatcaataaatggagaaaatatgtgtgcgggggtgggctccacctcaaatcaaagaaatcactgcaccaacagctcagagcttccgcccacccgggtcggctcaatgaggttgcctcaatgatctgactataggaaacatccctgcagtgcagccccctctccacgatcccctaatgtcccagaacccctcagactacagtcccctaaccgcagtgttcccgaatgtcatcatcattcagaagccgcaggctgcaaatgtctcacagcacgcccccttccccacagaggaccccccccccgcctcaccgggagacactgggcgtcctcccgcccccgcccctctgagaccagcgctcctaggaactctccgccggagggcggggtcctaagcctacctgagctgggcgaggtccgcgcggacccggcagacaccgccattgctctgcggaggaggcaggtgggtcacagctgccgcgtctgaacggaggccgccaggagaatttgcttccctaggctccgcctcccgacgcgtcagcggctgtgcggccggccgcaaagcgccagcactgtcgtaaatactacccacgaccggcggcgccggattccttgcttggcggcagggggcggaacaaggagccttggagcggggcaaaggtaccccttagtgccgttgatctccaggggcattgttagactcgcctgttatgccttccgagggggcctctgctttttaaacactgaaaagagtctgagttccccaacttccttgggtcctccccgaccccattagtcctctccgtccctgcgtccctgcggtgctctctggtgtgagggatcgggcgcaaagggcaaactttttgtcagagtgacgccgagttgaggacgcgcctggaaatgttgcctgggttttgagccattgcacgaccccttcactttcttttccaggacctgcaaagaaccgaggtttcaaagcagtaggggccgggcactgctctcgcttgtaatcccaacagtttggaaggccaatgcgggaggatcgataaagaaaaaaaaaaaaggcaacaacaaaaaaagaaaaaacactaaaaaaaaagttagctgtgtgtcgtggcgcgctcctgtggtttcagctactcgggaggctgaggtgggaggttcgcttgagcccagtagttcgaggctgcagggagctgtgatcgcaccactgcactccagcctgggggacacagtgagaccccgtctcaaaaaaaaaaaaaaaaaaaaacaagccgggtgcggcagcaagcctgtaatcccagcactttgagaggccaaggcgggcggatcacttgaagtcaggagttaaagaccagcctggccaacatggtgaaaccccgtctgtactaaaaatacaaaaataatccgggca

SEQ ID NO: 37555 - DNA, 1721 bp, Homo sapiens
ttgagaccagcctgggcaacatggtgagaactcgtctctatttaaaaaaaaaaaaaaaaaaaaaaaggctgccctttctagatcaggaggtccagcctctggaaacctcggagggctgcttgatctttcttttctaattcctgacaagttagaagacctttggcttctgagaaccctattactttaagtttaagctcttgtttgggaagccactgggaggacagtgaagaatgcccgcctacctggggaaacctgagttaggtgtggctggagcgactcgagatgcgaggtgggcgggggcaggctgaaagttggagcaagcaggaagtgaactgagggccaccctgggaggaagccgactaggcgaattcacttactgaccggcctgggctgctctgagacatggtgagccaactgggaactaggaaagggctggtttaaagaggagccagagggggcttgggactgggggttggctgtgtcgggggaggagagttggtggcaaagttagagggctgggccagtgctgctatggcctctcttctttgacaacttggctgcaaatagctctgagctgtcctggcaggtgtttctactccttctccctccctcccctgacctctgtgctggtggggagctgggcttccgtgccagcgccgatgggggctccgaattccaggcaaagagttgttgtgccttcctcctccagggagcccgaggcgggtgttgtgacaccacaccaggcagcgcctgggcagttcccagttcagattccagcccagcggcagaagctctcctctccggcctttcactttatccccacacagaaacacaaaggatttgtgtgtccactgagtcctttgggtgtcctttctccattaacatggagaagagaactaaaggtttataagagaaccagaagttggttctctgtgataatgtagttctgacccatgccactggcctatttttggaggtcaagcggggaggagctaaatactatttttctctccttgttcaaaaaccttgtcatgaagcctccgagatgagacatcagccagggaggactagtcctccatttcccccaacacccaggcgggtatttttatttaatatctgcataagcaggcggttgcttggtgcctgcacgtgtcgcccagtggtggggaaagcagaagtgtgtggctcaacggctccaggcgccttctgggatacttggttgcctgttgttctgggtcacagcaatggcattgcggccagggccgtgctccggcagctggcttagagggacagatgggtggggctgggtgagggtgttctgctggccagcacagacactttcaaccagggtcccaagaaatcaggaaaggggggtggctctgggaattgtaaatagtggcgggctctgctctggaagggaacattgtgagatgctggccctgctgtattctacggccctctctagggagcaaggaagcagtggggagggatttagtgatgtgctgcttttccttgtcaggggccctaataaccccaaaagaagtttgatctagtctgttcagcatcacatctcaccttctggggcttacaaatgcatttatttttgattacagaagtaatacatgaaaacattctctttgtaaacatttcaagcattttacaaaaagcttaagtctgcctgaggccttaccctccccagatctctgagcccaagtctccag

SEQ ID NO: 37556 - DNA, 2671 bp, Homo sapiens
agaactgcttgaggccaggagttcgagaccagcctggtcaacatagtgagaccctgtctctctcaaaaaaaaaaaacaaacaaacaaaaaaaaaaaaacgagggaccttattttaagatgtccgaggcagcttggagtagtggagaacaggtagctggtggtttctctgtagcagtgagaggacaggatgggtagattcggctcaggaaggctctgaagtggtagtagatacaccagcctcccccatcctctgactgaggagcaagtgcatggcgggtgcatgacagcacagagctgcacttgccctcatggtgaggaaagacatacagaaaggctagagctagtactttgcccatgtggggctgctttctttttgaatagaggtgaaagtcacacaatgtacagtttgttattttaaagtgtacagatcagtgacatgtattcagaatgttgtgcaaccaccacttgtctttagtttcaaaactttttgggtgcctgtttttggttctgggtgagatgcactcaccagggtgataaagaccctgcctggcttgttcatggcgtctccaggacctagtatggtgcctgaccgtggcactcatagggtgtttgttgagtgaatgaatgatgccttttcagctgaactcgagctagaagactccagggctcactccactgtgcccattccacagatccggccccgaggtgtgcccgttcaccaggcagaggtgtcatccgaattcaggctcctggggcccgggagggtccgactctacggacccaggtcgctgtggcccatcgctttcgatttgacttggtttctgtcgccactcgcggaaggcgcgccccccgccctcgctcggcggcccgccccgccccgcccctgctcttcctccggggccgctggcactgcggccgctccgcaggcagagaagccgggagcgggcgaggcggcggcggcagcagcgatggtgagggcccaggcggggccggccagccctgcgacgggcagagggcgagtggcgagggtgggagagaggagtccaaagtccgcgggctggggcctcccctggggcccacgagggccagacctgaggcggtgaccactgctggagcaggacggggcggaccctccactccctgcgcgccgcatgggagagaaatgcgtgagccccgtcctggctgcaccgcgcagagcgagcgggactcgggctccccattctcctgaagcaaagcggttaagagcaccgactttggagtcggactccgggctgggatcccagctctgtgacccgggacaagtcacttaacctccctgagcctccttttccgcgtctgtgaagtggggtcagtaatacctgccttgttgggtccttgcgaggttaaaggagccacagtggcagagacccgcctggcactcagaacccactgctaagaagtggtaggaaatgtaacgacctcgtcagccctttccgcagctgtgaggagccaagcctggctcaggagttggaaacttgagcagatggggtggcagaggccattccagccccatggcagggtgttggagggcgaactcctcccctagagaaagagaaagggagatgtttactctgaaagttccactgaagttatcagtgtatggcacaggcctgactccctgctaacctctacctagtgacacattcctgagttgagtcatccccactcctgctgcagatcctggcctttgtcctcacttgccatctccaaggcaaagatgtcaggaacagctggtgccagtttctccctttccctagggctcctgggaaaatggactgggcaggaagtaggcttggtgctttaagattttgccttggagaaactgacagaggtgtgatggatgtggcctggctaggggtcaatgcctggatggccttatctccagggaacttggaggcaggaagaggaagtggggcaggaaggtagcactgagctctgaggccaggccaggaagctgaggaaggctctgagaatagggcagagcccagagcccacttaagggtgtgcagggcaaggggtcaggcaggggtaggggtgggcttcagccggcccttagctctttgggagaagctcctgaagtgaaggctgaaggcaggatattttattgggggaggaggatactgggaaacctggggattctcacgggtacatttgaggcagtctgtggaggagaggctggggaggtcgctcctccacccatccatctcctagcctcttcctgtttcttctttcactcttgcccctttagcgctttccttccttccacccatcccctttccctccctggtccttcttcctttcacttttcttttcttctctatgactcattcaaccaacaaggatttcttggaaatgtccttcatgccagcatggtgacaagtataggggacagagcaggaacaaagcagtgatgggaaagatggaaatggaatgaataattacttgaattcattaatcttgtagatgatcctctctccaaagaatgtgtgtgttgagccacaggcctccctcatatgcacacaaattaggttggtagcatcaaccagattctttagccaatcagctaaagtgtctgacctccttgtacctgcatctaatttagcacacgggttacaaatgtggtgcctggagt

SEQ ID NO: 37557 - DNA, 2214 bp, Homo sapiens
gcctgagttgtgtggagcttcaccccttacagagcgtgttagttttactgagcgcattagcgtcttcctctcttgggaaagatggaggaaagcacttggccctgcagctggtctgcaacaccacttacagactgcaaatttgggcaagccacttctgaggtaaaaagggcataatgacgcttagctcctgggtctattgaggggatgatcgagcgtgtaaaacatacatcagactaacagttctagatgctaaatagtacctatcatccaaatcattgagtgcagtggttcttaaacctgcttcacctgcataatttatacaagtgccattgcccaggccccaccacagatcagttaaatcagaatcttcgaaggtatcagacacgggtgtttctaaagctcctccgcgcccattctctcctctgggaattcatgtgtagccaggaatgaaaaggtcttagtacaagccagcagttttacagaagctagggatagcaacgggctgaaggtaacagtcccatgagctggttgaggccccaggttctccggcaaagagatctctctcagttggggaggcttgccccaccctttattattatgcctaacacataagaaatgcgcaggaatcaaacgcaaactggtgaaccaactagagggccgcgggggcagaagtgtccggcggggatccggacagcgcatccggaagcgccatgggccaacgctcgcaggaacctgaacccctgggccagcgccgcctttgctcgcagaggcctctagcatctgtactgtcgaagccctctgagcttcagggcagactgaagagccttacacaccagacacttggacgcgatcgcgccagaaatccccgggaattcagtcttggctccgactccaaaacaaatgattcctcaccagccagatctccatcattggcgttagtctctggtcacctgacttgttcaagccaatgagagggggccgaattagtacttccgctttccgtgctgtttaacgagccactatgcccgtccctcggatactctgattggccagcctctctcagctcgtcagtttattggccagcgccgctaggccgctatcgagcagggtccgagggctgtgtcagaaggctgggcagccatggcgtcctatttcgatgaacacgactgcgagccgtcggaccctgagcaggagacgcgaaccaacatgctgctggagctcgcaaggtgggtgcgcggggcttggggatagggtccaaccagcaggtttctgggctggggctggctggagaaggcggattaccaggggcagcggattctggggaggacagatgagtaatctggagtgttagtacgggcggcgagactgaggggtgtggggatgagcatctcgataatttgggccgtccgttgggccggcctggggcaaggggattgcgggaaagattggagctggagagtggtgggcgtgggggcggaaggacagcaggctctgggaggtctcagagaaggtgaggcatgggggcggggttggggccgtgtgctgtgagtgggtatattcatcagtaacagcaggcactgctgttactggacctggaatctggcttggtcttggaatctgggctctaccaggttattcagcgtagcctgagtaacttctctgaatctgttgcctcatgtgtaaaatgggaataaacactttacgtgctggggcggtctgatagcagttgtaaactatttcccatcgtgctttttatctagtgagcatctactaactactaagggtagctattattcctactagctgggcagcgtgtttattaatgtccagtggattatggggacaaagaaaaagcatagttttcctttgttctgactttacatccccttccccaggtcacttttcaataggatggactttgaagacttggggttggtagtagattgggaccaccacctgcctccaccagctgccaagactgtggttgagaacctccccaggacagtcatcagaggctctcaggctggtgaggacactgattctttctgctatttgggccagacccaccccttccccaagccagactgtggtctggtccttcagttttccaggtcaggtgggggcaagtgtccttcaggagtgggagcttgggaggcagagcctgtagcagctctcctgatcagcactccttcctaaagagctcaagtgccccgt

SEQ ID NO: 37558 - DNA, 2114 bp, Homo sapiens
accttgatttctggccccattcagcctcattattgttgctggggactcaagttgaggtccctaaggcttgatgccacaccagcacctgcagcatgcccccagctacaggccctctggaaattgccctggctagaagtatatttgtcagggccaccctgctggacagcagtggtgccagcttgtcccaaggggctgtgtgcccaggcaccaagtcaggcttttgagacacccagagtgaccctgggtaccaccgtggctatgacaggacaagagactttgtgtgcgtcatcaagctcctgttgccccccgggcacccccctttactcacacagtccatatgccagtgatggagaacgctgacaggctgacaggcaggaggatccaggcggtcatgagggaggggagccagggtggtggtggtgttggggggaggacaagaggtagatggggaagtgggggcggaccagctaccttgagatgtttctgccacaaccatcagctgtcctggcctggtggagagagatcaaagtccaggagtgggtaactggccgggaagggggaggggaagggggtcaacaccttatccagcgctcccgttgggtctctgagcgtccaaagtttgggctgagcccacggcagaacgtgaacaccctctggcactgggggcctccgcggtcaacccaaatgccaccggcgtgctgagagacgcaggcggaccgtaacatctggaagggagttaccctccttctgagggaccagggctgggagaagggctggacaaccgaagaggccacgccaaggagaggctgggtgccggcccagtggagcggtggcgagtcggcggcgcgcaggcaaccacctgaccatcggcgccctgggcgaggggcgggttcacgcggaaagcccagcccggcccggcccccgctcgcctgggcgcggggaccccggctggggccggaccctgcggccggcgaccccccaggacccgggacgcgagagtccccaggtgattcctggaagcccggaggaagggaaggagcccagtacgcacctccccggagcgccccgccgccgccgcaccctgctcggccccctcgtggcgccgactctagctgcggccctcggagcagccctgaaaggtttaaagggccgagcggccccgcccctggaggccccaggcctcgccgcgccgcccgccgggacgtggagtccgcgcagccccggcctcggtgcccgcgccctgcccgagactacaactcccgagcccccgcgcccgcgtcacgggggaaacgtgggcggtgtcccaacttcggaggacctgggcgcggagggctgtggcgtgaagaccgctctaaaaccgagatgactagaggttccgtttaaccgattcctgccggggaagcgtcagcaggtggggatctcggggcagcctgcattccagctctacctgggattgtcgccgtgcacatggctggaggagcgtctctccgccactgcgcacattttgcagcctgcaccggccaacggtgagtcctctaggaagctctctcaacgtggcgccccatgcctgcctctggccagggctgcggtgggtccagagaagcagacacaaagacttggctgtttcttaagaaatccaagcgcctgggatttggcttatggttcctgtggctcagcaaactccggaggagggctgctttcattagatactttttgctttcctgcatacaagtacacaatgtactagccagaaatcagtgtccaagacgtgtttcccgactgatcaacacttatttgaaataagacggcagagaccagaggacatccattctaaatagacacatgtaggtgtcagtgtagagtaggtaaggattaacatggccagtgttggtaagcaaagaggggaaggtgagagacccggaggaatctgggaaaaggaaacaggatagtgtgggaaaaattactgaccagcttcaccaaaaacttacaggctatgagtgcattcctggatgtttcttttttttttactttttctttttcttttttttttttttgagacggagtctcgctctgtcgcccaggctggagtgcagtggcgcgatctcggctcactg

SEQ ID NO: 37559 - DNA, 1485 bp, Homo sapiens
ctacaagaaataccaaaattaaccggtgtggtggcacacgcctgtggtcccaggtactcgggaggctaaggctgcagtaagcccagatcgcaccattgcactccagcctgggcgacagagacctagtctcaaaaataaaataaaaacattttaaaaaaagtaataatgcttaacaaaaattgaccgtcatatattaaccagtgtgatctctaggtagcagagaagctggggaaaggccatttactgggttcattccgcaattatgtgctggtcgctcatcgctgtgccagactttctctttgctaggtagcggagcaccttactaaaatacagcacggtggggcaaaccggcagataaacttcttgctggctccccgatactctgacagcgatgcttaactgggggcttatgagtcgtcccagttcttggtgagaatcattcagcggagatttgggagcgctgaggtggaggttccggaaagagacgagatgagctgaaccttaggagtaagaagtggtttttccctatagagaaggggagtgcgttgcaggaagagcgcgcgggctggaggcaggcggggcgggcggcctcacctcggtgtcgcggcaggtacacctgcaggtctggcttgcggggccgcgtcggcgcgggcgtgtgccgcctcctcaccttctccttggccgcctgcttcaccttcttgtcatagtcgtccctgcggggagccgagcgggagtcagggactgtcgggccgggccaggccaggccaggagtggtggcggcggcggcgcagggcggggcggtaccgagcgatctggttccgtcggatatggtgcacgaagccgtggttcatgtccagccgccccccaggcttgcagcagtgccccggccggggatgcggccccgcctccatcaggagccggggacgcagagtcgccgccgcctcgacggccccaacaacagccacccgcccacagagctccgcgccgccccttgctcagcttccggccccgcatcctgacttccggtctgggaggccccggcctggccaagcgatgcagcgcacggagttttcgggtctggtcgggtcgggtggagtagggtatgcttgacttccaccccccggacggagggcttttgtttttgtttttttttgtttgttttttcgtaacatatcaataggaaacaaggacttcggcttacagctgataccagaaccttcagaaaaatgcaaatcatctataacacaactcgatgcttacggcggtgccttcccatcttttttctggtaataggatgctgtgcaatccatcgccatctgcgtgactttggctgactgtgtaacgctgccacttctcagtttcctcattagtaaatgggaacacctagagcacctacctcaaatggattgtgaggccttgaagtgctcaggcagggcaacagcggcgcccaggccgcaggcgccgcgaaggctctcctggcccggc

SEQ ID NO: 37560 - DNA, 1050 bp, Homo sapiens
aggtgatccacccgcctcggcctcccaaagtgctgggattacaggcgtaagccaccgcgcccggcctgacagcttttatccagaaaactgtcgccagtaaaggttcccgtctcagtaaactgtaaacgacagtaggcccacagaaggttctaaggggagaggaagccagtgcaggaacagcaccgcccacaaattttctgcagcgtgatttgtccccagtggcgactcgtagagagttcggggctcgctaccagcccctctcctgattggccttgtgccgcgcgctcgagcgtgcttggcgcctgcgctggacgactcggccggtagtggagatgtccggccggtctaagcgggagtctcgcggttccactcgcgggaagcgagagtctgagtcgcggggcagctccggtcgcgtcaagcgggagcgagatcgggagcgggagcctgaggcggcgagctcccggggcagccctgtgcgcgtgaagcgggagttcgagccggcgagcgcgcgcgaggccccggcttctgttgtcccgtttgtgcgggtgaagcgggagcgcgaggtcgatgaggactcggagcctgagcgggaggtgcgaggtgcgcggggccgggccgggctaggcgcgagagcctgtttttttcgcgtccttttttcttgtctctaatcttccgctaggtcactgcgccggagttgggggaggggtggggttggggtggagaagaggagggatccagactcgacgattctgctgttcgacttgttctgatgaagacagtacccttctcaataatcgtatagtatttcttttttctttttttttttttttttgagatggagtctcattctgtcacccaggatggagtgcagtggcgcgatctcggctcactgcaacctctgcctccccggttcaaacgattctcctacctccgcctcccaggtagctgggattacaggcgcccaccaccgctcccgccaccacgcccggctaattttttgtgtttttagtagagaagggggtttcatcgtgttagccaggatggtctcga

SEQ ID NO: 37561 - DNA, 643 bp, Homo sapiens
gctttcctcaggacaggatctcgctttaagaagggaatttcctgtccgggtgcagtggcttatgcctgtaatcccagcactttgggaggccaaggcgggcagatcacttcaggtcaggggttcgagaccagcctgaccaatatggtgaaaccttgtctctactaaaaatacaaaaattagccgggcctggtagcacatgcctgtaatcccagctactcaagaggctgaggcaggagaatcgcctgaacccggaggcagaggttgcagtgagccaagattgtgccattgcactccagcctgggcaacaagagcaaaactccatctcaaaaaaaaaaaaaaaaaaaaaaaaaagggaatttcctgtcattgactgagtattggcaagggccctaggaccttcaagtccagccctctccttttgccaatgggtttgtcctgagtgagtcacaccttgaggagtgtgggggcagtaaagggatcaggaccctggagagaaggctagtccctttcctggcttgaactggccctagcattactcatctcctggtagataaccaggcctctgaaggcttgcctggtgctcactcagcccgtgaagagggcctgctggtcctctggagcccacagccctttgtccagaggc

SEQ ID NO: 37562 - DNA, 2061 bp, Homo sapiens
ttataggtgcccaccaccacacctgactaatttttgcatttttagtagaagtggggtttcaccatgttggccaggctggtctcgaactcttgacctcaagtgatcatctggcctcggcttcccaaagtgctgggattacaggtgtaactcaccacgctgggtccacttatttgtaatttgatcattgtcttctctcccactagaaagtaagttccatgagggcaggccccatgttcatgtttactcatcttcctgttctcagtgcctggcggagtacctggcacagagtagcattcacttggtgtttgctgaatcaatgaacatgaccgagggctgcagtctgaggtctggaggctttgcagactggttgggggcaccatcctaaaggctatcagagcaactgctgagagagactccaaccaggctggagctccacttgtagcagagtcccagtgttctggctgggcagggagtagggcagttctgaaaattgacagggaggtctgccccagcccagcccccaggggctcttgtccaagtcccagtgacaggatgtctgcaagtaaatgctgaaggagatgcttcagctaaaagctccaggacatgtaggttcaaatggcctaacaaactgggaaaccagagtggaggggagacattctcatttcaggatagaccctggctgccttggggcctccagggtgctaggggacacagcccagctctgcatccctggcagagatggccacatccagcaggccctggtggcactgcagagagaacagcaccctggggaccaattatcctgggaaacaggctggtgcctatccagatggtggtgccaggcactgccactgtacaactggctgatttggtgaataagttgcagacataattgaagggcaatttgttggggatgtaaagtactgcaatggcccacagggtaagagacagtaaaataagggtaaatgtcaccactcagaatttacacacaggttggtatgcctcaggaaacttaggttaataatgaaaaagaaaaaaacacaacaatacgaaacactggagaaatactggcaggatgtgtatcaccttgttgataatggtatttcttggtataattacatgtggtcattactcattgtctttgtactttgaaaaaaaaattaagccaaaggaaaaaaaaaaaccttcctttcccagtcaaatatactagcaaacaagaagctgttagaaaacaattctcgctggtgtagattttgtcctgttttggttgtgaggatgaggggctggtgtggatcaacagtcctgagggggaagcaggaatcccagaagacggagggtcaggctggggaatgcagttctggaagctgagagcagagtgcccagtcctttcacatcaggtatgagtcaaacgccaggacaggggtgtggtaaaggtcaggcaccaggacatccagggacagaagccagcagacaagtgaggctgcaggggaggccagggtcatgtgggtcattctgggatggaagctgataggtgggagagtggagaaagcaggcaggtagggctcgcagccaggtgagggttcagagtgggcgtatatgagcctcagttctaagacctctggatccaagctgtcatcaaccgtgaaagtcagacatagaagttgccagtgactttggagcctcccaaaggaagggacccaagtaggggaggtcctggggtggcagagttttgagaagttatgtggcagagagcctgtgcatgagggagaaagggtgatgtaaagggttaacctctgaaaccagaggcatggatgaaggctgagcctctcttgcagcctaggaacttgagaaatgagttatggacagttcaggtgaggtctgctgactccctgggaaactactgacatttcctttgtgtcatactccaaagcctgatacaaatggtggtggccatgtggtcaggagtgttttttttttttttggtagagatgggggtctcgctatattgcccaggctggccttgaactcctggcctcaagtgatcctcctgccttggcctcc

SEQ ID NO: 37563 - DNA, 7389 bp, Homo sapiens
ccgtgccccactagttattgtacttttcaactccagaatttccatttggttctttttaagaataattctatctctgtattaatatttctatttgatgagacattatcatcatatctttctttacttcttcaatcacagttttctttagttatttctgaacatatttataatggttgctaggaaatctttgttaaatctgatatctggttgctttcacaggcagtttctgttcctgttttttttttgtgtgtgtgtgtatggatcactcttttatttctttttatagctcttaagtttctctgggaaactgggctttttagacaatatattgtcacatatctggctaccggtcatccccctgcccctacccaagcttgatactgttatttacttgttttgttgtttggtgactggttggattattttagtgaattcccccacctgccacagtgtgaagcctctgatgttgcaccttaaggagcgttgccttgagtgtacccacagtcatcctgtaatgacagtggttttggcggggctctcttatctatttctttctctgaccacagctatccgttaaactacgctaattcctggctgattgctctgttgttttcaacaatgccttttatggaaaaacaaaccatgtttttcctctgctcttacaccaacacaacaacaatcaacacagaagacttctctgactcctaaatacgtggctgtttctccccaccagcaagcaagcagtcagttccgcagtggacaccagctaggtgtcctccaactcaattctgacgctatttatctggagacagtgtcagatcccacaggttgggggctcagtccccataattgccttggcagatttgggatttgaatccaggcagtcttagctgtgaaccaccacacaaatccacctttctccaaagaatggaggcctgagctcccttgtaacttggggtaaataatctgggcacatatccttgaggaatagcaggaccagaatgctctgcacaggactggaaatggctggggggaggaaaaccaagtccctgacagtgttgaccatttccttcatcctgtgaggcaatgggcttgaccctgcaatgttcccagcacaagtctgaggagtgatgcaatagagagtgggtgagttgagtaaccacttgaaattccactcctctcttcccttttcataacaggtgtcctaactttctgccaagcacactcaggttttccatgttctgcttagaagttaccaactggctgttggttaggcctagcaaattatgtagacttcttttcggctaagaatcatagcaagtttattccctcagggtaggaaggtcatattttttctttaggctccaccttggtcttccctcggaaggggaaataggaattctttcttcctcaggatgagctcgtataaggccaggctcattgatgataagaagcagaaatggactcagcctaaattaagacaagggaagtgacagggcggccatggctgccacaggatggaagggaaggactagaacagagcttaaacagacaggggccaggcagctcagatggttttggaagcagggacggttccacagtcttgcctaggtgccattactgggatgaatgagcttccaccactccttctgtccttgtgtttcttactccatagtcacattcctaggaaagcaagtccaagcttagttctcatgcctgcctttggttgctgtaagatggcgagaggaaagtcaggcagcggcagggcacctggaagacccttttgtcttaggaatgggatggcggatgctgggtttactctccaccaagactgtacaaagtaggtgccagataattctccaaaagaagataggcagaggaataggcagtgccaaattcccagcacagcttgtgctggcaggtgggtactgtcactgtggtacttccaaataggaagagatgtctctgacagaatcaggaactggatggagatttacccgtagaaaaatggtgacctaagtgagatatgctttccccttgctcaggccgaaaaccctggggttcttgcaacagacttccagcacgccccccgtgggtgcctcttgccctctcctgccactcatgggagcaggactggtagtatgaggacactaacaggggaagtgactgccgtcatcttgatttcctgtgtctgagcctcttattctgtggttagatggacacaaggtcccacagtggggccccattgcccccctctcacccccctttttagccatgttgagtgggtctctgtttcttgcttcaaatggagcctcttgcttctccagccccagatagagagcctgcacgcatgactttgtgcgtctttgtaagccccaccaggccctgggtcggggagatctgagtgtgaaggggcagagcccgagaacctgcccagctccttgcctggcttgggacctcaataagctctgtccaccctccaccccagggatgacattccaagtcctgggggacctgagacccacccaccaggagcaggtgtcctgcggcctggaccaggtttgggcagatttgcttgaattcactgtgggtatttcaaaagtgtgcttagggatggggcatttcttttctttttttaaagttgtggattatttctcacattttgtatgaggatcctaattccgaagttgttttctttctccaacatgcttgggtcgtctcataaggaacccgccttaaaggcaacgacacatatgctgccacctagtggaggaaaatgatcagcttctacaactgcgtaaagtcacgaatcacttaaccacagaaatacagatacggtctgagaaacgcgtctttaggtgatttcatcgttgtgcaaacatcatagagtgtactcacacaagcctagatagtatcacacaaacctagatggtatagtctacttcacacctaggctatatggtatagcctatttcactgaggctacaaccccctacagggtgttactgtactgataccctaggcaattgtaacatgctagtaagtatttgtgtctaaacatatctaaacatagaaaaggtacagtaaaaatatggtatcataatcttatgaaaccactgtcatatatgtagtccatctttgactgaaacgtcattgtgtggcacataactatgtggaaagagaaattgtatggaaagcttcagcgcttccaacctctttcttgtttccctcacatcaactgatatatgggtcaactttttattaaaacaattgggtactcatagaaaatttcactttatttcctaaacaatagctcataaaaatgtgtaccatttatttagggtttcctatgtgctaaacactttacgtacgttccctcaatcctcactgcactcctatgagctacacattgttattattcctattttgcagataaggaaggtgagactcagaaagattaaataacttccaacttccagagtttacacacttaaccaagtctgtcttgcttcacctttaaccttaacaacatttattgactaaaattacacaaacataaaaaaggcatccaaaatcctgaaactatctcaagtgcattccacaattaatcaaataagtaaatatgtggcagagagtgagaaccaggtttttcactgttgaaaaagcataacaaatatggaaagggggaaggttagaataccccctatggagctggattagaatcagaggaattggtgtgaatggatggtttatatacgtaggtagatatagaaactgttataggtatatatattaggtagatataaaaacagttatagttatagatataactatatatacatacacatacatatataactataacagtttatctactatatatatgtgttataggtatatatattaggtatatatatcagccattaacttcagtgttcatagatgattctgtggccggcaagaaccatcaatgaacactgaagttaatggctgcaaatgtgatgagaaacaaaatatttatatagtctcaaagcctcttcacaagagacttattaattgcaaagggaacaatagcataataactgtgcagtggaccagtctggtaggtaccaccttttccaagtgatcaaagttaagatcaccaggaacaagatgtaccagcatcctgtgcctcctgctgtgatgtactgagaaggactcactgtcccttctgtggtgttcttgccaaaaatgcgtaactacaatctaataatgagtaaacactatacacacccaaagtgaggaacattctacaaaataattggccaccactcttcaaaagtggcaccatcatgaaagacaaagactgaggaagctgtcccagattgaatgagacaactcagtgcaatgcaggatcctggaacagaaaaagaacatttgtgggacagttgacaaagtttgaataaagtctggagatcagttcacagtattgtatcagtgttcctatcctggttgtgagaattaggataattatacggtgcagtggtgcagctttttttggaaagctgggtgaagggtatatagtattctttgtaccacttttgcagtgttttcaaagtctaatattatttcaaagctaaaaactaaaacaagcttacaataaaaaatatgtaagtaaaaatcctttaaaaagacatgacaaagtgtgtcagatattagattatcaaaagctaggaactctctggggccagagctcaaattctcttgttttcagtctctttatcaaatgaaaacttctgtctgccttctacctttagcatgacacagaagtagaaagaagggaagtgtttgggcaaatgttgagcaacacacacacagcaaatgctcatttgatgttttggctgaatcgtagaacacagtagactgtctaaaccctctgttcctgttctggaatgttctgatcatagctgctggcttatgtctatcttatagcgatccccaaagctgcacccggcgtggtcctgaggatcacaggacttagcatttcctgcttccacaatgctggcccttaagggatatacttagggatccagaggaagcagattgtatctgttgagtgcttgaaataataatagtgatgatgattgatgataatgatgatgatgatgatgatatctaagctatcacatgccaggcactgttccaaatgcttcaatgcttaaaccatccctgggaggaagggtctgttactgcacacatttacagagtgagtgcatcgcttaggctctctcgcttctctacatggcccgtaagtagcggagctgggctctgaccccacgcagactgcctctggagcccaccttctgatgaatgagaatgcacatggggcagtgggctgagtcatgggacacatgcaaggtgagttggggattagcctcaaccccttttggctttgatagaaatccttctcagagactctcggaacagagtggtggtaaagcaccacctggggcctgtgggaggccattttggacccagttctcagtttccagggctgtagatgtccctggatggggccagcgcctggggtccccccaccaccccacaccataccaactcttgttattagccatttatctagccacttagcactttctcttggaagtgccacgctttgggacacttggaggttctgacacgggagttcctgatagtctgcttctgggtagagataatcctgatgactgaggtgcctgaaacccctcctgctgctgagctgagccccgaggtaggacaaacacccctctgggcaagtacagaatggaaactgaaatagaaataaactccaacaaaagcaaacttcctggggttttcctcctgcctcctcacacacacacctctgaaaggtgtgtgtctcagaagcaatggcctggaccaggagtcctgaccttgctgtgtgactttgagcaaggccgggccctctttaggcttcggtgaactcagctgtgagtgaggggtaggatttgatgatttccagcgtctctgcttccagtgccttcacgttatggcacccagggcttgtgacaagagcagaaggaagccaggcccattcctggtggacttgaaggtgttagctctttgttccctggaagagtgtggccacggcattagggagggcttgccactgctctgtccacacacaattagggcttaggtgactcagaagcgaacacaccatgtgttaaaataagagttggtgtttctgagaagggaagtccaggagctgaccaggatgggattagctgttgataaggggcccagcattgttctagctctcccctgaggcccacaccacatcctagaagagaagccaggtccctcggccctaccagggctgggacagtcggggcacagctgcaggagacgccctgggaggctgtctgggctgcggcaggaggaggcagggcagggcagtgcagtggttgggaggtggccactctgcctctgttgagttttctggctttgtcacttgacgttgattctcccccagggccagagtggggtcaagtggggaccatggaggaggacatgagatcctaacaggcgacctcaaactgctgtacaagcccagcaaccctgaccgctccccaacccacaaccagcaaaggtcaaggccagtgccaaggagtgcggggagggcggcgtgggggactctccagtttagactcttcagtctcgaaaaacaaaggctgacaggaatgtgaggaaaccactgtttactctgttttcaagggtgttccactgaagtgtgtcccgagatgtttccagaaggaggatgacgggggtggtgctgaagaggctctgccatgggaaccggagccggagatgccggccagaactctgggttctctggaagtggtgggaggaaacccgcaggagggaagaggccatctctcctttaactcctaggggaacagaccgcaggggctgagggtgctagccctttctgaagctgagagggagccggaaaggaagggactcaggggatctcatgggagccagaagggcccagacttaggatccgaaattgtgcctatgagagtggtgagcattggagactctcccaggggttggttggtggcaggcgacatgaatctgtgaatgctggcttagctttagagggactgagggtgaggatgtcacagagcccaagggcaggattcagagcccagcctccaggaggacaagaatggggacattccttggggacaaagttgggctgtcagtcactgtctcagaccttctctccggcctgtctggttgcccgtctccgctgtgcgcctgcagaccctgcctgatcattgctgctcatggtttcaaaatgtgtttcctcagatggtggccccaggc

SEQ ID NO: 37564 - DNA, 2550 bp, Homo sapiens
tctggatatagagctcatgcagccagctaaccagagaccctgtgcctcagccccaggccctgagccttgtgatcttctggatatagagctcatgcagccagctaaccagagaccctgtgcctcagccccaggccctgagccttgtgatcttctggatatagagctcatgcagccagctaaccagagaccctgtgtctcagccccagatcctagaaagagaatgtgattgttccagactggccggggattcgccccctagtttagcgggcttggccgcgcggtaggcccacaggaacaacgcaggggccctccacttcccctccagctgtgggcaagggcagttcttgcgtcccaaagagggaacctaaagaaaaaagggaaatatgggaggcaggagactgggtggaaccagaagtggaggatggggccacggagacctcctgaagctgggctcgcagggagttcaggggagagccggaaggagtggggtcggattagggacaacacaaggacccacacccacgagctgtacagttcattcctagataacgacgactggtttgggcttttataaactaaaatttcccctgaagataatctataacccaactgccactgatacagtgaaaaagtctggcttctctaggaagccatttagctcaaggtaacctcaagaagagaaacagagaggtttaggagtgacaaagttttcatggccaagatggaaatgtcctgcctagaaagaggccataaggaaaaagtctagaagtgtatatgtgtgtgaacctggaccccaccgcaccccagtgaaatcagaatctcgggggggtgggactggccaggtgattcccatatgcacccaggatttcaaatcactggcctaggaacagctgacaggtcattccccttttctccatgacaggagctcagatgtttggagattgccaatagaagtcaatgtggcagagcttgctctgtttcctgggccgtgggctctgggaactggcatctcagagcctcatggcccgagaagctgtgtagctacccctgttcctattggtgaagccacccagcacccttagtagagcagctctgtcctatccccactgggtgttcaggcagtaaagatggggggttgtgctcaaagagccacaaccatcctggttttctggaactatcccagtttcagtactgaatgtcctgtgtcccaggaaaccctacagtctgtgtaaactggggcattggtcacacagtggcactcagctgagggtcaggagagcccagctgacgtctttcagccctgacacaggccccacacccacgttccacagcggctcctggcctgggagctccaagcctggcatcattctcggcgctgggctctcccttgtcctggagaatgttgacttttctcacacccacacatacacatgcacaagcaagaaggaaaaaaaatgcaggcattgttcagacttatagcaggttatattctaggaaaaggtggtgtaagtcaaaaagataaaaattgaatccattttcccacagaaacaataccttgatgagaaatcctgagccagggaaagaagtctataaaaagttctgtcctggtcacaaaaaatttccctaaacccctctaaatatctctgttaggttaatactaggcaaaatggtctcctagagaaatcagccccctaacataattaactgtaaattaaaacctctaccctctgcagtgtgagtgctctcaaatgcatatacctcaaaggaaaagagcaaatcagtactcagccatgggcagtgttattttatttgttgaaacgattccacatgtgaagggccactcaagctagagtggtggttctcaaccttggctgggccttggagtcacgggagctgttgcacctgctggtacttggtcccgaccctggacaagctgatgaactgcagtgtggcttggacacagggagttttcgaagctccacaagtgatcccagtgtgctgccagggcagggcaccactgggacagaggaggctacaaggcctggaagaagcacctggaggagctgatgtgtggtggctatacctggggctgagagccaacgagatctgctgggaaggtgggggcgtggaggaaaagctgcctgagctctggggtccaggcctagggtcttgagtgctggaacattgagacacatgctaactgaaaatgaacccttagcagtcatccaagtcaatcctgtcattttgcagatggggaaatagatctagagaggtgaagggatatgcccaagtcccccagtgtttagaaggaaaattaaacataggtaggctgagtgcggtggctcacccctgtaagcctagcactttgggaggccgaggcaggcggatcccttgagccctggagttcaagaccagcctggccaacgtggtgaaaccctgtctctacaaaaaaaatacaaaaattagctgggcgtggtggcatgtgcctgtagtcctagctactcaagaggctgaggtgggaggatcacttgagccggggaggtcgagact

SEQ ID NO: 37565 - DNA, 1185 bp, Homo sapiens
tccctgaacccttctcccgggccaagattggactgtttgaggaagatggaaaaagtgctctgtgagcaggattatgaaatgacagggaggacgtgaggggctttcgaaaccctgggaaggaagatgcccacgtgaatggaaagtagaaagaagaaagtcaaaagcacctgtaatacattcactcattcagcagatacttaggagcagtccccaggtcctgggaatagaagggtggacgagagggtcacccagattctcctcattataataatagcaatagctacccctctgggtccttgtatgtgccaggtctttactatgtgttaagcaattttcatttattatctcccttgatctgtacaaaacccatgagggaggattcatattaaaatctctgttttacagatgagaaaactgaggcttggaatggtgaaggaggtcactgaaagtcacactgtgagttaaactgcaaagctgtgaatggaaaaccccctaaggccctgctcttagctcctcttggttccctgttgcaaagaggcattccccaggcagctgtgaggtggaaatctctgtcttcaggcttgcggctgagaagtttcccagagacgagaagctggagcctttggagaccccactcggctgaggtcccgggaccacgagggggcagcagaggtctgctgcgctggcgggaggctctgtccccggctgactgcaggctccgggcagctgtcctgagttaaaacctgaacctcgggtggccgagaatagcaaggggctgtcattcacgtgggcatcttccttcccagggtttcgaaagcccctcacgtcatccctgtcatttcataatcctgctcacagagcactttttccatcttcctcaaacaggtctgatcttggcccgggagaagggttcagggacacaggattcctgtgagcagtgtgttagatgctgggctggtcactggggccacggagattaaaaaaaaaaatcctctataaaacccaggacttgcccccaagggagactggcacctaaataagtaaccgaggtacacgatgcaaagtgcaataatagacggacatctgcgattcggaggcagcacgaagtgggagaaagaggggcggaattagaagccagggatttggcttaaaggtggcccgaggtgtgcagctgcctgcaaatgc

SEQ ID NO: 37566 - DNA, 2498 bp, Homo sapiens
tccagcttgggcaacagaacaagactctgtctctataaacaaaaaataaataacatttttaaaaattaaaaaaatatgtccacaaattctttgacattcctccctacaaaaggtggcagctaattcccctcctcttgaatatgggctggactagtgattcatttctaaggaatagaaagtagcagaatgatactgtatgagttttgagactatgtcctaaaaggcaggatagctttcaccctgctctttcttggaccacttgctgtgagggaggccagccaccatgccatgaggaagctccagcagtcctatgaaaagaccacatgaggaggaactgagatctcagttcctggcaacagccatgtgaaggagccatttggaagtggatttccagccccaggcaagccttctgatgactgtagcactggctgacatcttgactgcaaccccatgagacaccccgcgccagaacccccagctaaaccacttgcaaattcccttcccacagaaactccccacagatgataaatgtttgttgtttggagccaccaaattttggggtaatttgtgcagccagagctcacactgtcactagggtgaggcaaatggcacaacatctaaggagatgctccctttcagggctatgacagttcagggtccacacatgaccctgagacggaatgtcttcttaaattctgttccctaggctcctcgcttgcctcagccccgccccaaccctgtgtctagcagcagatatacctccacggcctttttccctcttctgaacattctccagcttatgttgggaatccacgcagttcatttttttcctctttctcctcttgagacagagtcttgctctgctgcccaagctggagtgttgtggtggaattacggctcagtgtagccttgacctcctgagctcaagggatcctcccacctcagcctcctgagtagctgggactacaggtgtgtgccaccatgctcagctaatttattttattttattttattttattttactttttgtagagacagcatcttgctatgttgcccaggctggttttgaacccccaggctggagcaatcctcctggctcccaaagtgctgggattacaggcatgagccactgcgcccggctttcatgtagttctgaagaaattggcttcggaactgcatggttctggttccaaggtggagcatgtgactacgccagtcagcacattccattaccctttggtcagagtgattggatcagtgtggcatgtggcccagtcctgtccaatcagagtaggtggtgtcaggctttattgctagcaacatggggacaaatatgaacccacttttctgatgttagcaagataagtgaaactgtgcagacttctggcagcctttttgggacctccaaggggagccagttcagggataaaactgatatcaggaaacagggaaactgggtccttggtgacattgttcagctgttagattaacctgaagccagcctcatctctggacttttcagcccagcaaggtaaaaatttcccttttaaaatttaaaccagtgtgagtctggttttctgctacaggcaaaggaaagcacaaatgtgatgttaaacacacggaggagaccccacatcagtcactcccgcagatgctgccaaggatccagctgctccacactgtgccgagtgcatatccagatgttctgtcaaagtgctcttgtttcagccagatgtttagtatcttgtagatggaaggttaacttgatttagtgcttaaatgcaaacatccttccctctctctcacccactccctaggcctggtatctgcccactcatagcccctgccatgtggctgtgccccatccacatcctggggcaggcgctatgtgttgtatcttgtaatagcaccccctcgcttgtcctcatcctctctagccatttgggccagggattgggatccagcccagagggccagtctagaagcaataaccgatgtgtagcttggcatgaagagatgcgctggggcagtcagtctttctttgtctctctgaggtaagagatcttgaagaatgaggcagttacaggtaaagccacaaagcagagataggccctagaagaacgtcaggcaagtggaagtgacgtggaagcagagatgaggagcaggtgatggctacaaggaaagaagagctatcctagagtccggggaaagaatgagaagaggatggagcagattcagagggaagcagactcccggagagaggggatgagccactgagaaggagatagagagcaatcagacagggcaggctaggttctgctgtggaaacaaccccaaatatcaggggctaagcccaacaagagtttcttcttgaccacgcatgacctgtccatcacaggtcagcagggaaggctccgtgcaccatagtcacatgggaacgtaggctgatagaggctgatgcgtgcttccacagttgcagaggcaggtgaaggaagttt

SEQ ID NO: 37567 - DNA, 4529 bp, Homo sapiens
attcaaaatgacaacaaaaaagaaccaagtcactattctgagaactgatcaattaaggaaacacgtttttttaaaaactgtctttggggcctcccagatacacagcgaatttgagggttagttggaaggcaccccatgttctctccaagattcttttactggctttctccaggcctgaatttccaccattagagactcatttctttgggtttacaaagtttcggaatcaaagtcaaaatacccttgggaaaggtttgttgactactgtccttgaagatcgtggtaaagggaaagtggaaagtcctgtggttcctagggtctggatagatagtgctacagccagagaagaggagccaggaaggtcaaaggatttggcaacatcagctcgggcagggattcttcaacctgaatgtgcaggagaatcccatggctggccatctaaagttcagctcctcagtggcccaatcacatgggttctgatccagcaggtagaaagaatggaagaaaggtacattttattacatactccaggtgattaggacacaggcggtcctgccatcgccctctgggggacactggatcttccttcttggactgtgtaccttcctgctccagagcccctgaccatcaagctgagcaccgacagccactgcagactccatcaggccctctctctgggatctcttcggtactgccagctcccttaaaggtgccaggctcttccctgtatggagaagctggcaccatagagaagcgacccagccacacaggtcctggtgccagctctgagctgcctgctctcgtcctgtctcacggcttcccaagctgacggacctgcctggcttctcatgtgactgcccactcactcctggcctgatgcttgacaacacgtctgggactctcctgggccaaggaccctacatctcagcccaggtcccgcatgctctctcagtcctgggatccctgtctcctttcccatgccacctcccagcatccttgttcctgggcaggaggtgctttgcagccctgctcctcagctctgtgacccagccagattggtggccaactgccctcactctggggtcagctaaccacctctctgtcctcctcctcaccctgccacctcacctagtcccttccacctccatggacttcccctggggcctccctccccacatcacaaccctcctttgctgagatgagccccacatcccatgagctcatcctttcttagcaatgctcctcggaccacctcttccccatggactgagccccagctgggggctgaccttcggcatcaaacgcctggcccttgactcacagctcccctgttctgacacccggcctttgcctgaccccatgggcaggcctgggcgccagccttgccccccctggctggcccgtccccctgccgcctgagcctgggttatgacatctttccactgagcagctcttattttgagaaggcaaacacggcggcgcccacaggcatgtgcacacgccagcacacgcacacacataccctgtccatccccggactcctcgcgcactggggttaaaatgtggctggccatgtttatttttcttcctctaatttcccctttggaacaaacaacagtcctgtaaccccgatcaccctcccctttcagatctgtggtctcccaccacccttctcccgggtcctcccctcgcagctgtgaatgagaacagagtaagtcttttagcgggaggcagcagcctgaatgaattgatcacagcctcaaagccagcaggatggggggatggtgagcatgtgtgtttgcttcttaaacgctatttgtacaccctgaagcttctatttttccatgtgacttggagcaaatgccttcccccagccctccatccttttaaaatttatttcatttcatttttggtccaatgcattttgttttctgttttctacaagggagcccgaatcagggcctcagaaaaacaaggccgagctgccaactggaaatgtttgctctgggggcgagttcggaggctggcgtcaggcggggcaagatccgtgccagtggaatgtgatttggggaggaagctgcaggtcactcaatcgctggcagccagcccgggagcaactggatgctttctgggctgtgtgtgtgtgtgtgtgtgtgtgtgtgtgtgtgtgtgtgtgtgtatgtagagttttttccctcatgcaaacagagctctggagacatggagacagaagcattaggaacaaatgagacagggggttggaaaatcaggggatctgggggaataaggtgggctggggcggggagagggtgccaggagcttgagcagccatgttattcagcatgtgctgtgtgttcagctctgagctgggagcctgcaggagcaaggagggctgcaaaccacatcagcccccagtgatctgtgggttctttggagaaacaaggctttcagtatagaacactggcaggtgagcctggaagttcccaagagcggagtgtgttcctctgggctgagtgtgtccagggaaggcttcctgaaggaggtgtggtaggatcagagccctgaagcatgtatggtactgcactgagaggagaggagagacgttcaaggtgcagttattagctgccatctgccaagccctgtgctcagccctttacattgataatctccctttaatcctcacaacaaccctatgagggccagtaatctttctatcctagctttgcaaacaaggaaactgaggcccggtgagatcaaggaactcagccaaactcccagcttgtaggtggtgagccaagggtcaattcgggaccatccttgtccaaagcctgggctctgtccaccaccgctgagggccacttttcacttagccgagttccttgtggaagggcttgttttccctgccccactcaaaagaggattgttgaattcaagatggggaatgttggggacctaagatgccagggtagacttccagggggcagtgtgacaaacgctccgaagccagagagataaactaccttgtttccttgttcccaggaggtagtggctgggccccttggcagtccccccagggttcatatcaggtcagccctctcctgcagcctaccccccttaccaatgacccacgccaccctcacactcccccacacacccccatcacatgtcaagttctttgccaccccaaagtgaaggtccgcccacttccaggagtcctcagaagttatctgtgttgttctgagtcacgcacgaaactcagtgaaccagacagaatggattttccccaggcagccaccacaaccctggagttggaatcaggagacctgagccaactgagtggggggcaattggttaaagtcaacagtctacctcctgtgtgatatcaagtgagccatgtccattcttgagcctcagtttcctcagttttaaaatgaggagtggcctgaatggtttttgagctgtcacagatggaaggagaggctctaaggcagtggaactatctgcaggtgttggaagggtcagtcaggaagactttctcgaggtgttcagcccactgcagaaggattctctggcagaggaagcaggatctgtcacgggctcaaaaggggaaaggaaagaagccaggctggaagggcaggaggagatgatggtgagggaggtagagtcctggccagggtggctagaacaccttgactcaagcttgtctggtagtaatcagacggccagtgatccatctgattagaacaactttgttgaccacttgggagttctattgtcttgagctcagatagttggttagcctcccccatgaactctttttggccaaactgagcactaacgttaggtagacactggcttggggcttacctgggcctgatacatcacctacattggttgaactgaccagtcgattccacgagacaactaattttaccgattatttccaggaaacaggcagtttatagcattaactaaaatcagcagttgttctggctttttggagacagtctttggatctgacatcttcagtcctcagagacattcaggctacctgccactgaccaacagtagtcagattcctgagaaggctgggaaaaaccctaccaacaacgggcgtcaggactcagtctctctcatcaaaaaaaaaaaaaaaaaaaaaaaaaggcaggatcgaactagaccaggagtggcaaacacatggtgtgaatcctgccactccttttctttcatccatggcagacattgctaatcaattatagcactcattcccaaagggacccagatgcagcctcaggatccttttcaacacagagcttcaggcagcctctaccaatcaattagatttggcatgcgtgataaaaagcatttgtcctctggactagatgatctccaagcctccctccagctgtgctgatctagaattgcaactgattaggcatcttgaggactcagcctggggaccaccaggtctacagctgtccctggggcatccaggtctgtggggctgccctcgagctggtgccttatta

SEQ ID NO: 37568 - DNA, 2688 bp, Homo sapiens
aagcgcccccgactagagtaggggcggggagggagcgccggaggaggcaggttctgggccaaggggatgggggtgggggggaggtagggagcccgcggacaaaggaggcggccggcggcccagctgttttgaaaaatgcttcctgtttctttaaaggcgctcgcggctcgggcggcccgggctggggaggcggtggcggcgggagctgcctcctctccgggcggcggcgctgactgatctcgcgaactgggcttctgtgtaaactgaggctaaacaaacacagatggagcgcagcgggcgttctccagaaatgctggcaaggaggcagcgacttcagatgacactctgagcgctccgggaacggacagcccggcggcttcccgaagccggcggcgcagctgcccggggcgagggggagaaagggagagagggagggggagggcgggcgaagcgggagagccagagactcctcggcgctgagcgcggcggcggcccgggcagccccacgcccctgcctcgcgcgccgcccgcgccatgaagcacatcccggtcctcgaggacgggccgtggaagaccgtgtgcgtgaaggagctgaacggccttaagaagctcaagcggaaaggcaaggagccggcgcggcgcgcgaacggctataaaactttccgactggacttggaagcgcccgagccccgcgccgtagccaccaacgggctgcgggacaggacccatcggctgcagccggtcccggtaccggtgccggtgccagtcccagtggcgccggccgttcccccaagagggggcacggacacagccggggagcgcgggggctctcgggcgcccgaggtctccgacgcgcggaaacgctgcttcgccctaggcgcagtggggccaggactccccacgccgccgccgccgccgcctcctgcgccccagagccaggcacctgggggcccagaggcacagcctttccgggagccgggtctgcgtcctcgcatcttgctgtgcgcaccgcccgcgcgccccgcgccgtcagcacccccagcaccgccagcgcccccggagtccactgtgcgccctgcgcccccgacgcgccccggggaaagttcctactcgtcaatttcacacgtaatttacaataaccaccaggattcctccgcgtcgcctaggaaacgaccgggcgaagcgactgccgcctcctccgagatcaaagccctgcagcagacccggaggctcctggcgaacgccagggagcggacgcgggtgcacaccatcagcgcagccttcgaggcgctcaggaagcaggtacccgctcgccgccgcacgccctcactgcgccgggggacgactgcgggaatgggtgggcgagtggccggggcgggatagaggtgtgtttaaggggcaagctgccccgcccggtccgaccctggtgcccagacaggtgtgggcagtcctagggtatggatcatagttttcaaagtggctataagagttggttatctctggcccgagcaccccccgccctcaacccccgcctcgggggtaacgctgtctgcgcttctgacttcagcctccatagttcacttttatggcagcgagtatttgcctgccggagtcccctgggcgcggtgcggagtggagaggggaaatgtgggaatctgtcagcggaggaaggggggagccttctccagttggtggtggcaaggtccggaacgctgcggtgggacagtccgggggagttgtcagcccctcttcaggccccagcggtgatgccccgaacactcaggttgcttccgggctatgcactccttgccctggcatcctcaagaacccgcgctacaagcctgtgccctctccccaggggtgggctcaggaatcggctggtgggagtctttctagcagatcccttcctttcacccgtggtgaagcaggcagctctgccgaggggactgcctaggttggggattccctctggagcatcttcagagcctagttctggggtgggtccgggactttttagtttggggctggtgcgggctgccctcaccagacagtgcccctgcgcaggtagcggaagaatacttaacccaagaattacccgtggtggggcgggacaatcgcttgggcttctaggcttcttattttcttagcgagaaggagctctaggaaggaggtggtgagttctctcccacccccacacagggcgtggggaagggttagggtagatgtggctggtttgaagggtgttttttttttctttttatttgcatactctgcagctgacttgctgtgtgactccaggaatgttgctcaacttctctgggctttatccagcaacaaaacatttcagaaaccatgatcttctttttggatcactctcctcttcctgctgggggttggggtggggtggggcagtagtgcctgtgtccatccatggaaaggaaattgaatccttggaggaaagaggccctatgacttttgagccaaagtgtcttgcttgggcttggggaaagtggtcagtgaggtggggtgggggtgggggtgggggacgggtggctgtcacagaccaggctgggcctctgccctcatccacaccagctggaaccctgggcggtgggtccagtggagcagtcagtcccaccctgagccagcagctctgtgtctgcatcgctgggtagaggtggcggtgcg

SEQ ID NO: 37569 - DNA, 884 bp, Homo sapiens
aaattggattaactcattttatagtatggaacactgaggcccagagatggaaggagacttgtccaaggtcacctagtgggttagggaagataacagcagtttctggaatgccctcctggccaaatgcttcccacagtgccatctgtatcagcgtcatgtgccacccccccagcccccagcctgtgatgtttgttaacaatcaaggcagggtgcacacttggcagaccctttgagatgagattgttcatcctggtctccttttacttccccccttaccgtgggaagttctctataaaaagggcaagttcagtgtatctaagtagaaggcacacccatgccctctcagggagagcgtgtgtatgcaatgcaaacacacaggcaggtacacacacacatgctccttacacgtgctcaagagcacacacaaatgcatggtcacagaagcacctgttcctgtttgtttcctccttgccctagccattctgccccttccccagaaaggctgccaggccatagtgggcacctgcctgttagctgggaaggaaagaaatacagccaggacgtttctggtcatagaaccaggggccaaggccacacccaccatgtcctcctcaccaccatggcacccattcgatagaggaagtcctgtgttctggaggagccccttcctcctctgggcctcagtcttctctgtaaaatgtactccgcaccccctccccgaatccagacgagctgcagctctggagctaggctcgggcctgactgaaatgggtccttggaaatggacaaaaggcagatcagctccgcctgaaatggggccttggccagtgtggcactgagatgggttctgggattgtggctctggcctggggcttcattctcct

SEQ ID NO: 37570 - DNA, 3180 bp, Homo sapiens
ccctcccggcccagttattaagttaaataccatctgctttcaaagcccaaggaggccatctatgctggggaaaaggggggtgggtgggaaaccaccatcaaattcccaactagccataaaaatggatgcaatttattttttctggcattccaattacatagacgtttgtcgccagctgtttgttctaacacggagtgttctctcagctgccgtttctcttctcccatttgacactgttaggccacaagtctggcagggcctgggctggaggggtcattggctggggagcctcccaggtgagctgagctggctttccctgaacgtggaccgtgcctctgaggttccccgggtggtctcgaggcgaggcgcagggaaaggctggggtgccgcttcctccctcttttcacactctctgcccctttcctcctcctctctctttttccaaattgctccccaccctcaacatgcgctcccagaccccacccttctccccaacacactgagaatgaatgaaaactcaggatctctgacctagggagaaaaaccagctcttcctgctcagaaggtctctgagacgtgggaagtcccctctgatgccctaactgaccacactggggaatgcagagaaccccctggggcacctctgagccaagattcccctctggaagcccctgtggaggctcagtggctctcgggacgctggagaaggggtgtctgtgtagggtgggggctaaccccagagaacgctgtggttctttctggtgctctgtagtgctatcatttaaggcacaggaacgcacgctatggcggccctcagcaaaactgtgaagtaggcaaagtgcagagttctggggctggagacctggatttgagtcctggcactgtcactctcgctctgtggccttgggcatgttatttgacctctctgatccccagtcctctcatctgtaaagtgaaagcacacaaatctgccttgctgccttgctgaaaggattaaacaagaccccatatgagaaagggctggtgttcccggtgagtgccagagaggaaatctcatgaatttatagctacaaggtaacaacttaattggaaccccgggaaggaacagctcagaaaagggcagtgccagggtggatgaatgaccgaccagccaaaaggcagatggggaaggaccaacctttctgagtgagagattctttcccctctagcacttcagctcaaacccctggtcctgcacccttagcatagggtgcagcctgcagcccatccagaaatcctcggatgtcaaagtagagggagtcataccaagaaacatgcataacatgtggtcatataataatgctaatcggcactgcagcagaccactgccaccaccaagcacatcaaccatgtggtgagtgccattgtgtccccttatgggcatcccactcacattatctctaccccgtgttatactaaccccaaagttgggaccacttccctcattgcacagatggaagactgaggccaggagaagggcgtaacttgcctggggccacatggccaggaagtggcagagctcagtttccaacctgttttatctctttggttctgagttctgagctcttcagtcctgaggccagcccgctgcctgaagctcgcacactgcccagcacagtggcctgtgcccaggaggcccccagcaagtgcctggtgccgtcccttgcccagagcaacagctcttatgtaagcagcccggctgcagcgcagtgcaggctccatttagctgtggggagccaagagcctgctggtggtggccctggtggtagcgaggggtgggttgggcagggaggtgtcatcagctgcgggcacccccagctttgtgccgccggcgaggactgacaccaggttaagtcgcctggcggcctttggctgcagctgggagcgcgcctggttcccattcgggcgctgtggttttgattagctgttctgcgaggcgggcctgctggtgagtccatgggagctccgctggaacagagggtcccccgcccggccgccgcggccccccctcctggcagccccagactccagatgttccgagcgctcgctgggaaggcctgctggcgccacggagggcagagggcagggaaagcacgcgagctggaagcccaagcactcagtcaccacaggccttggcagcccgcccggccctctgctggcacattccccagctctcccctggccatctgttcccaaaaaaccctttcagagcctcatcatcactcaggatacaacagcgcgagcagctggtttggaggcagcagggaaaaccgtgcaaaaggttctttgtgagagaggaaactcgcttatgaataacaggactggacgccgtaaaagttggcggctggaattcttgtttctcaggcgccgctgttttctcttgactttttatctctggtttttatttttttcccgttttcttttaatgttgtttcttcctcttctcacatcagttgtgacttttcttcctcctctgcgagcccgaaggccacctcattagtgctcctgacactgcggaacttttctttctcaaggctgttgtcactggggatggttgaaagtgactattttcctaagaaaacagctggaggggacatgggagcaagaaggtgcttgggagcgcatctcagtgttgaggctcaaaacaggcagcgccatggcagagtcattccgccgtcaccctgaataaaccccatgcacacagacgagaacaatgtctcctcagagggagggtctgggagaccggacaccatgcagagacccccatcagctcatcagagagcttcacggagatgttctgggaggacaatcacattcataaatacgccggtgcctcggctctgccgctgactgcagcatgacatgaagccttttttaagaactggctgctgccgccaaagccttctgggatatgtctgcctggaacctgggcacctcctgggagcagtcactgggtggcctgtcaggggctgtggggtcctggggcagggccggcaactggaagccagccctggggaggaaaggagagaagggcaaggctgggctgctttcctcacagcccctggacactgagggaggagctgagttgggcctggggctgccatgtgtcagacagtggtgatgtgatggggggacacaggt

SEQ ID NO: 37571 - DNA, 633 bp, Homo sapiens
aaggcgtcagcatggcatggctgcctctgcaggcccagtgggctcctctaagctctggccctggccctgggggtgctgggcctcccactgccagccaccttcccttaggctccaggagtcaaaggccaagattttcttagaaccaaggaggtgacagctggctggatggcttggggacctgccgttcctgtttgccagtgaggaaactgaggtctgtaggggttaagggtctaccttgccctgctgcatcctagcaatgtggcctagggcaagtgaggtcaccactcaggcctccatttcctcatctgcaacatgtgtgcagcggtaggcacctcccaggaattgcaaaagacaacgcatgcaaacaagtgtggcacggtgcctggcaaggagccgccctccgtaaatggtggcactgaacactaatgcacttgcttctgttcccaggccctgggaggatggggtgctcgtggtggaggtgtgtggggtaggtgaagggaccgtggcaatcacaccgacaaccattcgtggcgtaaggggatgtaggaggaattgggataaagagcttcgggagttcagaggaggcacctgttgtccccaccttgcggtgggtgtggggctggtgggggtaag

SEQ ID NO: 37572 - DNA, 2972 bp, Homo sapiens
gggacttacatccttggctttgatctttggggcccactgaattcatctcttgctcaggggctccctatggcttcctccttctctctactttgtggccctcaagggaacacacacacctttcctcagtttccccaaaacatccctcacccaaggcagtggtgtggagaggaattattttttccattcctgatgaatctttttaaatgcttacatgcatgaaaaaacaaacaggaccttgccttttacttcctaacttatgcagctgatttcatgtatttttgacaggttcatcatgtttctggcagttgtaacttttttcccttctggcttcactccctggtgctacatttctgggctgtgactcacccaaggttgtctcacagctggcacttaaatctagtattttttcttcattctaacatcttcccctgccccccttcatgcccatcaccaccaatatggtggctaatggatagactatgagcaaatacagcagctggtgagggcgctcacccaccctcggccgcgcaagtatccaggatctcacctccaggaggaaagatgcacctccctggacgagccagcctctccccgggctctcttgtcaccaaggcttgtccaaaggcagcagatgggccacacagcggggagtgaggccaggacagagcctgccccctccccaagaaaccggcagagccaagcctgtgcccccaaccacctccaaagccatctggcccacagacaacatgctttcatcctttgggatttcatttccagcaccacaaccagaagtttctagagaattcccctctggcaggcacacacatgcacatgatacacacacacacaaacacacacacacacattttttctttttttaaataaagagctcaaaaatgtttccaaatcccaggaaaggaatctccatttttggagaagaaaatagaacaaaaccagcaagtttatttatttctttatttttagtatgctttgagatggccacactgacctttatttcctaaataaaaatcaggacaagaggtttgatgaagatttaagtgctttttctggacaggtcctggtatgagaggcagcctaggaagtcaaacattgtaatctggggagcggctctaagatgaataagattaggctgtctaaaagcaaccgattcaatgatcctgtccgttgaggaccacagtgtaatatatccttttcctaaaggctctgaaaagtcctgcagtagaaaaactcatttaactttttaaactccgtgcctctcaaagttttatgaacacttatcctttaaaaaaatgtattatggtaaaatatccatatggtaaaataatatttagcattttgaccattaagtgtacaattcagtggcattaaatacattcataatatggtaatatgtgcaaccatgacagttatctgcaccccaaacatttccatcatcgccaacaaaattaaacacccattaaacaatctgcacccattaaacaataattctccctccctgcctccccccagccctgataacctttattctacttcctgtctgtatgaacttgcctattccaggtacttcataccagtggaatcacacaatatttgtccttctctgttggcttatttcactatgtgtaatgttttcaaggtccatctgcgtgttggcatgtatcagaatttcattgcttttcatggctgaacaatgctccattgtatggatagaccacatctctgttgatggagaacgcttatcctttattacagggacccatctctcatgggacaccaagaaaggtccccagaacatagtttgggcactgttggtttttggaaccactagaatgtttggatttagaaggggccaggatgttcatgttcttacccacacggttgccccaggcactgacagaaggccttcagtgagctcagtctccaaacttaaggcaaaggctgaagccctgagtggggaagctgtctgggaggtacctggggagtggtcacccctggggggaaagccggggccagccttgttctctaaactccacaggacacttggtcctgctggactgtggggcctgctgggaaggctgacagctcagtgttggtgccatctgtcagggctgccttccctggttttgagaacagggctggacaggagccaggtttgaggggagcagttgcccgggaggccctggccccttttggcagcctcacaggtcctgttcctacaaggagctggacacgctgtccgaacaactgcccctgcccttccctgtcagcacctcccacggagacccctttctagcgggcagacaagctggggattaatgggttagggggcccagaaccccagttcaggcaagtgaggagacgcccagagtcgagcctccatgttgtccacgcagacaacatgggtccctctgggaacccgaaggcctgggctccagcttggcccgatccttcactccatgcctgcaacctctgaggtcgctcctggcttggcagtctcccacctggtcctcacactgccttgtcccgccccgatgctggggttcagggtcagattaaaactcccctcactggctctactgcccccggagacccagggtgcaccctgttcttgctgaaacagctgtatttcccctcctgagagattttcttttgagccagagaattatttgaaagagcaaagaccttccagagttgttaaacaaaacaacacaccatctctagaggaattacaaataaatggggattcacccttcaaatctggataaagctcccctccccagacctcaaacttgctgctcaactaaagctgctttgaccttggaccagacctccctgtgcctgggcctcccaggacatgtcctctctcccccgtggcctggttccttgcacctccatctgtcttcctggctccgtcgtgcactcctggaaggcagagagtgtggtcatctccc

SEQ ID NO: 37573 - DNA, 1465 bp, Homo sapiens
tcccagcgctatcgcttagtatgaggatcctcctggtccgctactgcctggcaggctctggggtcctctatgggttttagaatgaaaggttttaaggttttttttcattgctggtactctgtactttctacaacgatcttgtgttacttttttaaaaaggatattaaaaaacaatcataggaaaacccttgtactgtaataccaagtggaaaagcatttacagttaggatgtactttctgatgagaatgacataaaaaggctctctgtatgcagaaaaccctagcagtgaatggccagaatgaaaacataggattgtgggtaatattccttacaatggaagttttccttacgatggaaggcagacaagtgggggaagaagaggtgagggtgaacccctagtggaaaaagagtgcctgctggaatggtagcacttgggctaaaataccctccttttgtggcttggcagacatcactaattaatcacttcagcagttcctcctaagctccagcttggtcttagaatctttctcagccccatagtccagagagctactgtcacagatcagagctggcaggcgacattaaacccagtcaccgtccttgcctgagcaggggacagcgcagtcatacctggcagccaactctcttgctggggcagcaacaggctccctggcagccctcgtggctatgttggggctgcaatccagttggctgctcctacctatctgtgccctgggggtgggggaggcacctggggtcttttcaacctgcactggctcccatctcttatatagagcatagcttcctggactctcttctcctcccagccctgggggcttgttggaagtgggaacgttgtcctcagcctgatgcttggccctgatgcaaagtccacatgttttttcatcattgactttcagggtcaacatgtggaccctggaccctggaccctggaacatcccctccaacaccacaccttggccactctcaccatttgggcgactctgcagcctctgacctctgctttcatgatttttggcgtaacccctctccactcacatggtcccagctgtgacttcgtgccctgatgctgtgttcactggcacatcctgactgtctaaccaggcccctggccccgccccacctgcctgccctgcacttggcatgactcagagctgacaggttcaccagccggactcactgcacagcgccaggaattcctcatcagtcttcttcctctagaccagcttggggtgggggccgtggggggttgattagaaagagtaggaagaaatatttttatagctttttctggttttttttttttgagaaacagtaaatgatatagaaagataacatagaaatatatgaggaaatcaccaataatctaatcacctggagataaccacagtgactgtgttggtgaacatccttccaggcacctctctgcctccacactcactg

SEQ ID NO: 37574 - DNA, 1075 bp, Homo sapiens
agaatccaacttgagccaggcttcctgggttttaagtctggctttgctgcttatcaactgtgcaaaattggactgttactctacctctctgcatctctggtttcctcatctgaaaagtggggcttgtaataataacacattgtaatacctccagctaaccctcagacaagtaggaaataaacggtcatggtcatatgccactggaattttttaaaaatattttttacacagcatgaatgcagtgataactaactgatacaagtgcacagtagttgctcaataagtattgcttaataaggaactgagcaagtcctttctttatagtgggaaacttcacaggttacctgaagagcaactccatgtagagcccaaagaggaagctcaaggttaatattcaacatacaaccaaagcactggggttttatttattcagcaggctggtttttttttttttttttttgagtactggctgtgctagaagctgacacacatacaaatagagtaaggattgacccctgtcctcagagcacacactctctggaaggacaagatttataaacaattaattataagtatcgtggcacttgctgtaacaaaggtatgcagaaagtgtgcaaaggaggtaacaagcatttcagcctgtggtggatgcagggtgaaggaggtgaagtcatgggagttggggtgcccagtgagcggtaaagggatagaaagctgcaaaggtcagccaaatccagcatgggaagggccttgaaagcttgggaaggaatttgagtgatacaattttttggcagaggggtgccatgattttggaaagatcactttggtggcaatgtggaaggtgcaaaaggcggctattgcagggcccaggatgtggggttgcttacatcagacctcctgctacaaggacagaattgatcggggacaatttctagggacaggattgatctggggggtatgtggccccagatgaggaaagagaagtccaggaggtggtaaaataagtcctttcttctaactcccctgctaggtaggcactgtaccagttaggaaggcatttggctgcaggtaacag

SEQ ID NO: 37575 - DNA, 3416 bp, Homo sapiens
cagttcgtatgaatctctccttctccaagtgacagctggaattcaggtgcttctaggctctgttactagcaatgttagacactcctcgaagctgtcaagctctcaggattacacaagtgaaaccacaacctgtcctgactgtattcaagtctgtgccccttcatgcagcagaaatggattcctcttccacagtttcagcagctgtatccttccgtggaaaaggattagcagccataagcccgggggagggcagctaaacaccagagggcaggagatgagtctccttcctctctgtgacacccagcacggccctgccacgaggagcaggcaaccactggtgccagatgaagcgcagcacataaaaccattttccccttcaaatgaacgatgcctaattaagcaaaagccgcatgcatgacttaagacatgaggatataaaattcgtcttccgagtcagctagagattctgcaggatcctctaccctcgtaaacgtatttttttatgattagaaaaacccggggcctggaagggacctcggccatcggcagggtaagcttctcaggagagaccatgagcccgagccccacagggggatcagtgtctgccaaggtcaccaagcgggtgtgaggcaagggcagggctcctcggggatgctctcggaaaaccctgcgttacttacacacgcaaggcgtacaatgaatgcacacccgcgtcaagccacggcttacaattcagaagaaatcaaaaggtcgccaaaacctgtcttctccgcaaggctggctgcagagagggtgcagggaaggtcaccggcaaatttctaccagcggccccacatcacgcctccccgatggatgcagagagaggtttcaggagctgctagtaaccttgcagggggttccctaagcccatcccaggaaaacgagttaactcggctctgctaactccgaagcttccagcaatgaattaaatcccgagctgcagcggaaagcggcggggaaagggccactgcggcgggacccgacacccggcggtccgccccaccctctaccgcgtacacacctgcgtgggaccccccgcccggtccacacggcccgggaccacgaccctccgcccgcgccccagccgggctcgcctgagggtgtcgtgccctgggcgctgcccgcggggttcgaggcggaaacgccgcgcccagccggcccgggaagagacaagtcgccgccgcagcccccagcccgcgggcccccgcgacgccgaggagggggctgcgccacgtacctcggccggcaggtgccgccgctgcctcggtccgcggctgcaggggacgccgctccgcgcagcccgccgccttcgtccgcatactaatgagggggcgccggccggccgccagcccggtaccccgcgcccccacccgcccccagcgccgctctcgcgcccattcagctgggggccgccgctcccccgctcagatgcggaggaggggcgcgtgggcggggtctgacgtcacgaggacgcggacggccaatcggagagcacgatgcctccgcggcggcccccgcccccgggcgcgcggccagtcagccctgcggtgcggtgggcattgccagagcagggcgccccctgcagggacgcacccggggcgggggccaggctggggcgagccccccttggttctggagaggaaatgacatacagtttgtgaaagcataaatattcgtgaaaataagaaaattcaggaaggaaacaaagcttaaggcagtgattgataggttatttcttggacacagctgaacgtatactgtgcgcctgcaactttccggtggtttcggaccggacttcagtgaagccagtgaagtcggtcgacttgcagaacttcctttcagaggggcgtacacagcaccgcggccgtgtgcctgtgatctccttctgagtttgaaaaagaagatcctagacaccgagccaaatatgtttgcataaaccgggagacttgtggctctattttgtaacagcttggcgcagggcagctggtttggagatgtctctgttcttcccttggtgggggtgccggaaaaaatgtgctgcctgggcgatcgaggttggggcaaaagcgttgcaaaggaaaaggtgggaggactctactttcacatttcccaaaagagttttaccataagactatttctggattgttctaacgtgaggatattgggagcattttgaaaatactggaggaaaagctgtcactgggcgatttaaatccggtaagttggccaaggcagagcagctgctggggtcagcgacagctgacccttgcagctgagtatcttgccctcttaatcttggagatcagcccaaggcccatgtgttacaggaaaggggtcccgatctagaccccaagagagggttcttcgatctcacgcaagaaacaattcagagtaagtccacagtgcaaagtaaaagcaagtttattaagaaagtaaagtggtggctgggcacagtggctcacgcgtaatcccagcactttgggaggctgagacggacagatcacctgatgtcaggagttcaagaccagctggccaacatggcaaaaccccgtctctactagaaatacaaatattggccgggcgtggtggcgcaagcctgttgtctcagctactcacggggctgaggcaggagaatcgcttgaacccgggaggcagaggctacagtgagccgagatcgccactgcactccagcagggcattcctgaaaataagaggagggacatatccaactaaggtacaatgcttgtaatgcttgtatatatgggcagatgtcttctgctacaagggtttgtgataaaggattaattttccctaattactatattttgcaataatcaatattattatttttaaagcaaaattaggaatgcctttgttctccagatatcgggatatctggactctctcaagtctgggtctgtttagtaagcattattaatttgttctcttaaccataaacacctagaggctaggaatgcctagctttcaggaaatgcagcctagcaagtcccagcctcatttttctagccctcactcaaaatggaggcgctctggtttgaacacttctgacacatgtgcttgatgcaacactctttacctctctttgtctcccctgtccttccccttctcttccagattccccttgtcggcaaagccaggcgctgatagcgttatggctgccatgagagtcagcagtatcccagcttccaaggatgggtgtaaggtgggggtgaggaagaaaaggaacttgaagctgcctcctgtcccagaatcacaagacatctgttaagcccttactacctcattcactccactcacattaggttgacccacttgggcagcaagacaagcaggcctgcaaacttccttttcttcat

SEQ ID NO: 37576 - DNA, 1491 bp, Homo sapiens
cccacctcggcctcccaaagtgctgggattacaggcgtgagccaccgtgcccggccttttttttgagacagggtcttgctctgttgcccagagtggactgcagtgggctgaagtgatcctcacacctcagcctcccaagtaactgggcatacatcaccatgctctttttttttctgtagctatctgcttaggaacaaaaggaaaggcagtttcttgaatgagtcagctttcagcttaattttttcctttaggcatagtgaattggagtcccaggtttttattcttttcatgagagcaaacttttgtttgcaaacagcattatcattttcattactctgcggttgttctctttaaaaaaagagaaaaaagaaaaaaatcccttagcccaggattagcaagtatccaacatgcatactcctgctttccccttcttatcctcttcttagcaagggctgtcatgactggttaaccatattactccctccagctggtcctggatgtagccacagaagcctctacacaacactccaatcagtcgctaagaacatagcaggctgggaccaaggaaaacccccgccttctcagtgccagcctttagtcagatcctgaagtgtttctgccttgtgacagccgtgctacagatattgttgtgtcatagtttgtctggtctttgtttttggattcatgggacagagtttctaaacccttggaattttctgagtggtagaagaatatttgttatccgtggtgagcccctgggattactcctgagtttatgctaacaaggtgactaatggcgggcccatggaggctggccaggctggaaagaccaactacatatgtgattagagggttggaatttgagcctagaggggtaggaagctggagatcaagtttgatcatgtggccgagtcactcaatcatgcctatgtaatgaaaccccaataaaaactctagatactggctgggcacggtggttcatgcctgtaatcccagcactttgggaggctgaggcgggcggatcacctgaggtcaggagtttgagaccagcctggccaacatggtgaaaccctgtctctactaaaaatacaaaaattagccgggcatggtggtgcatgcctgtaatcccagctacttgggaggctgagacaggagaatcgcttgaacccaggaggcagaggttgcagtgagctgagatcacaccactgcattccagctttggcgacagagcaatactttgtctcaaaaaagaaaaacaaaaaacaaacaaacaaaactctagatactaaggctcaggcaaacctcctggctggtgaatacatcgatatgctgggagggtgatgtgccctggtttcatgtggggaggacacagaagctccatgtttgggaccttcctagacctcgccctataagtcttttcatttgactggttctgatttttacactttataatacaactgaaatcataagtatagtgctttcctgagttct

SEQ ID NO: 37577 - DNA, 1559 bp, Homo sapiens
attgcattgcaatattgtagatatcaaaggcaaggagaaagccacacttccctgtggctgccatggtagcaagaatgctggagatgaagatgtctccagggacaaagaaaacctttggggacctcacttgcccctttaacccagacattatcccaccactgccaatctcaggggagctaggctttagtaataaagtgtactaagtttccccatgcctcagtaggtataaatgaggtcatagttatgaccttatttctcaagttcttccctacatcagccctacaaagttcctgtgccccatgagaatttctgggagtgactcatatgtactcatgaacaagtgtagccagctctttctgaggcctactggatggacactgctgcttctactggataatactgcattggttatattctgtgtgccccttgttttagtcaattttgtgctgttataacataataccacagactggataatttataatgaacagaaatttatttctcacaattcaggaagctggaaagtccaagatcagggagtcagcatctggtgaaggccttcttgctgtgtcatcccatggtggaacatggaagggtaagagagcacacgcaagagacagcaagagccaaagggggccacactcatttttccattaggagctcactcccaactccacgataatgaacccactcccacaatcatagcattaatccattcatgtgggtgaagccctcatgacctattcacctctcaaaggtcccacctcttaacactgtttcactggggattaagtttccaacatatgaactttggagaacatatttaagccatagtatccctccagaccctcctctccaccctcctctgccatgcttggtgtcctgaaatgctgacctttatgaattgcatcatccagtctactttgccctagcttctggtcaggttcagccaacgaaaggcactggaggcaggggctagaggagaatgagatcagagtatttatatcctgctctctccctgcaatgaattggtattcccataacaaattggtattcccataacaaaggctgcaactcttatcaagtggccgatattctaaacacacctgcccttgcccccctcagatccaggagaggtaaaggcttcctgctgttgctagctctgtcatgcttcaccaccccttaaccttgcccacatccctgcaagcggtccttcactacatgctcctgagacacccagtttgagatgctgtttacttcctgatggaaccttgaccacacagacatcattgctatttccatcctagcacacgtcctcaggccactgcacctcccccaggcatcatcaataattcttcatgtcctcttgaagcacatgtgacatggcattcctgctgcacagccacctgtggcaacaaggaagggagcagctctccctgctcagcatcactctgttagaggattctaaggggatgaactgcttgtgctccaatgtcttctagggtttttagtgaaatggctccttctgttttaccttcatgaggctggaggaggagtcc

SEQ ID NO: 37578 - DNA, 2507 bp, Homo sapiens
atgtgagccactgtgactggccttaacaagtactcttgaacacagatgtctagtaactttaagatcaatggactaaacaaaaaattccagaactctaatgagagcatttacgaagattgccaaacaacaatcagaacaagaattacatgggactgaactgatggagaactaaaacgattttcatggggctgaactgatggaaggttacagtgatttttatgacttctgtttgaaacattgctgattctatttatattttgttttccaaagtgaagaatgcttcttttcttttgagctatttttatcttacaacaattggataaagtttacttttgtgaacaaaattaaaacatttacctttctctctacctaaattcttcaaaattggacaactattcttcaatggctaaagccacagtactggtcgcccactgacaagagatgaatcattattcaggagaatggcatgcagccttgtgttgtgacctaccccatgctgctagcaatctggcctgcctgcaataagaagattcttttcccctgccaagagaggtaacttcctgggaatgagcctgataacatctgacaagattaatgattgtgcctctgtaatctacccacccaaactttgatgagattttgctgtaatgtgacttctgaacacaagcagagaacctccatcacccgtatataagctgtgggctgaaatactgctttggagcagtctaacagaaacgctctgaaggacccctctggggttggattcctctgtaagactctgaataatactaactttaagtgtctaaaggctttttttgtttgtttgtttgtttttgtttttgtttttttctttagtggccatttccaaggagccctggtttcttttattggaggatggcattattagaatctgtgcatcaagtgtgcacattacaaataagttaaagccagctttattttcataaggaatgaaaatcatcagccatgtaggtagacagggaaggccagtggcagaagaagggtccctgttaggaaggcaggcgggacgagacactttccctgggagaagggtgtggctggggctgcgtcacaggaaacttgcagaacaaagagagtccacttagccctgttctgaccccatctcagggttcctcctgagtggccagtgggctgggggtgggaagaagcaagggctctcctctccctctctctctatcccagggtcactcagagcacgcgggaaggggcaggagtgggaggtccctcctcggtgcccggctgcgccagctgctgccgtgttctggtgtaccaggccggaccttgcgcaatgcctttggggtaatcttcaaacctatgtctgctgatcactctctttagctgcctggcagtaccgcaaacccagttgtggaaagtcccaccacaaggaccttgacagaggtggaggccctccccatgcagaagccagagaactgcgcccattctcccggtatccttccgtggggcctcaacacaggcgtgtactgctcagtgcgcatgtgcagtcaggtctggtcggggctggtagcggggcacggggaggtgggagctgactcttgcccagccctggcccacggcaaggtgtcaggtacacttggtgaccgacccaatattagctcgcgagtagggttgctagatttagcaaataaaaatataggacatacttgtgctaaatggggcctgcttatactaaaaaagaaatccgtgtttatttgaaattaaaatttaactaggcatcctgtgttttatctggcagcctcacccaagagaactgtctgaggactgtctcaagccagagcaaagtcagagttggggctctgcccatcagggtgtcctcttttaagtcaggtatcaagtcatctcttacccagtcattttgcctgaaatcctggtaatattcaacacttccccggctgacaaaaggcaattagaagtgtcagcatttgttttgccatgcggtggggttggggacactgactgtgtcatttaccctcagtcccaagcacagcaccaggggctcaatgtcagggtgatatccaaggagctgaggcgcatgcgccaagagtgtggaaaattcaaagacggcacctgaaaagagaatcaactaatctactgagccaaccaggatgggagaactgggaaagatgagacagtggccaagtgttacgggacaatggggaggtgggtgtggtggaaatctggtgacataggcccacatgcacctggatgtgcaccctttcccactgtgtgtgccaataaggataagatgacctctgtcctaaccctgtataaatgacataaactacagccaataactttcccccattaatatgcctttctcaatgaaagcaagatattcggctggatgcagtggcttacacctgtaatcccagccctttgggacactgaggcaggtggatcacttgaggccaggagttcgagaccagcctggccaacatgttgaaactctg

SEQ ID NO: 37579 - DNA, 959 bp, Homo sapiens
aggaaacagagtgtaaacattatgcagctccaagaagcataatttttatgcccactcagatgtgaccatgggggaaaagggatagggaagagcctcagagaaggcaaagtgatggtcacaacggacaatagattaggatgttcctcccagaaggaagaacctggggctgccagatggactaaccaggcagcttaccccactgctagggctggaagactccactcctcctccccaactagacttggtgaccactatggaccagtgatgactgcatgcttctcatattcccctttgctgaacaagagctataattgtgttaacctattcagtcattgtttatcagatggattgtcttttattttataagtcaccagaacataaacagctacaactagacctgatgggaagacctttgtattacccaaagatactgaactttgacctagatgtagtaactggatgggaatttcaaggtttctcttttggaggctgaacatgttccaaatgtgggaatggagtgtaaaatggacgtctgatagccaaaaggtagactgtggtaaagattgctagttgcctattccaatagcgctcgtcctcctcttccagttgtcagaaccacaaattcatttggaatggtaattgtcttagtccatttgtgttgctataaaaaagtacctggggctggtcaatttattaagaaaagaggtttatttggctcatggttctgcaggctgtacaagaagcatggtgccagtatccacttctggtgagggtttcaggccacttccattcatggtggaagtcaaagcaaagctggcctgtgcagagatcagatggcaagagaggaagcaagagagagatgggaaaggtgccaggttttttcaacaaccagcttttgcaggaattaatagagccagaagtcactcattaccatgaagatgacaccaagctattcatac

SEQ ID NO: 37580 - DNA, 1065 bp, Homo sapiens
aatgactatataaataaaaacttaaaaaccaatcagcatctagttgccagatccagtcccaggcccagagcttctgggtgatgtattctccttcttcattaggttttgaaacaaccttctgtggatttggtagactatagctttaaaaaaagtttaaccgccgtcaccatcatgtccaacatagggaggccccaatgatagagggaaaagaaacactgcaataaaatgtcccatttgtatactgcatggtctacagggaaggaattgggacagccccaggcaggggagtcacttcccaggtcagccaacccaagtgaccccaactgccttcctatttcaaggacaccccctgtctagggttttccatggccacttctgagaaggacttagggaaagactcctcattggggtgctactttaatggccgcctcctctcagcataactgcagggcctgggacttgcccttgcatttgagcaatcacagatcaccgtttgccaagcttggagttctctggaaattttattttcccacaatcctactggggaggtgatccgttcgattttttgttaactagtaactaacttcagaaatctattcctggtcatggttcttgaactgaatttgcccttgtagtttctgacacttaaggataagtacagcccctttggccttatgcccaaattgagggcttcctctggacttgaaatgggaacaaagctaatctgacttccgcctccagcctgtatcccagtgcatggtgaaaaaagagagaatttattagctcaatttacaggtagatccagggatggctccagctgaaggtatagctagattttggggcccaaatgatactgtcagtgctctgtcttttattctgtctctcagatctgcttgcctccacttggcaccaggctaaataaagttgtgttcatatgatggggaagagagctcctcaaattcgtactcattcaaattagcaagcagctgagagaacattctctcctcatatcaaccttagacgattctctgattgacccagcttgagttctgtggccatccttgt

SEQ ID NO: 37581 - DNA, 1577 bp, Homo sapiens
gttgttgtgactattaaatgaacttagaacagtgtctggcatgcaataggtacgcagtgcactattcttcttccctaactagagcttcttatgtctgtccggtcttcatcaatagatccgtaggaagcacccgccagacactgtgtcccgcccctgccttcaagctgctctagcagagatgggagagacacaagtgtcaacagcctaacggcagtaaccctattacgcaagttggagcaacaggcttcagagaacagagtagcaaactgcctagaggaggagaaggtacacagagcagtgacatttgctccagctctagaagagtgagtaatgattttccaggagagccatgctatttaaaagcatggagtcctcaggaactgagagtggggtatgggtgcatcatgggcagcaggacaggtggaggagagcaaagggtgtctggggctggggaggtgatggcgagattagacatgatttttacctgcagggagggctcacattggtgtttaaaatggttctggccagcatcacacggagggtggttggtgggattagggagactggttgttaggtgcctgttgcctagaaagatttcattcagatctcgtgcctgggcaccagcgtctcgtgagaactcaaatgggctgagtgtcccaggccgaagtgagaagagggaaggtcccaccctggtgaggcaaaagctccgggaaatctgtgttcatgagttctctgcctgcctgtttacctgtgggggtgcagtgtttcgagagggcctataggctaagtgaggtctgtggcctgcatgaaggaaagataaaatcatgtgtccctgagctctggaacaatactcaagagagttggaagaagcatgtggcccttctgaggaaacagtccacccaagagatggccaccatgcagctgataaggccagggagttacctacattgcacaaggggatgtgtacccaaagttcacctgatgctggagagacgttttctaaccgcagactagctaatcttggactgtagagctgctctgctccctaggaagaaatgtgtttgtgagaaccaggaaatatgggcaagcaagagcagtcaggtagtttttagactcacaatgcacattagagtagtaaaagtcccaagaacccctgctgtttggaaataatcctgtgtaaagttgctaagtcaagggaagaaaggcaggaaggaggagacagggagggaggaaaaggggaggaaaaggagagggaaacaaggaggcttcatcctcaggaacctccttaagtgagctgcctctctttatcgtcctaaccacacctgcagcctgaacttggtcagggagcttccctgtctgccctggcctgacagcatatgttgatggcacagcctttgctactgtcacctgggttcctgccacagccttgcccttgctgaatctgccatcctgatccggtgttttctctctggttgagtaacctgacccagcctccagagtgcctctccacattgactggggtccataccacaccctcagatacccccaccttcctgtcactccagtcatcctgccgg

SEQ ID NO: 37582 - DNA, 666 bp, Homo sapiens
tttttgaggaccgtggacacatggattccctcctccttctcttttttccctttccttccttctttgtccaatatttaattgagcattaaaattgggactacagagaaaaaaaaaagacagagtcttggcctataacagagagtctagagctgggctggccagatggtcgccggctgcccagggacccagcctgctgtgaccggacgcggaggaatcccaatgagtcagcctgcaggtggaagggaaacaccgtgtcccaggccaggggccagggcagcttgccaggtcctgtgagagcccaggcagagcccgggcagccctgtccctggggttgggtggtccccaggcggcaggacgctgggtgaggagccggtttgtggaagagcacctgcgacagggctgtgcccgcccaggccaggccttcagaggccacgatggaaggtggatgagaagtacagtgagcaggacagacatcctatgggcagtggaatggccttggctcaagttgttccatttccccttttcaatactctgccccccatgctgagccccgcaggctaccttcccatggatccaccctccaggcttctgtagccttccattccctccctcaccgacctggctttcattcctcaggggcctcctattttcaaaggagagaactag

SEQ ID NO: 37583 - DNA, 546 bp, Homo sapiens
tgtgcccggccagaatcaatctttttttttttcctaagacggagtctcactctgttgcccaggctggagtgacataatctcggctcactgcaacctccaactccccggttcaagtgattctcctgcctcagcctcctgagtagctgggtgaaaccccatctctactaaaaatacagaatcgatctttttaaaaagctccctaagtgtttctaaggtccaaaactgagagcctctaagtggactttggacggaagtggggtggaggttgatggtgtaggaactttggaatttttgactgtagctattttggtggttgtaattgaagtaaaactgcaccagggtcaggagacctgcggtaggcccagcaactctgtgacctatctaaactacacaacctcaagggcaggctgtggtacggggctgccccactgagccatctgcagaggtggtatcactcaacgatgaaagactcaacgaaccagcctttaacgaccagtcttttctatttcaagagcagtctggactctgacagcccctgattcaggt

SEQ ID NO: 37584 - DNA, 1248 bp, Homo sapiens
tatatacaataacatgggtaacacacaaagatagatttcatttaaataaacttcaaggaaagacaaaacttgtttatagtgttggaagtcaagttagtaattacctttgacgaggggtagaaactgggaggggccgtggaggggtcttctgggggtgctggtgatatgctactttctgatctgggtgagagtttgcaaagatgtattcactttgtgaatgtgcactgagttataaactcgagatttgcaatgacaggcaaatctctttctttgcatgctctttgaacaaataatgagagaccttcggtttgtaaatagaaaatcaatcaagaggctgtatgaaatgacctggagaaacactctaagacttcatttcccagggcagtagaaataaacttcctaagctaagttccttatcttctgattctaaacatggtttttctctgtagcaccaggctgaaccatgaacaaattcttgtgtagtgtagtcactcttgcccttttcacctatttgcaaaataaaaaagcctgtaccaacctttagagatacaatgaaaaacttcacccatgacagaagcaaaacctgggcctatttcccaattttatttggtacaaaggatttgaaaaggatccaaggtgcagtctctaggcacaatgaaattaaaccggaaatcaacaatcgagatatttggaaaagccctcaatatttgtacttctaaataactgaacaacatacttctaaataactcatggattgaaaaaaaaaatcaaaagggaaattagaaagtattctgaagtagatgaaatgaaaacacaacatattaatttgtgggatgctacttaagcagaacttaagggggaaatttatacataaaatgcctacattgaaagaagaaaaggggtctcaaattgacttaaagaacttaaagaactaggaaaaaaaaaagagcaaattaaaccaaagtaaacagaagaaagggagtgataaagttcaaatcaacgaaacagaaaacagaaaaataaagtcaataaaaccaaagacttttttttgagaataaaactgataaacctctaggcaaactgatcaggaaaaaagagaagacacaaattatcaatgtcaggaatgagagaagtgacaccactacaggcaatacagatagaaaaggtcaacaaaggagcattatgaacaactttgtgcctataaattcagtaacttagatgaaatggacaaattccctgaaaaacaca

SEQ ID NO: 37585 - DNA, 693 bp, Homo sapiens
ccattgccaagtcccatgtttccaaggagacctaaactctgagggttcccatgagcatctgcccagggcactggctgctgtctgactgcgtcatacaagctgaggtcttcttgctttagcctctcaagggagaaactgcctagacctgtggcccaagcccaataagccaggctgggcctaggatttgagtcttgcaaatttgagacatcctccagcgtaagcaaactcgccacagctgggaaggtacacaggccagtctggtaggcaccggccaatccaaacagaagccctggagcacagggtattccccttgccaacccaaacccaaggcccttcctttctcttgtctctaaataaatactgcagtgaaaattagcgtgccccagtgccccagggtcagaattttcagaggcaggctcggagccaaaggcctgcttctggcaggctgctgagcagggcaatgagccttggctctccgggccatttcctcttttatttacaaggcccaggggatggggcagagctttcatacttcatagaggaaatgggtccttttggcctttcccctcctcacctagcctgtggttcctccccggacgagacctcagtgtttccttcccatcaacctcacacagccccttcagccttgccctgacccatatgcaacacattaaccaaagtcttcaaaaatta

SEQ ID NO: 37586 - DNA, 1236 bp, Homo sapiens
gggctcaagtgaacctcctgcctcagcctcccaaagtgctgggattacaggcttgagctatcatgcctggccaggctgcccgatttttaagggacatcaaccctggtcactgggtacagttatcccatggtcttttcttggaaactgcactaaggcatgcacatggctgatgtcttttacactaaggagtttttaaaagcacaccaatgcgggccgatcaggaaacaagcaaaaccacagaaagccccaagtgtaacctgcaccataagtgtccaagagacagtggcgccaccttgtgatgggcctggcagacagcgggactgtcgcagcggctggagtctgagaacccggactgtctacccaaggctgcctatttgcatccagagagtactttagagctgggaaggatcttgatgacctcagcaagcttcctgggtgcccaattcacctttgtacccactgaacacctactaattaacccggcacacagatggggctcaggaaatgttagttgaaactgtcctattctgagaggaatttccactctgcaatactgccttcctgaccccaatgctggagacattaacgtgtccaaaatagagctggcaacatgagctctagtactgtgacccaaaagggacactcttaaagcctgagggaagtaggctattctttctagagctgcgagagctggtagcccggaacagcctaggtgtgaaatctcaccacaaatcacatgcactttatagcagacactagtataaggaagtgactcaactagggtcacctggcatggtcgttcggtgtagaagctagaccagaacccacacctttccatgctcagacccatgtgtgtccccctaatgttcctaggtgccccctaagcccagagctcacactaaggctgctgccagctgcacagaacatcccaggaagcatctcccagacccagtgtctacatccacagctcacagagttagcactaagcatgtgtgctcatcacatcagcaacagagcagccctgacctcatctgtagtgggtgtggccacttcctctggcaacttctgttcttgggccatcaatgccagaagttttcgaatcagaactacatccttcatgacagcctgcaagttcaccgtctggccattagtaaacatctggtctcctaggcgactgactgggcgatacctgcagggggacatacggaataaatgaatgtttagtgtgaggaaagg

SEQ ID NO: 37587 - DNA, 1870 bp, Homo sapiens
ttccacaaatgcttgttagttaacgaggagactggcagatgataacgctgcagaccaggaccctccccacccttatattcccctacctcagcgcaaactctttcccccagcaccaccggcctcttatccaggcagtccacgccggcccaggaacgttcccagaactacggctcccagcaggacaagcgccagacaagcctggactcaagaggatagactgggcaaaagcgcttctgggaatcgtagtttagggcgccgacctcaagatccaggctgggcacgctacccgaccaactccttacttgagctcttcagccgaatacatcccgaaggaaatgccctgcagccgccgccagggcatgttcttggagatcaacatcctccaggtccgttttgaattccgacaccccaagagacgttccactcaccacctgactattcttaattcaacctcaagcccggagtcaccacgcgattcaacgtgcgcttgcgcgcggaagcggtcgcaggaacgacatttacgtggatgagatcacttctacatggggggggaacaaatagttgtacgactctctgctcgctcttttgttttgaaaacaatcaaagatatataagacatcaaaataatcatttaggaaaattcctccgaggcaaatcgggtgtatagagcttttagcttccgtgacgaagtctttcaaaccatgagcttgcaacctcccattttatgattgctttcgtcttcttccgcttcagccaatagcggagctgttccctgctccccgcccactgcgccccaccttcctgaaggtcgaggcacgctttcccaacatgctctgcagagaaatcaaagatggcggttgtatctgctgttcgctggctgggcctccgcagcaggcttggccagccgctgacgggtcggcgggcgggtttgtgtgaacaggcacgcagctgcaggtaagagacgcttagggtatccgcgaagaagaccgcggagtcaccttagtcctatgtttcccagctggctgtggaagtaggcacgatgaaatggtttgctcatgcgcgcccttaacggtcgcgtgcccttaagaccaggtacgcggaggtggccctttgaaataggattcgcaacgcatttattcattagagaaatacttattggttgcttgcaatattctgtagttaacaccatccgcaaagctaggaccctgctctcatgaagcttgcgttccagtgagtgtggctattagcaacactaccccaaattaaaaattatccgccattactcattttaacccaatcaggaggagcgaggagaacgtacaagatcttcccaaataaaaggcagtctctggtcgccaccgtggggactttggctaaagaagttatcaggttttcgtaaaagcagaaaagtctaaaagatctgactatgcccttttgatctgtgatagttatagcttggaacatgtatgacctatctgtgtaatttttttttcactcagtacaaacagtggcattgtgggaatatgagaggcagtaatttgtagtgaaaacttgctaaaagcctaattttaggtttagtgtttgccattcacttaattggatgataatagacagatttcctcatctgcagactagagttggtaataaccatccgaaaagtttgtgaggtataagtggggtatgtaatttacaatatgtttttatatgtactctcccttagttcccctcaagaaagagaaaccactccatctgatactgcagaaacctttgtgctgccattcaatgccagtcctccgtttcctggtagccatcgttagcatttttctactcattttctttgcctgaagcagaatctcttcctcagcatccg

SEQ ID NO: 37588 - DNA, 1880 bp, Homo sapiens
taattttcaattttagaaagtaactttggcaattacgcaaaactagaagtaactgggtatttaggctccttgaatgtcaaagtagtcccagcgcctggagacacagatccctgccctaatctcagaaatgagccacaaggtcatgactcctgtctttccttgaagaccaggagtttcagctccacaaatgaaaatctttcgcttttgtttggattaagaataactcagaagtgttctcagctgcgaaaagaaaggcactccctcccagataattacaaccttgacccctaaaatgtggactctcgctagaagtccaggcacctccttattaaggatgcaacaagccgccgctccgctcgtcctgacgggaactgtagttctcgcccgtcgaccttcagcactgaaaacctatcgcgcgcccaaccggcgacccagacgccagcagccaggattggtcctggacgggggcagcgcggccctgattggactacatgcccacgaagccgcgcctcccgctactctccacaccccaccccgctgctgcaataacctcaagtcatcccagtccggcgaactccctggtggctgcctagctgcccgcccgggcctctcccgacgagggtggccctgaggctcgcctttgtcctggaggctaggcagcgaccaaggctcccccgtttttcgctgacggttctagttcagcctcctcacgcgcctccgggagccccagtgctcacctgggcggcggcggtcacacccgataactgacaggcccgcagcatctcggtcaagcggacggcgctgctggtggactcgagctgccgcggcggcgcgagttaagtggaggcgtgcttgcgtgtgtgcgtgcccgcgtccgcgcccggcgcaccggaagcacagcggacgccactgcgcacgcgcggccccttctaccgtccccgactccgcggctcttagagggtgggctgtgtcccggctgcggaaacgccaactccaggcgattggcgcgaaggaggcgaaaagggcggattccctttccgggtcgcgcccgggctgcaggtccttatccggaaggggttactaggtgaacactgccggagggagagcgctctgaaatccattcttcagccgcacgtggaaaatggacagctgtgactcttaaagagaattaaagcaacaaagcatctcagcctgctctatgagctggatatttcgtaggaaggagccgatttggcgaaagttacgtaaacaatggaattgtctcagtttgcgcctttgtttcgtttgacagccctccagggagtcatagtgattgctggagacggtgaactaacactgtggggacccttgtgctaaacgtgtcaagtggcacaacaaggataggaacacgggtcctttggactccacagcttctgctccttccagattaagccacactgctttctccaagttgttactgtagtaacatcattttggctgcagtttgtggatgggttggaagatgggaagtcaatgcagaagcaccgttgaaagtattccactgggcagggcgcggtggctcacgcttgtaatcccagtacttcgggaggccgaagcgggaggatcgcttgagcccagaggttcgataccaggctgggcaacacagtgagacctcgtctctatatagaaaaataaacaaacaaaaaatttaaaaagaaaagtagggccaggagctatgactcacgcctgtaatcccagcactttgggaggccaaggcgggtggatcgcctgaggtcaggaattcgagaccagcctggccaaaatagtgaaaccccgtctttactaaaaatacaaaaaattagctgggcatggtggcgggtgcctgtaatcccagctactcg

SEQ ID NO: 37589 - DNA, 1528 bp, Homo sapiens
aattttttgtaccccttagtagagacggggtttcaccctgttagccaggatggtctcaatctcctgacctcgtgatctgcccgcctcggccgcccaaagtgctgggattacaggcgtgagccaccgcgcccggcaagaattttttttttttttttgagatggagtttcgctctttcgcccagactggagttcagtggcacgatctctgctcactgcaacctccgccttccggtttcaagcgattctcctgcctcagcctcccaagcccggctactttttgtatttttagtacagacgggggtttcatcatgttggccaggctggtctcgaactcctgaccttgtgatccgcccgccgcggcctcccaaagtgctgggattacaggcgtgagccaccgtgcccggccccaagaattttttttaataagaaattttgtagaaccttctataggcagtcgttttacagcggcgaagaacggaacccggcagatgacattgaataaatgttgagtggacaactttgttcttttcctcttccttgactccgcctccttgctttcccttcattctcttttgctcttgtgcttttaaacccaaagcggccgccgtaggcgaaggtgaagatggctgcctctgcctttgctggtgcagtgagagcagcttcaggtcagtggagagcgacatactccatgcatgccttcacagaaggggaaactggtgcgggatggaatgggcgtttagactggaggttaacaagcaaaaagggtcattatttaagttaagaaggttgcgcccaattttctctggggcggtgtgaccggcagcccgtaccaagtcccccgactcggactcacgcgggcctgtgtgtcacgcatttgccgcttccttaccagctttttttccctagaaaagaagccagagaaactggaacggagggggcgagggaaaccaaaaagtctcacctaactttctgatttagaggctacgacctgccattcacgacctttaaccttgagaattaatgtctcctaacttaagattctacacctctaaaatgggggtcataaccacctacctggggattaaatgagataatgcacgtaaagcgttttgggcagtgcctgacacatggtaagcttgaaggctaatttaatttttaactacagcccccggcacaagggctggtatgaggacttcttgactgagagatagcagaagtaaaggcgactaaattaagttgccgtgacgttaagtactttttgcaaaaagttaaaaatcatccaaataccataggatgctcagtaagttactttcacacaaaatatattgttaggataacattttgtgggagaatatacgagatcagtcaagaaaatgcagcgatgtaaattttaccgttagagaaaagctttttttatgtggagtattttttgtgttcgcgaaatataatacatatgaagaaaattttatatagtatgcatgaatgatttaacagttctaaagcaaacacctgtttaacactcaggtca

SEQ ID NO: 37590 - DNA, 803 bp, Homo sapiens
cttcaggggagctgtaaaacagcagctgttcacttgcagccctatcatgcagacccactgcaaaccaagcctgtgctttttcttcttctgtcagctagtcctaggcaactccccttgaggccactggtgtgggctgagagaggtggtaaagtagtagaagcaaaaaatgtgggagggtgagccacctgcttatgcaatattcttgagccttttatacctgcttgggccttatcttgtaaacaccatttccattttatactgagtactgctgcacattccaattttatgactcagtggattagataatgcccagttcacaatggacagtttgagttgcctagcttgccatagtcaggattcagactctatcagggactaaattcagccttgttctgggaattggtgcctaggtcttgtggtttcatggggttttctggactctctaaagttggcacagggcttcctgtatgcaaaagaaatccctacactaaagacttccctgacatgattgtgttgctgcataaactgtgataataatgactaacctgactttcacttttatttagttaagcttcataacaatttggtgaagtaggttttatgttctccatttaatcagaagagaaaaaccttgatacagctctagaggttaaatgccttgtctgaggctacatggctcacaagtggtgacagctggagtcagactgccaactgcaatactgtccccttggccacccgaagtagcttcccaaaggcatatttatatcagccacctgcagagtcctttcagtgcacagagacaa

SEQ ID NO: 37591 - DNA, 749 bp, Homo sapiens
attgcctgttggtcgtagttttcagtgctgctgcaagatctggttattttcttcatcttcgtggacaaaacactggaggcagtattttgaggactgctactccttcccatgctattcaataaatctcccccagttcagtcagaaacactgagaagttaccctgtgccaagccctggatcaggtggcacaggctccatgatcattgtgtatgggtgagctcatagtctagagccagtgccagccgtgggactcggttaatgcctcagcaaacctcctggctctctgccccccacccccttcgcccttcgctgactttcccttcatgaccctggtctttccgttgtgcccgtttctatttgcatagacaaatactttagctatgcacctatcttgattctagaaacttaggctgtgtttcaagaaatggattgttgtggtctccattttgcctctggagcagtgcatagtccacagggaggcagcatagtccacaagccagggtccatgctgaattccagatagagatagcagctgtgtggccttgagcttcatgtctccagctccctcatctgtcaaatggggataataatgtgcacctgatagaattttgtggtaagaaaatgagaggaaatatattacaacacaaagcacagtccctgaaacaaaatgaaagctgtataatactctttttcttccccatcttatacataatgtgaaaacattccctaaaaaacttggttttggtcggg

SEQ ID NO: 37592 - DNA, 2514 bp, Homo sapiens
tatattgaaaatcaacatccagagttgatttgcatctataatcccttatatgtttccaaacattctctgattatacgtttccacgcttgtaaaatgggaggcatgagttcttcttaaggattaaatgtgatgtaatgtcaaacactagcctttatgaacatatcttcaatttcttcattccatttctttttcattcaatcaaaatacttcaggtccagagcacacaatcacctctaaactcctttgtccttcaaagtcaccttctctttcatctcttccatcattcattatggccttcaactactttaaatttctttgtaagtatctgaataccttctcaatcccactttggagaaaaaaaaatctcattatacattgtatttaaaggtctcttttgctctaaatttaatgaacgtcattatccagtaactccacgcctttcttcatttatccttcaaaatggcggactttagacgttccacgatcagtaccacgtgcgcctgcgcctcccgcagccatttcgcccagcagcctaagctcggcgaggcgcctgcgcacgagcctccagagcactatcgctcctccctctagctgagtacgcctgaaaccgcacgttctcttccctgccctcccccgctaaccctgcaccgccctcaccctttcctgtgagattcttccgccaagtggaaggctcatcttcggtcgacagcctacgcggttgaagaacaatccagtaggcacttatagctcagggtctcgccattcagtcttatctatgcgccacagcaattttcctccgggccccaaagttgataaccgatttcgcgggactttttttttgcatactgtgaggcaacaaatggaaagaataggcctatggcggagggatcactcgcttattctctgtgtactttaacctaatgggggtcgcccgggagtcggaagggggaggggaaagggaggaggcagccaaggaattgtttttttctctggccccgccctcgcccggggggccaatggtgatgatctgtttcccccggagcctcgcccagctcctgtgtttcagccaatgagcggcggaagcggctccgaggggggcgggtccgggaggctgtgcgtgtcttgtgagagctcttgaaccaagtcagcgctggagtcggctaggcggctggaaacggcggctgccgccggtgactcagggaggcgggaggcggggtaagagcgccgcggcctcggctgcggggagaggggagagaaaggtgaaagcgccgagcgcgcggccccgtcgcccgttggcagcggcgcaggcccgggagacgggcgcccggggttcggggccggggagctgggcgccggggcggggcggcggggcaagtgcggaatcgcgggctcgcccaccctcccccgtggggccgcccggggcggggacccagccgcccgggaccggctctctgcaccaggggccttttcttttcggggctgggggctgagcactttcaaatccactcgagccgcagataatttttccctcactccctctgcggttgcgtttgagctgttagaaaagccaaacttgggagagcgagggtcacgcggcgctggggcccgggtgtgtggcgggggagggcggcggggggcgggagggcgcaggaggggggctcggtgcgggtccgcccggggccgcgtcctcgcgcgggttcggcgccctccgcccgccctccctgctgtctccgcccggccccctcccaccggccgcccccgtcgcattttgtttttgtgtttttgcagggaggagctcttcctgcaggcgtggaaaccatggtgctcacgctcggagaaagttggccggtattggtggggaggaggtttctcagtctgtccgcagccgacggcagcgatggcagccacgacagctgggacgtggagcgcgtcgccgagtggccctggctctccgggaccattcgagctgtttcccacaccgacgttaccaagaaggatctgaaggtacaggcggctccgggcctctgccaccggacgtttcgcagttaccgtggtaacgcgaccatcggttccctccttccgttttctgaaaacggagaccagaaagttggcatatgatctgaaggtgcaggaagctagatcttgaaagtctttggaatggttgtatagagccgagttgtgtttggcccacagctcctggctgcctggctttaataatgggcttagggttgttcagacacgcttcattaatgccggtgctgtgtcccaccaggactgtctcatctttactgcagaggaggaggagtatttttgttagcgttaggtagggcctgtaagtgacgtttggagtcattaagaattgaaggttagtgcttggaagtactttcagctggttttgtttgtttgttcctgttaatttattcactcaacttttaaaaaaactttcagacttgttaaaaatgaagtgagtgtagagggaggagcttaagttctgtttggcgtattaggatgggt

SEQ ID NO: 37593 - DNA, 481 bp, Homo sapiens
tgagatgagagtatggtaagagtgggagattttgatattagtttattagatacaatattaattcatatatcagaaagattttctgttggggaaacattggcttgaaaaatctgaaatatcgagcatttggtcaaggtgtttcataggtactaataaggtacacatttgcaaaatacccattaaaagaagagcagatttcacaattataggtagtgaatcatagttgactctggcctttgaagccacacagtgtaagtcacatctcattgtgggccaaaggagcatgggtgaaataacacaatttagaatagaaactagctgcatctgtcagcttgcatgagcttggtcaagtcactttagttcttactgaatttaaatgtctttttaggccaggcgcagtggctcatgtctgtaatcccaataatttggtaggccaagacgggtggatcatctggtcaggaggtcaggagttcaagaccaa

SEQ ID NO: 37594 - DNA, 1009 bp, Homo sapiens
taaactaaagcttggtcatttgggttgtgttcagtctgaagaaggaatgagttaaccccaaactggattaggaaaaagatgttctccatagaacaggagtgcagcagctttgatccagtgttgttcaggagagagagagactgactgccaggagtctcctagtcaggagaccttgggcttttctgtgacccacagaaatgtcctccctttgctcatacttctgaaagcttgctgataacctggtttggttccctgatttggcactcctccatctaggggaagggttcaatggcccatccagttttggaaggcctctccctccagttattaggtcttggccactggaacagaaaatgctgctttgtggaatccccggtcgtgccttaatctgctggatgtttggttagtgtgagttagtcctgggtgcctgcatcattcctggcactggctaaatcgaatttctgactgactggtgaagaaactgatcttggaccattgtgcctgcacaaagttaatgtgcaactccctccaggccccctgagaaccttggagtttttaatgggcagtctgagtggatgtagggtatctgaataacctgatactcagtgcagattactgggtttgtggatctgagtaaatttttcttttttcctttggagaaagcctggaacatgctgcctttaaattctgaaagggactcatgactcagaggttaagaaccactgttgtgtgataacctgtgtctgagctccaacttgtgtaactactgctgcacagtctgaatagggattctgcttggagttcattctcctagagggaggtgagactgtgcctgaatacataaagtgagaagaggcatgaatctgaagtacaaattcaagttactaggagtgctgaggggatccaggaacacttcatggggtggaggacagcatttgcaatgaagcctgaacaaagttaatttgaagtctagtcacagggaggaatgacaataacccctacctttcgt

SEQ ID NO: 37595 - DNA, 2181 bp, Homo sapiens
acaacaacaaatttacattaacgcacattatgtgccaggaattgcaagatgcataagattagtttttaaaatgtgcctgctagagctgaacaggtaagatcatttattaaaggatttcaggattttttttttccattatggacaagcctaggtgttgcagagcagtgcttctcaaagcactgatgtgcacactaatcattagggagcttgtcagaattcaaaatctgactcagtgggtctggagtggtgtccgagatttaacaagctcccaggtgatgttgatgctgctggttggcatttgagtagcaaagctgtgccgtatttaaagaattagccctaactaccaatatgaaaactttacatccctgaatcttcaattactctgaggtgacactactattattctggcttcacagtcgagaaggcactgagaagtgaactttccagagatcacagagctgagatgtgggaaggcaggattcaaacttaggttgactgactgcagggcattttcaactgtttgcctcccaatattatctcaattaataggtaacgagagttcgaagccgggtccagagctatcttctgtaacattcttctgggtcgagtccctgccccgctacggtatgtgcctagggtcaacacaagggctggggaaagaggaaactgagcctctttttcaacacaacagggaggacggagaacagacggctcctccggcagacgcgacccggcccgctccaaacaacgcttcgggcaggagaaggttctccgggtggtccgcagccgggctggaggggtggggcctacgctgggaaaaggttccgggcgggtcgtaccaacgcgcgcagggggaagaggtttccgaggccaggacggtgtcgctgcctacgcgctcagtggcgaggtggagaaactcttcatccaccctcggctacctgttcgagagccatggcaccaggagctctcgcgtcccacagccgactcctaaagactcttcctccggcccccctgtcgagtgggagtccccggaaatgggggccgggcggtatcgggcaggcggtggggagaagagtgtcctgtcatttaccaacttcactacgccccacacagatccacccgcttatctgccgccgccgtagcccttaccagttctttgggcggcttctcctgggtctttccaaacagccccatgacgaactgaacccgtcttgccccttccggctttcagttccccgcgcccaggcaggtcacgggcagccgcctgggcggggcccgcggaaaaggaggtagtcccaacccccagagtagggagcggcggcactaggggatgttgcgcatgcgccatacgcctgcgcagaatcgagtgagtgggagactagtcaaaaaggctgacgtcatcgcacatgttctggtcatgtctgtgtgggggagaccacggattcggtgcttttcgtaaggtgtagaaatgattgctctgaaagatacgaatttgttggctacaactgcttctaatacttcacctaaacctagatgttgcaccagaagtctggatctccacgcagacgtgtacacttagcatcactttcccgacagcttcatctttgtgtccagtaggcaactcacaggtgacaaaccaaaaataacctctttttcctcccgccaacccactcctcccctctgcttgcaccaccatcacctggtcactaaaccctaggcatcgtcctctctcccctcttaccaagtcccaaccattctaacttcaatatgtctgaacttcaaccctcccctttccatcccaactgcggtcgttttttttcaggccatcgccctttccagcgtgggcgattcctgcctagcatttgtccatgtgtgtcccgtcctacacgccacactgaccgtgagcttaatcacactctcaaaggaatctgactaaagagaactagacacattttagcacggacagttcctgattaggcctatacggtgagctgatggttactgtcattaactcatccgaggatggtgaaggggaccatttgttacctcagccccatactcctgtctctggtggaatcataaaatggttcggcagctttgaaaacattttgacaatttcttaaaatgctaaacaaagccagccttccattcctagctatttacccaagagggaaaaaagca

SEQ ID NO: 37596 - DNA, 396 bp, Homo sapiens
gtccccaatttatagctcatatcctagaaggatgcatgatgattctgagtggcattcatatggctggtctcattaaaaggggagacattttcctcagcagctcaggaaggaacactgtatgtggggaacatttttaaagactacaaaaaaactggacaaagtacagcttgagttccaggtgtggaacagacctggcaatacaggctagaagtgaagcaatctttccattccctttcccagggtatctgcctctggcatccccacacttgctcaccactgtagtccctgcagctaatacagtgcccaactcatatgggtgctcaataagtatttatgtcaaaccaaacaatttcagcttcttacagtttaataactcattcttctagttctgattac

SEQ ID NO: 37597 - DNA, 2788 bp, Homo sapiens
aaaccaacaattactaaaaacacattctttaagacattgaatattctctcagcactatttcacgtatatttctcaacccattaaacaatgcaagggtacctgtgacacagaagacaaaaaaaatttttcttttacacatccaagatgcaaatttttaaaaatcctaacagaaatataatataaactcgaacatggcaggcatttatacaaaatgctcgccttattttcaccaaacttaaagtctgaaaagctaatactgtacggtgtatactgtctatattcaaactcatgatttaacatttaaatcctaggcccaagtgcctctgatagtaagtattccaaagatgtgtccccactctgggtatcttattattactatcgtgacaaatattgctattgacagacaacgttttggagtttttcttacgtttttatgaacttcaactgacaaataatgctttccagtttgtaactagttgatattccagaattttgagaaaatcactcaacttagtaaacaacgctaagaagccacactttaaactgtcattttacgataaccttaaaaggatacaccaacactcctccaaataatttcagactcctcctcaaagctgggatccgcatacttgattgtaggaagcttggacgaagaaacctgggcagctttaacgcttccaggaaaggcctcactctgggggaacagccaggtaccaggaggtacaggtcgtcccctctcccaggtggaggggaccctaggggaagcccgatactcgcctgacttttccaccagctcccggacatccttcttctcgggcaaccctgagtagcccaacccccggcactccaaaatggtcttcagcttcttgaagctcagcgccaccggatccaccagctgggtggcaaagatgccagtttcataccacacaatggcctcaaaaaacctggccaggacgaacaggaccaggaaatagaggagcaagaaaaaaagcttcagccacatcttccctggagtttcctctctttccagagagctcggaatacgggagagagaagggtcgagggcgggggccgcggctcggtggcagcttgggcgagggccccgtgtccacgcgcgggccacccggcgccgtcactggccggccatccccggcggggaagcaggtgacgggatccgcgcgggcgcgaggcggcgacgagggacgcagagacgcagagcctcgcgccgggcctcccagtcaagagccgacaaaaataaaggggaaaaactcaaaacccccatccattaagcacagaaaggagaggggcgcggggagagctcgcggggaagaacaaaacgagggacgcttcccccggggcgggcactgacccaggtggcggggtcggccctccggtgccgcgatctcaagggggagggggagaccaaaaaataactcagatccgcccaggaggcggggatccgggcggcaggccggggcccgaggggccgtgggggccggactcccgcggccgcgggtcaggagggcgcggcgctcggccgggccaggcccggggcccagcgtgttctgcgcggggaggagcggccgccgcaacgccgcgcccgaagcccaggccccaggccccgccgaccgcccaggctccgcgagaagagcggcgggcacggcggcggctccaggttcgctcgggccggctggcgggcggcgcctctcaggcgggcgggcactgcggcccggcccaggatggggcgtcgcggtctctgcagatggaatcggtctcggagggaaaaaaccaataataggccccgagactgctcctccaggcggctacccggctgcctcccggccactcagcgcccgtcccgctcggatgggcagtgccggtcgcagcacccgtccccaacacccccgccacctccggagaccgcggccgtaccctccacaaccgtgtatcagcggcggccgcggccggagccgagacataacaactgacgtcgcgatgaggcggggccggggcggggcctgcagggtgcgcccgcaggggccgagggcggggaattcggggagccgcggggctaccggactaccgaacgaggggcgggaggagaggcggagccgcagcgtggtcggggccttcccgcggtgccgaaagttgcctctccgtgcttttgcggcgtggtctccccttttgcccctccaatgtttagcaattgattttgtctgaggattagtctttagattgtatcactttgtgtattttttgtaaaaatagagcagttaattattctcttaaaatcggtgaaaatagaaatgtacgttttttgatgaatcctggtgaacagggaaatttttggcacagttggtttgagatggtagaaggttaaacccagaaagcaaatgttttgccccctcttcatgagaatgtggctttgcacatgtgtgttggaggaggtttggccaaaactggagttcgcgttatactaggcccagttgtcgctgccagttacagccttttccctccttcagtctcaagggtgttaaaagcctggtgtggactccctgagttcctaggacaaagattgtcgagtgtagataagtccaggtgcaaagttccgggtgctttattttgtacatgggcctggcacagtggctcacgcctgtaatcccagcactttgggaggccgaggcgggcagatcacgaggtcaggagttcgagaccatcctggttaacacggtgaaaccctgcctctattaaaaatacaaaaaattaggccggcgtggtggtgggcccc

SEQ ID NO: 37598 - DNA, 1069 bp, Homo sapiens
aaaacaaaacaaaacaaaagaccacatcccctgcttttccctaccatctctgattcccattcctcagagacactgccttcaattattttagcaattttttcatgtttacctctatattttcaaagaataggtttttactgcttttcttgctttttccattttatacattatctattgatttcttactatggacgatgaggaattctgtcttttatgccctgtattcatacaccatttccctcccctcattcccaacatgattatattatatattcatctttatattaatatgcccatataaatcttgttcatagctgaaccatgtaagaaacctttcttgtgcaattgttcattgcctctggagttaataattaactcaaattttggtttgttctattttctatggccccagccacttattcatccccaaactctctgaactctaagattactcaaacagctaatctattagtttcatattttattggaaataaaccttctgtcctcagtcctcccactccaggtcagcctggctcctgtccagagccacccacagctgttgtctcaggacttcccgtctcttctcttttgtgctggattctctgttttcttgatcccatggttgcactttagttctttcattttcttgtttgcatgaacacctccacgtctacagtggcttagtaagaaagtgggcacggagataaactttggatgccctacatgtctaaaaattcctttattttacccccattagttgtatgggtttttttttttatcaaacttggagaagacttaacttgcaagaatattacaaaaagtgtccttaccaattcaccaattgttaaccttttgccctatttgttgaattacatcttttctctagattataagcgcatactttttttttttttgtgaaccgtttgagagttagttgcagttatcctcatgttggatgatagtttggccaaatatagaattctaagctggacatcattttccctcagaagtttgaaagcactgatctattagcctttggcttctattgttgctgttggaaggctagcat

SEQ ID NO: 37599 - DNA, 2122 bp, Homo sapiens
tccctctcagcccaagctcctcttcccttttctagccctttcctcccacatttcccacacttacacaagcccacttccggggagtcccctaaacagttaaacaaagatcattgaaaatacttataatcgatttctgtattcccagactgatttacattttgaaagcttaccactgggcagtatgtaattgtatcatttatagttgatttaaatatggcatttatggtcaataaaaaaggagagttaagattaagccgtcagcacgcacctacctactgtatcggtgctgtgagaaaatccaacttgccacagaataccttctccaggcccagcccctgctgcgattgtgagcctctttcctgtccttcctgtgtggagatgaccctgttgactgactcaccacagcattggtcccaagctgcttttcccaatgcattaaggccattatctgcaggaatgagcaatgccaagtgctttattccgagctctatctggcactcgagctggtgtcttcaaaagaaggactgccttttcaccagagagatacctgtagaaactggctttcaataaagctgaaaggaatgcaccctggggcagctcgctttgtacattgccatcccgataataaacagctcttctactctggccagccagcctgccagtcagctttttgagtgatttccttgaagatgaggttgccaaaatgaggaatacacagcgtcaaaacagaacattacaggactgcagttatgggaggtgatggttagtcacacagtttaataatctcaaattcctgatttctcatttcccttttttccaccaccttttcccatgcacagtcaaaaaattatatcagggctgggcacggtggctcacgcctatgatcccagcactttgggaggtcaaggtgggcggatcacttgaggtcaggagtttgagaccagcctggccaacatggtgaaaccccttctctaccaaaaataaaaaaattagccaggcatggtggtgcatgccagtagtaatcccagttattagggaggctgaggcacaagaatcgcttgaacccgggaggcagaggttgcagtgacccaagatcgtgccactgcactctagcctgggcaacagaacaaaactctgtctcaaaaaaaaaaagaaaaaagaaaaaagaaaagaagaaattatatcaacggttggcagcttcctctgcagaaaacagtcaccagtgctatcttctgccaacaccagtaacagcaggcagtaggactccctgaataaacattttgaaggcaaaggtaaagaagggtggaataagcaaataagaagtcaccattcctcctggagtaaaccattccctcctctgattgcctgaagctaaccatgagacagcaggactggctacataattttccagcctagtacaaaatgaaaatgcaggcccttgttcaaaaggctaggaagaaaaagtgccattaaaagtgctgaaatacaaagcttttcctttctttcaccatctatcttgacctgtcggtcatgatgtgcttttaaaatttgctctttaatatagttcgcctttgggcaggggatactcccagggcaagtgtgagtcctcacaggctccggggtccccctccctccagccacaggccaatgcttggtgccgggccaacctgcagcagatggttggccctgaagggattgaaacctcagtgccaggacaagctcagtgcctggattgggggtggggcagaggcgagttgccccctaacagttgtggtgctgccaggccctgctgcaaagagaccctggatgcccagcctcaagtctccccgggtgcaactccaggtccctattgaaagcagaggatgacagcagaatgttaccccccaacccccacctctgccagacacaacatagttgccatcccagttaaaggcaggcaggggccacagtggggagagcagatgtggagagggggtggctgggcagggtcccaggaaccaggcaatggagaacaggctgccaaggacctattctcagggaggtggggagctggcagcaggcagaaccgcatgtaagctaatggcacgtgcttcaatgtccattggacttcacttgcaaaaca

SEQ ID NO: 37600 - DNA, 576 bp, Homo sapiens
gcctgggaggcagcggttgcagtgagctgagattgcaccactgcactccaacctgggtgacagagtgagaccccatctcaaaaagaagggaagagaagagaagagaggaggggaggggaggggaggggaggggaggggaggggaggggaggggaggggagggaagggaagggaagggaaggggagaacaccatgcttactgcagagtgtggtagtcattagtactatatacaaatattcaactattcttccaaacatgtggtgagaatgtactctccggcctccctggagttaggtgtggacatttggactttgactggccaatgaaacatgagaagaagtgacatttttcacttctgggctgaagttaaaaaaaaaaacactttatttctaaatgtgcactttattgtacgtcaattatatctcaataaaaatagatatatgtgtatatatatatacacacacgctaaagtttacacataaattttatattcagatacataagctttatatatataaactttacagtaaactacatgtttaaagtctacaattttctttttttttttttgagatg

SEQ ID NO: 37601 - DNA, 940 bp, Homo sapiens
gtatatgggctattccttgcactatgcttgtcccagattgctgtgtgaagaaaatttgaaggccatgacatagggaggtagagctgatgcagggactagcagtctccctaagttgaggaaatgaagctcagaatatgtgaagaccaagggggctagagtttgccagacagagtaccaaagagagaatttcacagagagactactccagaaattttcaaagggttctcctaaagcatttagctgagcattgatcagcacatgcatgtgaaggaactgcccaaggttgggtaatgaaccatttgaaaggattagaggtaacagtgactgccattcatacagggctgggagtagtccctcttaccaccagccagactgaaaaagtttatgatttacagagcattggctcacatacagggaaggatgttgtctcaatagtggaataattagctacgaactgagcactggtccagttccacctaacaaatcatgatagcaaggtccaaagtattaaactgttgccaagtaacttagctacatgccagaacaaagctcaagaatatttatagaaatcaaaaatatccatctcccaacaaggtgaaatttacaatgtctggcatccaatcaaagattgccagacatggaaagaagcaggaaaatatgtctcataggaggattttaaaaaaatcaatcagaaatgaaccagaactgacacaacttttagaatcagcagttgataacattacaacagttactataactgctttctataggctcaaagttaactagagacatgaagatataaaaccacccaagttgaatttatagagatgaaaactataatgtctgagattaaaaatacactggatgctattaatggcagattagacattgctggaaaaaaagattagtgaactgaaaacctagcactaaaaactatcca

SEQ ID NO: 37602 - DNA, 1515 bp, Homo sapiens
ctgggcatggtggcgcatgcctgtaatcccagctattgggaggctgaggcatgagaatcacttgaatctgggaggtagaggctgcagtgagccaagatcatgcaactgcactctagcctgggcgagagagtaagattctgtctcaaaacaacaacaacaaaaaaaatgggcaaggtcccaggttgaatgaataatattattccatccatctggccacagtggctggtccacggatggacatatggccccagccaggacaatcaggatccttagccaaatactttctaactggactagtcttttcttctcttttggttgctgaattttttggctatgggcccagaacagtttgagggcatgctccctgctgcacagggaaagttcatctgcagaaggccttcaacacaagtgttcatagcatgaattggttatgaggtgattgatcgattagaaaacatgatctgtgtgatattccaactgctattattataccctcatctaaaactagcaagtagagcaggaaaaacatagttggaaacaacaccagctgcaatgtctgagtgacctcatgctttgtttatcaaagcactgggtgataacgttgataagaatgtgtacgagttgttctaatgataagggtggtggagatggtaaaagaagggtcatcactcttgagaaagagccatatataatgtagaaatggaagacaattaaaagcctagaaacccttagattcagactaggttaatattaaatggtgagaagtgttggaataataaaatacagatcactatataataaacttctctatgagaaaaggaggaatcctaaggaagactaaagaggtcagggaagggccttatttaaattgaaatcgattagataactcatacgaaatgacttttttttctaggtcatatctgtcaaatgacagcaatttcatatgattctctttaatacataggctctgtcttttgttatgtcaaatgagaagcaagatagtttctgagatattaaatggctaattacaaagttcctgtttaatatcccaggaaggtttttttttttttttttttttttttttgagacagggtgttggcctgttacccaggttgaagtgcggtgatgcaatcatagctcactgtaacctcaaactcctgtgcttaagtgatcctcctgcctcctgtcccccaaaatgctgggattacaggtgtgagctgccatgaccagcccttggaaggtaatatttaattgcaactacatagtaggatttgggaatgcttcaagaagaggtatttgcaatgggtattgaaggctgtttgaattaatgatggagatggaatagaaaaatattccagatcaaggacagtagcataagagaatgcatgaagaatagaagagaatgggtatagtattctaccatatatataagaaaggaaaacaaagtgcatattatttacttgtataaattttttaaatttctgaatactcacaaaaaaactcgtatcagtggtt

SEQ ID NO: 37603 - DNA, 1043 bp, Homo sapiens
agtgactgttacatattagggtatacaaaattacagctaagaaaaaaatcttattctttattgtatttttatggaattttattcatatggctttagttttagagacatgagtttctatacttctctttcataatgaagattacccttttccttttgttcaaatcaataagaaaaagtggctgcagttacaaataagttacagtcacctacatacaatgggatgaggctctgggggacttcaggaggcagtgagtatattgtgcatgtggaatgtgaatcacgggggtcagaaggtagactggggtaggcagcccccagatggctcccagtgacagcagcctcctcttattcttgttcttgtataattccctcacattgattgtggcctggatctagtgactcgcttctaacaaatagaatgccagaaaggtgagtcacttctgagattaggttataaaaatagggtgaagtctatcttgctctcttgcttgcttattctgaggggggccagctgccttgttgtaagcaccccacggacaagccctatgtggcaaagaactgagagtggcctctggccaacagctagtgaagaactgaggctgaatctaacaacccatgaggacttgaatcctgccaacaaccacgtgagtgagcttgaaaacagatgaagccttcagatgactgcaggctcagccaacaccttaattgcatcctgtgagtgacccagctaagcactcccagattcctgacccacctgtgagacaatgttaagtcaagttttggagtaagtttggagtaatttacagcttaatttacacagccctcaagtagcatatggtctaattaagtaaactaagcacataaataatagctaacaagtataatatttactatatgccagagattcttctaagcattttacatttagttaatcattaatcatttttatttatttattttttgagacggggtctcactctgtcacccagactggagtgcagtggcgtgatcactgctcactgcagcctcaaactccccaggct

SEQ ID NO: 37604 - DNA, 1344 bp, Homo sapiens
cggcttcatcgccggctgctgacccggcaccaattcctgttctgcaggtctcaccgcagaggggcacgccagccatgaggacagatgagggaacacgtgatgccacgatgggggtgccaggatgaggtgggtgcggtcgcggacaggcgcacgaggagcccagcggagcgccacccggagcaggcgcggaggagggctggggagggccaccaaggcgacgagagccggtgtgcctgaatcagcctaaaggagacggaggaggagtgtggtgggcgcaggggcagggagctgggggaagggcggggggctagcccaggctgaaggcaggcaggagcagggccgcgatgtcagacaagaaacggcagcagtgtgtttgggaacctagcaccaaccgcaccggtggagacagggtctgctgtagaggaggtggggccgggtcccagctaagtaaggcggtggatcttgcagcccttccatcctcagccgctcattctgcgcaaatctcggggccagccttggtggagccgtaaagcgtccaccagaacctggatccctccgccacctttcccatgaattcacctttctgtacacagcaagcgcctgagcggagacggccgacacgtttcccactgttaccccaggaaaccgcggctcctgagggggtcagggcctgggcagggggcagagctcagcgcgccgtactgaggcagaaacggggtccagagagggtggggtgggggtacagggaagggtcgcccgaaggtccctggcgcagggaggacagaggagggatctagaattcgtaggggagaagagaactcagaaaagatccggcccagcgcatttattttacagaggaagaaaaactgaggcccagggagggtaagtactgcaggtaactaggcactagcagcaggggcactagcagcagggacactccctatctcgcctgtcacccgcgtccagcaaaatctgatgccctgtcggcccagcagggggcggtgctgctttagttttggcctggtcggggttgagcggaggagggagcgacttcgaattcagtctgcacctgactgacctcgagcaaaaacgaagcgggcgcacgttaccgtcttccatctgggggcccagcagcctccatcttcgccctagcccctacagcctcgtccctggctggggctccagctccccaatttctcaccctcaccaccaggagctacttatcttatcacaggctcacttagattaccactaggagattaccactcgggtggggtggaggtgcggtgggattcgcattttgcaagggatcaaaagagcggctaattatggcatttctagccc

SEQ ID NO: 37605 - DNA, 1859 bp, Homo sapiens
gcctcctttttatctttgttattttttgagacagggtcttgctttgtcatccaggctggagtgcagtggcacaatcatggctccttgacctcctggattcatgcgatcctcccacttcagcttcttgggtagctgggactacaggcatgagccaccatgcctagctaattaaaaacattttttttttggtagagtgccaggtgcagtggctcatacctgtaatcccagcactttggggttgggggtgaggatcgcttgatcccaaagcccaaatcccaggagtctgagactagtctgggtaacgcgggggaaacacccctctctaccaaacaaaaacaaaaaccatatatacatatgaaaacaaaaaaatacacactagcccgttgttatggcacgtgtctgctgagaggctgatgtggatgttcgaacccaggagtccaaagatgcagtgagtaagccaggatcgcactatctcaaaagactgagtctcgccatatttgctcaggctgatcttgaactcgtgggctcaagccattttctttcaaaaagagctgggattgcgtgtgtcagccacctcgttttggaaaatttaatcaaagttgtagacccctgtttcttaaactgctagcatacctgttttttcttctttagccatattgctgtgaaattggaagcaaccttctgaggtttccaaaattacaaacctgtttttgtcactaatggttagcaggtgcaccgtttctggaagtactgcaataccaaatcgatgcgtagactagatagagtaaactcttactccaactccccgttccaaaactgcgtttaatatagcgttcatcaaacagaagaacataccagatattaaactgataagaacacacactacactcaatcattaaccaaacagcaaaaaagagataccagttacccggggcctcccacgtcctcccttctttcatccaccttaaggtcacggtgagaaacctcaccttcggtaaacatctcacctgctttctgatgtaaatattatattgaaaacataggccctttgagacattttgtccgctccttgactcttagtgacttcgagctttgtcgccccttttccttggtcgcgagggccgttcatttgcatgtcccacccgctctgcgcccgggaggcgtggccaccaaggggccgggccctgcacagcgccctggggaagctggtttgaaagctctggagcgaccccaatgccgggtaaaggacaagatttgcccagacggaagggaatttggggtgaagtggccgtaaaagtgtgggacgaaactgtttcgggcagagcggtgggaactcacctgaggaaagcatgggggaggagtcactaataagaatgagtggcagggacagggcggccttgtaacgccctcggtgttggaagggaagaccgtacagcgcgatggggaccagggcggcgggccgcagccagggtgtgggtgggcgacggtcaaggtgccttgaagcggattctgtcctcgggagctgcggttcttcctcctccgccctcaccggcgggcgaccttaggcagggcgtgaaatgcaacgggagccctggagggagggtgaagccgcgcgtgcaggaggaacctccttttggcgagttcaggccccgcagctgcggaggtgggggaccctgtgtggcagcctgctgagaggctgcgtgctccgcgcggttggaggggggaacctccagcccacctcctctttttcagccgagaaaccgctagttaccccctttcttatgcgaccaagattgtaataaccctgtcacctttcacggccctccgggtctgcgcccatcctcctctgaggattcgct

SEQ ID NO: 37606 - DNA, 2283 bp, Homo sapiens
tgtacctcttacaactcaggagtgtctttctcaaggacctgaaagccatcgctctgaaatgtaaccaggaaggactgggcctgactcccagtctctgtgggaggatagtattttatcttagataattcccagataggagacacagctggcctacttgcgtttttacaatgatcagcactttgtaatttttcacctccctgactctacttgagccctctcttcccactccctactcccttcatctccctttaaaactcgcagtcatctcggtgaaaataggaatggagctcagtctttcccctctgtcaggagttgcggaataaaatcctttttcaacgctttaacgtccagcttcgtgtatctctgacattggtaggtacatattaaaactcagctgggcgcggtagctcgcgcccgtagtcccagctactccggaggctgaggcagaaggatcgcttaagcccaggagctggaggctgcagcgagctatgatcgcgccactgcactccagcctgggcacagcgagacctccgtctctaaattagaggattaaaagcacacacacataaaaccccagatcactatcaagacgggcctataaatcttagaagcttgtcttatagggccatatcctcaaaagcctaggataactccaaagtgatccccccctaaacctcatcccctcttctcttcccccaagggccccgctacttcctgctttccccgattcctaaatccacctctccctaagcgtcctacgtcaaagtctctactttccaggatgctgaacttcaccaaacggaagcttactctcttccacgtttgggcttttctctatttatccctgtcccctcaattttcgagtttcctcaccccacttccctttccctgacgctccgggtctagatttcctccgggtctagatttcctcttggtcgcccctagtttcccactccgacctcggcttcctccgcaagccgagcgccccttccctccgcactccactcggaagccctggcgtctctttccgggggcggcggccggtgaggggtgcgcgggactcgggccgcgccctggtcggccatttcgcacactcggggcgcgcccggcgggctgggcgcgcgaggcctgtcctggagcgcaggagttgaggggctgaagaccgggccgcccccgccgccggggcgggaactcaccttctctgaggcaggggcgggcgtctacaactactgtcccccgccccgccaacgccgccagccaggggataagccgcggtggaggtggcggagaggcaggaacaaccgctgccgccaccgccgcctccgccgccgagcaggctggatgggaggaggaggcggagacccggcttcctgaggggaagtcgccgccactaccggcttatgactggacagcacagacgccatggcggcgagacgcgctactgcgcttgcgcggccagcccagcgcccaggaagcctcttgagccccgccttgctgcttgcttcgcccgcttggcctggcagttcccggcgcggctctaatgtcttgctggcgcgactggttttgatcctgtccgtctgccctcctttttggggcaaggaaaagttcgtgggggtcgctcgctcgccttgggagaatgaatataaagccaactgattaaaaaaaaaaaaactggaaatttacagttccaccctcaaagtatctcaaaaatacatgatctgttgccttatcaacagaacctacaatataggttcgtgtaacaaatgcgcagtaagccaaacaccgacatattcagtgcttaggagcgggggaaggtttattccgtttggccaaagcgagagagcgggagaagaagtctctcaaatactgacatgccttagaacgtaactggggggcctttatgagtaaggtaagaatacagagggtgggatcccccatgatcaaagctgtttcctccctgggactctaggtctcatctgccccattagatgatgccccatctggaccatcaaggaggtctgcgtgacctaagggtcatggttgttttgtttgtgatagggtctcgcgttgtcgcccaggctggagtgcagtggtgggatcaccactcactgcagcctcgacctcccaggctcaagcgatcctctcacctcagcctcccaagtagctgggaccgcaggcatgcacacatgcccgggtgatttttgttcattttttatagagattgggcagggggtggggatgtctcactatgttgcccaggctggtcttgaacttctgggctca

SEQ ID NO: 37607 - DNA, 708 bp, Homo sapiens
ttgcctctttaaaaaaaattgactcacttccagagcttcaagtgacactcccttacatcatcaaattgagcaagactttgatgaacacttaaccagttagtattctcttaatctatcctacaagcttctgattactccagaagattcactaagaattttgagatttaaagataatagaatttacagtagattagatattaggggtcatacactatacatgattttgtgagtcattacttgggcaataagctacggctataactagaaatgtaggtttgacagattgatggcacacctctggtccaccagtcacagaactctgcacaaccaggcaagacatgggcttaattccaataggcttaggaaagcagtcacacactgaaatgacttctttggaacaaagacatgatttgagttcacagagggctgaacagcattccggggcacaaggcagcagctggtagcaggcaggagggcagccaaagccagaaatctcagccaaatcaaaggtcaaggcaaaagttaagctaggagtgagacctgcaagtagaagctagcgcactgatgggtgcatccattgtcagagtcaggccatggaacaaatacaggtagacacatagaataactaactcccgggaggcccagatacagaaggatatggaaacaaggatagccaaaattatagggatagccaagagctacacaaaa

SEQ ID NO: 37608 - DNA, 2008 bp, Homo sapiens
agcatgctccctgcccccagttccctagacacctgtcttccaaagctcagcctgagccttctctttacctccactgagccatccccccatgctctctgtgagccacatcctcctgtacatgaccctaggaggcacaggggttaaagcagggtctctgagaaccagtgcctgcttccaatcctaacttaaacacttcctacttgcatgaccttgcttgtgattactaaacctttctgggcttcagttgcattaactgtaaagtgggaaaataatggtacccagcttagttttttggcaaggaatagatggggtattgcatatcccatggtcagcacagtcgcctggcacagtcagcgctccatacacctgagggaatgccttattacctttatttcttctcttctcttccctgataagaaaatgccttattgcctttatcatctgtctccctggtatctatccagcacagtgctcagtgtgtggttggccttgaatcactgtttgtttgaagaatgaataaatgcaggaataggatcacacaacgaagtgccaatgacatggccatcaatccagaccacaccctagttcagtgctctttccacttgcctatggggtggccttgtgcagtgaggacttgctgcaaataactccagaagtcagtaaaatgccccctagtttgtgtatatagcctgaatctctccccccatctcaacatttggaccctaaatagccactgctggtagagctagaccctcactgatgtgacccacagctttgcctttcagtccagcactcaccgattgccttcatgaaggcttcaaagttttcctggctctgcagttggtacttgccggagaaactcatggtggcaatagagctccctcttcacgactgacctgcggctctgccgaccagactgtccactgtaggctgttttatagggggctcccttcccttcgaatagcggccagaggtcagcagctgttgattcctttatggccaggttcaaacattaactcctgagagcaatggtcaatgataaagaacaggatgggcacagcaaaggtttgctgtaattcagcaaacattaatgaatatcagtcaagcaggaagccttatggccctgcagcctttaagtgactctccgcaccccacgaaatgtgtgtatatgcaggtatgtgtatatgtgcacacacatgtgtatgtatatagatgtgtgcgtatgtgtttgtacatcggtgtttatatatacatatatgtattttgtacataaagatgtatgaatgtgcatatatgtaatgcatatatacacattatatgcatgtgtttatatatgtctgtacacatatacacacaagtgtgtgggtgcatgtgtacacacacagaaaaataccagagaattcctttgaactcaaaacctcaccttatttacataaccttatgatctcttctcacccccattattacacaaacttattttttagagttgttatcagccgctagtgttattttgtattctgggaattcctccttgatgattataggctcctccacaggcctttttgaggtgttaaagcagtccatgctaaatggcaggtgtaaaacattgagacgcattttattaggcagagacaaggcaggagaaagtggcacctgctgacttgctccagccccactgagaagacaggacaagggatctggggttatgtgtaggaaactggtcttgtagggttatgtgtaggaaactggtcttgtagggttatgtgtacagcactggccttggggagatggcccagcagggcttccagtggccttgggatgtgccagtttgttgtgaagcacagagaggcgtggtgcccaatgggtgcacgtcccagttcctgcctctgaggcagctccttacaagcaccccctcacccctagattctctcccttctttgtctggactttggcgtcaaccttttcacctgcagcctccagccttcatcctctgggcctcctctactct

SEQ ID NO: 37609 - DNA, 1012 bp, Homo sapiens
gtcttaagaactggcatgagaattcctagtgtgtgtgtgtgtgtgtgtgtgtgtgtgtgtgtgtgtgtgtaaatgactggattagctgcctgggagacagagtgtgtgagaccccagacctcagacccgtgtgtcagcgagagccaagctggtgaagagaagggcagctccctcatgcaggagaccaggagaggctgggtgtgtcttcctgtccctcccccagactgcagaaaggagagagaggaatgtggcaggcaggcaggagagaggccaccaagagggcatggggtgatgggtcactgagatacccccagtgaccgcaaggcaagaagagctccaggatggcattggctttgaagctgctcatttgctgcagtgaatccccatccatctttctttaatttccaccccaactatttcaaaagcttcagtaaaatatagtgcctgaatcaatatgtgagcaagtggaaaatgatgcaaggctgagctttatttctggatggatgtgatgaggctgagatggcacatgcagaagcagtaccaggaagtggagtgtctgtggggatgcattccctacagggttccccaggtccctagacatcctaggaagggctttggaggaattcaaggtcattttatttagatcccatctgggttacatgtgacacctaaagcctgcaccaatagctggcatatgtctgtctaatgaccatgtgaaggttcagcccagggctaaattcagctctatacctgagatcctattcactacctacctaaagagctcttctagcatttgtcaaggaaggaatacgtaaacacttgcttagatggggagcttaggagttttgcagcctaaaatcaatgaaataatcaccgaggaaaatgaccgtgatagagtcattaccatgcccaactcccatcacacccatcagttgcttcgtttgggagaatctgctccaagtgcccatgttatctcatgcccccagctgcctgcctgacatcccgctcagat

SEQ ID NO: 37610 - DNA, 898 bp, Homo sapiens
ggagtaggcaggagggtatgaattggagggacattctgtaactgtaacagagagcatttgggggtccatcataggtgggcatgagggaagagcagaagctgaagatacccctggaagcccaccttgggtgaccatgggcatgttaatggcacccactaaggagagcaatgtagggagaaaagtcatccttgcccctccttttgcccccttctcctagctagaagcatttctcttcactctgaactgtcctgctctagatcactgggcctcttattttttagaccactgtatcttacaacctcacctaggttatgccttcctttcctctggacactaaggtgctcggtggcagggtacagggattcattttgtctcccctactggtctttcctggtccttggcacagacaggctcaatacatgtctggtgaattaagcaatggctgtaatattgggacaatggccatttgtgtgtttgcacactacgcctccccctctcctccagttccagtagatcgtctgtccattgccacgtgtccttaaagttctgagagcaaaacccaacatctgtgttgacagctcaacagaaatagctaaagccagatgaaagttgtttagcagaattcattcaggctgctgatccctgcaccaggctccccttacccaatgggatttcctggtttctgaagctcaggacaaaatatacacagtatgggctcagtaaaaatttattaagctacagtgaatcagtctctgcttgaaaatgtagcatcttctcatttaaacaattgcttgaagggtctgtgacctggaataaccaagaagtttgaacttatttggattcatgaagaaataggttggggggcagataaccaaaatatctatcacgttttttcact

SEQ ID NO: 37611 - DNA, 1696 bp, Homo sapiens
ctccattcggtcggaggttgaagggaaaatcttgaggtgccctgaattattatctctccctttgtgcctcaaactctggttgaactattaaatttaaaacattagaaaatttgattaagaagcaaagttttcagaaagcacaaaaagcaaattttctactgcttactttcagtctattgatctattactaggaggatttcaacttttaggaaatattaatcataatattaagtcaagggtacaatgagaaaattggacagggaggtttgggtttgtaatgacatttctttttctattttcttctgcttattacttgtgtaagtttcttgagggcagggactgtttttatttgtatctctggagcttggcaaagttgctgagattagaaggcactgagaatgtgcttattgaatgcctgagtgcacggataagaataaaacaaatgtctccagtttcatctacaagtgcttcttggcaggatctttgattacacataaaaacaaatgccttgcacagagtgaagatgagagaataattagaggtctacgagatagagccaagactctatttagcaatattcttataagcatctcatagaaactctaaagcccactgccctagatgggaagtggccccagggaaattgcctgggaagtacaagattgcatgatgcaggcagagctcacaaaatgcacattgtccattgagagtgggagtgagacagatcaccccatctgctgataggtgtgtgtatgtgggacgggttaaatcacaggttcaactttgaccccaaattcctctttgaccaaagcttttgacagttaggttaaatttcaactaatattatttgactacactgctcccttataacttatgggactggaagctgtcagccttctttggatgtttttactgaaagtagctctgatgggaatcgttttccaaagtcagtgcaaagtgaaaccctagtgttttgggaaggggcaggattagccatgataattaggattcaaacctttatttacagagatatgtgggataaatgggaccattcaggggtttcaaaccattcacttgactccttttccaaataagccaaagtgaacaaactcctgaccctagtttttgtatatatttttggttaatatcaattgaaagactgattcaagagacttcgaattcccgaagactataataaaatgatgaaaccttatcctacgtagcacagctcaccaagacttactcatgtccaactacctatttggtagacacaatgtatacactgacttccattttaccagaaagaaaactgagactcagagaggaaagtgtcttgcctgaggccacacagccaggaaacagcagagaaggcaggtcttctgagaataatcctgaacggtctccactacgttggagatgcctccctttcatatctttatcctaaatgcaaggcaactactaacccaggaatgtttctgcacatatctattaatgcagcagacactttggttgcttcctagcatccaaccctacccatcgtccttgctaacaaaacacaatctttttcatataccagcagtgtatgagggctctaatttttccatgtttgccaactgctgttacaactccatctttagtatagccattctagtgggtataaagtggtattgcattgtagttttaatttatatttctc

SEQ ID NO: 37612 - DNA, 1638 bp, Homo sapiens
gtatctcttttctgagttgatctgtgaatcttctctattgaaatatagggcatataaccctggaaagtatattgcctattctcattgttttatggttttttttgtgttaaccagatgaagtgataaaagaagtctagcagaataagaagacctgggcagggcacagtgaagaggggcattttagcaatcctgctttataccccagtgtttccggtttttaaaattcataaaccaataacattttcaaaagaattttggttgcaaagatgttaaaatataaaactaataattactatagatgatcacatcataatataaataacaaaaaaggcaagaaaggcataatctgagcccggttggcaacctgattctgatttgctctgtaacccagtcacgatgtaacagttgggtttccaggttcagaatgaaaatatagaacagcaggctgataacaaaattaatatctttggcaggtaagtcttcttatgtgtgcctcgcggtcaaaccaggtcctctctacttctccactcccatgtaggcggcctcccactctaggatgggaggagtgcagaacagaggtcaggagcccggtgccagcatgtatgtcccagtagggtggctcacacctttagtgaccctgagcctacttttcctatctaaaaacttggccctgtgaccattgaccatttggccatgagccacatatcgtaatagtcttattcagattgtgaagcagcaatctaatcaacggctcttttgattagacctggatagtatgaagtcaacactcaattccagaggcttccagtgaccctagaaaatgggcagagctgtaccatggctcccctctaggtgaaaggtctcgtcagtcttgacaaagttgactaaggacgtttgaacctatgactacacagattgcctcacctcttcccagtaagtgtgaactctcccaacccagtttttcatttacgtgtccatggatggaatgaggaattagcaccgcagccattatcaaaatcattactataagaaattttgtacttctctagaaaggccatttgttctaggatctgaaggagaagggtagagctcaggtcacttcctcaggctgatccgtttatctttcctgatagtcagtttctgataaatgcagcccttttgagatattttgcttttttattgccctggatgtccttggtcactcagcacacccaggatgcttagctaatattatcttggtgaaggtgggggagattggtgtcctgtttgtatctgccaagttagtgaccagctcttcatccctgcaaaaggcagtatgaggtgctggttcaatgcatatcagaagaccacccacaagctgggattctaaacctgctgtctaaagcaagttgtgtcctctccccagccagcttgcccacagcatccaaaatccagatcatccatgaatgtcaaagttgacagatctttgaggacattaattctaagaaattataactaagagtctttaggagcctagagagcccagaaacacctgaatgtgtaaaatttcagattacatttttctgttaaggctttcaatagattctcaaactcaaccttcccaaaagttcaagaagccttgacttaatgcaatccctt

SEQ ID NO: 37613 - DNA, 1873 bp, Homo sapiens
tcaataaagcgtttactaaagcgccttaaaaaatgggccgcggggctgggcgcggtggctcacgcctgtaatcctaacactttgggaggccgaggagggcggatcacgaggtcaggagatcgagaccatcctggctaacacgatgaaaccccgtctctactaaaaatacaaaaaattagccgggcgtggtggcgggcgccagtagtcccagctactcgggaggccgaggcaggagaatagcgtgaacctgagaggcggaacttgcggtgagccgagaccgcgccactgcactccagcctgggcgacagagcgagactccgtctcaaaaaaaaaaaaaaggggccgcgggaggggcacagggcttccccctcgtgatgcttccgggatcgcgcaccgctgctcacgcactctcctctgtcctgtgtcctccgtcccccgccccccgccccatccccaggtccttcccactgcgaagctgagaaccctagctccggccccgaccggaagccccaccgcaccgtcagggacgcggactcgggagtgcgcacattcgcagcccgggcagccctgctgcgcaccgggcctcgcgccccgcgccccgcgccccgcgccccgcgccccgcaccggtaacgcgcgccaacctcgccgccctcccggggtcgtcgcgggcgagatttctgagctccggacgctctcgcggctccgttcggccctgattcccgcaggcccacgtccgtcgccccgcccgtttctggaacctttggttccggcgctcggacttgaggaacttgggagggtggtgcggggggtttctgatgctttgcgttttctgcgggatttgagcagtcctttgagaaccccgaaactgaagtccgtggtgttttcaggggctgggagtggaatctcaggcgcctgcgagtcccttgaggatttaggccgccctccttggcgggatgactggcaccggtagcctcagagagcccggggtctgcctccacccctaggggtgccgtcggctcctggggtccgagtctccgccctgtcccaccccttctcacaaaacccctccacctccctgaggggcgcctgtctacccaccttcttgttcccagccttcgggctactcctattttccgtatttatttatcctggttattggtcagagtttttctgaccttctctactctggaatagggtccagaggagtggcaagggaaaattattagaatataaaatcccaggggacacgtagtccgggtctccatcccatgcttggagccctcatagagcagcccaacaacagcacttgattttcttcctcaacttcaccacctcctgtggttgctatttccgcctctggcttacattgaacccaaccatgtgtatttctctttagctttgctgaattggcctgggaatgctgcccctggaaggcattggacagaacagggacagtcctgttgcgtgaggggcatgggtatgtgctcatcaggccagctccttccatgacctgctcagagccccgtgccagcccctctgtcctctgttcctggacagttgttccatatcctccttcccagtgccccaggtgtgatattccttccacccagggaagggcatttgaaaaatattttctttcgctgtaccttactgccttgctcgctcctgccctcactcctgcgatggtttctttggcagctcagtcgtagcgtttaagtctggtcctatgaaggcctttctgttactccacggtcttgggcagtttgcgttggctctaactcttaccacagaattgcagaaattcctctctttattgagggcaccgctagcacctgccccccgaccctggttctgttttgtgaaatactgcct

SEQ ID NO: 37614 - DNA, 1149 bp, Homo sapiens
ctgatgagcctgaattcgatcaactggtcccgggtcctggtgcagatggcccatcacttctttgcttacttccagtgtacgccatccttggacacacatcccctacccctggtggaggtggttgtgccaacaggggctgccggtaaccttgcaggtaaggaatccccggggcacaaatgggctttccagaaaaatgcctgtggccccagtccttctagctgccctttggctgcaactgtgaggagaaggaaggtggagtcccagttctgaaggtgatgggaaaccccacagaagttcccaggagatttcccccctcattgcctggggcagcatcctgggatcctgctgccggcagcagagggtgatggcttaaccccacatgctcccacagcctgacctgatgtgctcgctggctcagcagagtgtggagaggcaaggtcaagggtcagccgctatggctggctggcagtgccctcaatcagaaatgtggactttgctcccagccctggccagctacccaatgtgagggcaagcggcttgactggcacatttgttcccattcctggacacaccaccctgaccccgtgtgaggtggaaagagttctggacttggggttctggccccatttctgtcctttactaactgagaggctgtggagcagtcctttagactcaacctttgagctataaaatgagattgtgtcactcatcctatctcccaggactgcctcgatgagcgaatcagattcctgtgtgcatgcaaactttgtaagggcaaagtgctgtacagctgtgtagcattaaaatcattttctctaataatcattaatatttatcaagcacttagtatgcaactggcacagttctaaatgcttttcacatatgaactcatttatccacctgtggagaggacactttccattttataatgagggaacaaaggcacagagaaaggagtcatgccctggttacagagctgggccagaagcgcgacccaggtagtctggctgcagagctggtgaggctaggggaattactgttcctgatagttccggcaatggcattggttctgatgggcaccaaggatggtctagctgagagcacggaagcatcttagtggttaggaagcttcctgacttctgccactaa

SEQ ID NO: 37615 - DNA, 607 bp, Homo sapiens
cctttttatgggatttgtgttcctctgctgcccaacctatttttctgagaggagtcttcttccctagccagaagcaaagtttctggggattggaataaatcagagccagctcactgggcccatttcagaccacatggtgctgcagtgctataatgcacaatgggatcggggctttgcttttgtgatcctgtgtcatgtggttttaggtttgaggctacccacgtcaggcgactgcagatccactgctgctgcagccctcctcctcctcctcaaaatcccccgccagcagcccctgtggcagctcaggcacctctgcttgcagtaaacatgacctttgccttccaccgccaacatgacattggcatgtcgctgctgatctgtaaacacaattgtgttttcagtcttctcactgaattttgttaccaggatcctaacaggcagcaggtctctgtttatctgtaaacagcagccccactccctggcagagaggttaggatgctgtttgtttttattactttacagtaagaggaaaaggtgatttgtgacaggcgtccacacttccccttcctatcctgcacatctgcaaagataatccctccttctttcc

SEQ ID NO: 37616 - DNA, 1878 bp, Homo sapiens
taagtgtgtctgcagtaaacagatagcgtttattttgacttatttcctcttccattaaaaacctcttttcctctaaagcagtagcgggtccttagggaatacaatgtctcctaagtgcaaaaatcaactgccaaactaatatgaaatagaatccatttttgccctaaggatggtctctgcaactccaaaagtaaaaccagccaatcaaccaacagactgaccaaccaaccttatcttcaattaaaaatatagtttaaagattcaagatttgatatcattgaccatactgagaaaacttccttattttaaaagttaaatgctcaacagcattaactcagtaagtgcaaaacacaaaacaacaacaaggcattatgattcaataatgaatcatcatgtcatatttctggattgtgattttaaaagttcacttttaaatagctgctcttcgctaattggttgcttatgagtcatacacatggctgctgacctttgtgccaatcttgtcaagtctttcaggctgcatatgtgaaagcagatggagcttttccttgagagccacagaagcaatatatgcatgcagttcaggtacagagatgacatcacccttcacaatagcattacctcaccccctaagcataggaatgagtcacccgatagtcagctgcaaatctcttggtagaaaaaaatgtaggttacggtgatgcattttcacatcccactgatttgttcatgtaagcagctatttgttctgattcgctgctctgcatctcaaacttattgtgtgacttgcttctcccttaagtcattttaaaaagtctaaatttttgtatttattttctttattgttttttccctgttcataatttaaaataaaaggtgctagcaaactcccagagtctatctgtgtaatcataaagcagtttagtaaagtaattccgtttctgtttcttaacaaaacctaagtggtacaatgaataccagtggcacttgcaatcagggacttctatctgaaattaaaatgtgaaaataactttaattttaaagtggaggaaggaatttcatatgagaaaataaaggaagtactactactaaaatgagcactaccagcattaaaaaacaaaaattcctctaaccataagaaaaaatgttttccatttgattcttccctatttttctatgcagccaacccctctccccaactgactcacacactttttggagtacattcaactttattttaactggttataaaaaatttcaagcatatagaatgtggagattaataaatccccatgtatctatcatccagttccaacaattatcaacattttgccaactgtttcatctatctccactcacctactatatacttgtttactggagtaaaatcatcaaattttaaaatttctcctattatctcaaagatctactttatgatgaggaattccaagtctacatattacatctgattcttttccctccacaaaggaacttctttcaacccctttgttatgcactgatttacttgagaaaccagattatctgtcctatagaatgtcccacagtcaggattctacatgtcatttaacttgttcctttatttcctatatttcctgaaaagtatgattagacttggagctttgatctgatgcaggttcagttgttttgacaagaagccttcgtatctggtgctacgcacttcctattacattaggggtctacaaactacagcccatgagccaaatccagcctaatgcctgttttgtaagaaaagttttattggaacacagccacacattcattcatttatgtatctgtctatgactgctttccagctgcaactaaaggccacatgatcctcaaagcctaagataagca

SEQ ID NO: 37617 - DNA, 2364 bp, Homo sapiens
tgatctcaatccttgtccgggggcactacagagttgtgtttgaaagaaaatgcagacgtcttttgctaaagtcctttctcaaaacagctgtcacgccagcacagacaggaggtgatgtgcgtaaggaaaaagagggaaaggttccttggaagagaatcaatgcccgaaaacaatgaaagaggggaagtggcgtttctttgcaaccctggaattccattctcccgcacctgcgaggatgctgctctgacccgtcggccagcaccaggccctcgggagccgagcccaggcaggtcgctggccgggggatgggagggcgtcgtggccccgcgctcgtccccaggtcgccagctgccctccgcagccgagggaagacgcccgcccgggtcccggatctccgcccccctacaccgcatcctccgcggctcgcgcgcgtaaacaagttgcctcccccgggtcggcagcccctcacctgccgcgcggtcgcaactctgtctcatcgtctggttccggaccccgaggctcctgctctcccgcggctgccggcagcgcctcagcgtcctccacagtcacctcggccgcagccacggcgcccgccgccggtactcgcgtcgctgaggtgggagcagcggccgccccgaggccgaacgccgcctccgccgtcggcgctgggaggccacgggcgcgccccgcggccaccgtccttgccgcgagccccagcagcagcagcagcagcagcagcgcccgtaccagcagccccgggctgatggcgcgctccatcagcgtcccgccccgcgcgcaggcatggaggcgcagccactgacgcctgcctctcccgccgcttggagctcccaagaaggcaaggacgtgctagggaccctactgccgccccgacggcctggacagccagccgtgttcccctggccacgtctcagcccggcctctgccgctgccacctgagtgacagcctatctcggacatcgcccattgagcaaactttccgcgcgtttgctctctcattggctgcggccgctgccactccatgttcccaggctggccttgttggggaaggtggactttccctggtggtcaacatcgcacctaccaatcaaatcgtaatttcgtcgttcgaggcccgtccctcttccggacgcaattaccaatgagaaatgcccttccccgacgtctttttacctgattggtgcgctcatcagttcccggaatacctttcctacaacagattggccatcgcggtggttggcctcgccccacaaagcgaggcgctggagaagacttgaagatcattggtggaagtggatgtccctcaaaggtctgcgctaactgcctcttgattggttggaagcggcacttactacgtggcggattctgactgtgaagaggactgtcccaagtgaagagtgggaggcaagtgccttgtgaccgggaggaggtcgaccttaaaggagctggtattgtagctcttctaaagcctagtctacttaggaaggcaaaagcgaagcagcaagaagtggccacagaagccgtgtggtccctagaagtagaagggtaaggaggatgcaggagatggtcctacttgtggccgcaacggggctcagaagtccgcttgttagagatggcagtgacctgtgacaatccagtctgcccgacacgcctcccgcctccttaggaacgggaaggagccccggcccagtgcactgacgtagttagcctaagatcacgtagctggttggtcacagaatcatgactttaattcatgtcttctgactctgacctggcacgctttgtacctcaccaaagacagtgatgaaattgcaaaagggcagagtggagaagactggaatgttcagccaaggcatttgaacttttaatgctgcaagtcaagacttcctgaagatttttgagcagatgagtgaagtgataagaaaatgcatcttcagcagtgacagcatcaacgaggaggagactggccgggaggctattacccgcatcaaaaccagtgaacattaaaaaaaattttttttttagagagagggtcttgctcttttgcccaggctggagtgcagtggcttgaccatagttctctataaccttgaattcctgcgttcaagcgatcttccttcctcagcttccggagtagctgggactacagatgcgtgccaccatgccaggccaatttttaattttgttttgtaaagatggggtttctgtgttgcccaggttggtctcaaattcctggcctcaagccatcctcccgcctcagcctcccaaagtgctgcaatttacgggcattagccaccgcacctggtccaaaaccggtgaagatttgttaaggtgttggcaatatgg

SEQ ID NO: 37618 - DNA, 1682 bp, Homo sapiens
atttcttgtttttgcattctgaagcttggttgccaagatctggagaatggatggctgttattattagtcatcagttttcagaaagatcgaaaatctttggcagagtggttatgagaaggcaaggagacagcattttaaaattccaatcttgctttatttgcaatcatcctgagtcactgtggcaagatcttggcttttttagaaagctcaacttctttatccgtttcctccttatctcttctcttcctatgacatctacatttattttaataaggtcagagcactaatgttatcaagaacatgtgtttaatccttagctttgaatgtttataggaacgtttaaccccccttcaccagtctacagttacagaatttccatttagtgaatcaaaaagtaatgcagttggtaaaaatagtttaaatcaatgctgatatagagctagaaaaattattcaaagtggatatgttattgcttatgagccagtcgtgtcatgttcatgagtataacagaaggaatacagggctgggaatcagaaaatggagaagttgagagataatcttgacagtcctttctgacacaaaggtcacatggctctacatttccacctatttgcattcctaagacctgcatatccattctttgttggcagcatggtgactggttaatactgccaattctaaagcccagtaagtcaggggtgcaccctgccagggtatggcccacattccattcaggaagataagggacttgatgatttgggagttccaggctttctgagtcactgctgtgtcctcagtccttatgcaccatctggcatatggtaggtactcctgaaatatttgacaatataaatgacaaatgaagaaatgaatgactggaacgaagagtttttgcctggacttgttctggaattgagaatatggggcctccactcttctcctagtgctgagctaaaggatttccaggaaaaaaaggagttcagtaaaggccagtactatcccacgctttaatgccttcctctaccaaccacattctgagtgagacgatcaataaagggcccagctgcagtggatggtggtcggcttgctaagtttgccccttatgtctatctacaggaacaagggcttcccctcttgctgctgtactttaggtaagatgtttatattctatcctttcccagccgtctgcagcttcctgaaatccttctttcactttgaaagcagcttccttgcagctcctgaatcccaaaagcaggaaacgtgtgcttataataagctcttcttgattggcttggaaattgtgttttcagtagagtgacagtaacctgacccttgagagaggccagtagtgactctgatgtgtttttctgaaatgcctaaggcagctgcggctgtggcctgctgctcatgggtggggttcagaggatcagatgactttatttaccagtttattccgggagaactggcagaagctggaaaagtgaggtcagagagaggctgtaaagtggagcctcccccaccttcttccctttctacctctctctttggggttgggggtagggagaactgccatttgataggaaaaattctttgttccgaaaagaaggcagaaagaaaggcagtttctatacacagttctggcctcccacattcctcagaattgttttttgtttgtttgtttg

SEQ ID NO: 37619 - DNA, 1757 bp, Homo sapiens
aaatcaaaaggaagattcaataatttatccactatcttttacacaaactttatgtcaggctaacctccacctcccaggttcaaatgattctcgtgcctcagctactcaagtagctgggattacaggtgtgtgccaccatgccctgctaatttttgtatttttagtagagacagggttcactatgttggccagactggtctcaaactcctggcctcaagtgactcgcctacctcggcctcccaaagtgctggtattacaggcatgagccatggtgcctggccagaagtcttatctttatagacctaagtatcacaggtaagataaccttaccccagtgaggatggaggaaagaatgactctgtccaacaataccttgtgattagtccagtccagatctaggttctccaaaggtggttgggtggcagccctcctgccctccccaactgctgctcctctcaggggccctcattctcaggtgctgtcaatagcagaggtatgagtcatgctcacgggatgcctgtgtctgttcccaccctggtccctgccagatcaaacatactagccacagatgcagttggccatgagtcttgcttaccttggaaccttggcccagtctccgcagcaaatccattgttaaggtacaggctgtgcgtggacacactcactggaccccatgctgagggcttattgcctcctcggcctcactgtccctgaattcccacactcctagcactcctaccagacatcacccaggagagcctcttggcgcaggtgaatcacttttcctcaatcaccctaactcattccaagcatttatttggtggcagctcttaaccaagcttaactcagcactctttatagcagaaagcagagctgtgtggttcacaaacttcttggccttggaggggtggagtattgaagaccaacaatgtgtatagttgagtgtttttattaacacgagctgaccagttcatctcctctttcctctcacccacaagtttcattcctgaatcaatgactatgtccaatccaagggtaaaatggggtgcccagaagagcaggtggtatgatcatttgaggacctgctgaagatctctctctatttatctatctatctacctctctctctcagagatcttgcctttgccaccagaattctcactaatgccccctacctggggcagccggtgtcaccatttttactcttctttaaaacttgacaccccaatagcctggcatgtcaggatgtgcccatgctgctgctagaggaggctggctgatctcgcattcacattcctattcatttcaagaatgatagtagatgcattctgagatcctgcaagacacttccaatagtcttctactcagctccagcatcagatggatggaagaggaaaactagtgggatgaggcagtgagtgtgtattgcagggcatttcaggatgaagagcactaaagagtgctcattcttttacagtttctctcattttttgaccacatctccttactactctctcatctctccctcttctgcatgctttcagggtaaagacatatagacagtagtgtccaaggagcttcgtggctgtctctggggagtcatcccttgctcttggtgaggcctaatgctgggtgactgagctgcttcttggctctaaagcagggtgtgggaaactggggtgagattctggttgggtagctgttcttagtggcagccttctttccttgttgatacttatgaggttcaggacacgcta

SEQ ID NO: 37620 - DNA, 1527 bp, Homo sapiens
tcttgaatggtttacctgtccccacattagccccatgggatctttttacaacataaacttgatcatgtccttccctctcttaagatctccagtggcttctcttcactaagaacaaaatccaaactccttaccaagacccacaagaccttccatggaccagttgctgcctgccctgacaaattcacctcctacccttcttctccttctcgttctgctctagccacactccacactgagcatttttttggttccaccaacatcttacatttcttcccattgcatggccttggcacttgctacttctgtttgcaatgccttcccctacagaactttggatatctgtctccttcccttccttcagggctcagctcaaatgtcacttcctcagagtagccttctgatgacccaaactaaagcccccccaccccaatgtattctccactttatcaccagagttttccaggctttactgactcatatttgctctggatgctgtcccaagattcaaagggcagcgttaggtctgcctgatggttagacatggtgtcctgattggcaggccccatgacaagacaggtttagtgaaaggacaggacaagatcattctgaaatccactcccatttctccttctgatactccttggactgggagaaaaagagaggctatctttcggtagagtgaccaactgtcccagattcccaaggttttataggatatggggttttcaaataaaaaactgggaaagtctcaggaaaactaggacaagttggttaccctatgatctgagatcttttgaggaagttcaacagtgaaaaaccaattgaatcacctttgaccattcaatttaattctctttagctttgtctaagtcatagaagttggataccaaagaaaaacaaatactttttgcaataccttggatgacattatgtaggaggatttgttagaagaataccttgcaagacacacacacacacacacaccctaaaggcaaaagtgacgcacatactgaacatttaatatggttttgactccaaatcctttgtacagcacctgttgtctgagcttgataaagatttgataaactgttgagctgagtttagctgagtatattatgagatcacttttaaagcttcagggccagaaaatctgaagaaattgggctgttccagaaattcctcacagcaggaaacagaaagacttcataatctaagtataggtggttaccattacctctgttgaccaaattgatcggccaatagggaggatggtctgccacctgatggtaactcataacattgctccctggtaaagcacaattcctgtgttgggtgaattaattgggcatagaattataagagctggaggcgccttagattttgactgtatttttaaccactaaaataaataaacttcacaaataatattttaaaattgtttgtgaattattgtacatgagaaatctcacaatagggtgaggtaaagggaaaagagaactaaaatctgcagaatattcatgggaacta

SEQ ID NO: 37621 - DNA, 1771 bp, Homo sapiens
cagaaaggattccactaacagccgagaaacacaaaggtcatgtgtttttagggacctccaagtggtcggtaaggttggggtcagcattagtttctttgcctgtaaaatgggggcaataagaattcctcgtcccttaactattctcaacagcaagaaaccttaaaggtagagaagaaaagataaatctgttttcacagaaagtccttgttagtcacgaaggattgcaggatcgctgcagggcacactcatatgtgcagaaccagtctccaaatgggcggagcaaggtgcagctccacctgcttcaccactaggtgcagaagaatgtccacggcagggggttctcaacttgtgaccttgggtctgcgggggtctagatggacttcagctggcgccgtgtcgcatgtgagtttcctgggctgtagtaaccccaaaagggccgcgtcgtctacagaagtgccactacttggaattcttgtccatggccacgttctcactgctgggagaaacaacagggtcaggtctaacactcctttctcggatgcatgggcgaacagaaatatccctgggcttcacctagccgtggcctaagtacacttccccagggtaaggagtcaccatactgatattcccgcggctaatggtacttcacagagcgaagtgccggagcccgtcgccggcgattgcgcattccgtcgcggagagcattatgggattggtagtccagactgaggcgcagataggggttcctcgaagccacagaactacatttcccagcaagacccgcgcagcagggcacgcagactgtgtgcgtaagcgaccagatttccgggggagccgggggcgggacttcagcggaggccggagcgaggcgtcgggatgcagcgccccgggcccttcagcaccctctacgggcgggtcttggccccgctgcccgggagggccgggggcgcggcctccggcggaggagggaacagctgggacctcccgggttcccacgtgcggctgccggggcgtgcacagtctgggacccgtggcggtgctggcaacacaagcaccagctgcggggactccaacagcatctgcccggccccctccacgatgtccaaggccgaggaggccaagaagctggcgggccgcgcggctgtggagaaccacgtgagggtgagcacttcgaaacgtggggcgcggggcgcatgtccttggcgtgatgggctactgttgcgcgttgtgggtgctgccggggcgcgcctagctcctggcagggcgggagctgagtgagagggtagagggtgtgcactttacccgagtttagacccctcttccctgctccttaaagaccttttagatgtggaatcggttgggggcgaatcttctaatacttgagctttctaaagactccttgtccagctggaacagtttgcaaagtggagcctggtgctgtctgatgtttggaatgggggctagaggcacttgccttgtggcctccttatcaataaatggaaaatggtgggctttggggctgcggagaggttttcatttctctttactgacccggaagccggcggagagttggtttgctagtgctttgaaatttcagtcgaaggaggttctgggcttggtgcgcgccggcccctgagtgtactcttggagggaagggaagacccggggcttcaaacttccttctttccatagggctgggtggactaagtctggaggatgctggtttattttttaaggcgggtctgcagagatgtttagctgttattcagtc

SEQ ID NO: 37622 - DNA, 1429 bp, Homo sapiens
cgggctttttacccgctccagctttttgccccactgccgcgcggggttttgcccgccccggctttttgcccacccccggctttttgctcccccgccgccgcggctttttgccccccccccccgccccccgcggctttttgttccccgccgccacggctttttgccggtcacggctttttgccccccccgccgccgcggctttttgaccccaacgccgcggctttctcccccacgccgccgcgcctttctgcccgccacggctttttcccccccgccgccgtggctttttgcccaacccggctttttgcccgactcggctttttaacccccccgccggtgccgcacttatttgcccgcagcggctttttgcacccccgccgccgcggctttttgtccccccgccgcgggttttttgccccccgacgcggccgcggctttttgtcccccgccgccgcggctttctgcgcgctgcggctttttgcaccccgcccccacggctttctgcccaccgcggctttttgccagacccggctttttgatcccccgccgccgcggctttttgcccccacgccaccgcggctttttgcccgctgcgggtttttaccccacgccgccgcagctttttgccggacccggctttttgctcccccgccgccgccgccgccgccccggtgccgcggttatttgcccgtcgcggctttttgccccctgctgccgcgactttttgctcgacccggctttttgccccccgacgtcgcggctttttgccccccgccgccgcggctttttcaccccctccgccgcggctttttgcccgctccggctttttgccccccgcctccacggctttctgccgccgcggctttttttgcctccgcggcttttttcccgacctttttgcccccccgccgccgtggctttttgcccgtcgcggctttttcacccccgccgccgcggctttttgtcgccgctggctttttgcccccccgcccccgcggatttttcccccctgccgacgcggctttttgcccgccccggctttttgccaccccccgcccccgggcgacgcggctttttgccccctgtcgccgcggttttttgccggacgcgggtttttgccccccgcccccaggactttctgcccgccgcggctttttgccccctgccgccgcggctttttttgcctccgcggctttttgcccgacccggctttttgcccccccggccgctgtggctttttgccgccgcggctttttgtcgccgcggctttttgcccccccgccgccatggctttttctcgccgcggctttttgcccgccccggctttttgccccccagccaccgcggcttattgaccccccgccgccgcggctttttgccccctgccgccgcggctttttgcccccctgccgccgcggctttttgcctc

SEQ ID NO: 37623 - DNA, 1441 bp, Homo sapiens
aaccccgtctctactaaaaatacaaaaattagccaggcatggtggcagacgcctgtaatcccagctactcaggaggctgaggcaggagaatcgcttgaacccgggaggcggaggttgcagtgagccgagatcgcaccattgcactccagccggggcgacagagtaagactgtctcaaaaaaacaaaaacaaaaacaaaaaaacaaaggaggagacggagacaacacggacaaaacaatgttcaagtcagattttctgccaaatgacttcaggtcaaagattgcagctaaatgagttttaaaatacacatattcgggctctagggctcttcagatttcgaaactacaaacggtggattgtggacttccagtaaaattgagcaaacagaaaatgcaaagtcaatcacggagcgtctcctagagataaacgttatgctggacgacaaacccacgtcaacatcaaatgaacccgggggtcgcacgcgccccaaaggcgatgcttgccagtttccgctcctcttcgccaagcacgctcaagcggtttcgtgaactgggaagaaccctgaagaacgacgtccagttccccctcattttacagacaagagctccgcgacccagagagggagaggacgcgcgcaaggtcacacagcggctccggcggaaggtgggggcacggcgtgaagagccgggggccgcggcttctcgcttccctccgccccgacttctgcaggccccaggcgagccccccactcccggcccgctcagagcccctgctcccggcgtcccagctctcacctgccgtcccgctacacagcacggggaggcagcccacagcgcgcaccgcggtcgccatgctggagtccgagccgcgcctcggcctccgcccagggcagccttgcccaccgcctaccgcgactgctcctcgtcaaacggcaagccttgggccgcagcggaattcctgaggcccgagtccacgcagcagcgcaggccggggtgagggactgtccggacgggccacactgcaggcggagcccggcgcgaccgcggacagccccgcgggcgcctcccgttaggacccgagggcggggcttggactggcggccgggcgtgggcggggctagctggctcctgcagcgccggagagagggcaggaccggccgggtggatttggctgctcgtgcaggagctctgaaggggtccgctggcgggggaccctcggacttacccgagctggcactgcggacccctgcgaggttcatagaagcacggaagggggccaagtgcaatgaggatccaagggatgaataagcgaggaatgtagagaaagtgttcatccccaactccagtaaagctctgagtttcattagattaagcacttaaatgacctgcatttcacatacacttgtggattcatactgattctaacgtttggtcacacatgca

SEQ ID NO: 37624 - DNA, 1960 bp, Homo sapiens
gaataagaaatagtataactagtatttgatagcacatcagagtaattacagccaataatattgtatattttaaagtaactaaaagaatataactggatcgtttgtaacacaaaggacaaatgcttgaggtgatggatatcccatttgtcctgatgagattattacttattgcatgcctgtgtcaaaatatctcaggtggcccataaatgttcacacctactgtgtacccacaaaaacttaaaaaaaacccaaaccactaataaattaacctggaaaaacgtagctttgttcctgaagtaagattttatcatattctttgtaattttcagtcttccctgagatgtagctcagtggttcctagctttagctgcacattagagtcacctgcagctcttttcaaactgtcgctccacagctgggcctcaggcatcaatgtcgaaagctctccgggtgattccagcttgcagccagggccgttccagcaactccaaggctggctggtgtgcgctgaagctgtcgggagtcggaccagctgcacagttaatacatatgtgtcctaggctcctctctccttccaacgcaaatatgtgtacaaaccctgcctggaaccgcagccctgctctcagaatcaaattcctgaaagtgggcaagcggaagcggaaataagccctctcccaacgccagctgactcgatttcgtctcggtcttccccagagctggacacgaggcaccatgatcagagagacacattccctgcggacggcgctcccatcggatactggagggacgcgacactagaggcaggcagtacttcagggtgaccataagtctcccaaacagccacaacggctcgctctcccagctaaggcgacagcgctgccattttggatcctgttcagccacgggaagccggcgtttgcacacattttcggacgtcatattaaagcgcaccggacgccgagacttctgggagatgaagtccttgcgaaggccccgcattgattgggagcgcagtcgccaggaccctgtgcgcaggcgcgttggtttcccgacctgaagaggcgccgtcttcccgggtcccgagcactctgtgccggaggtgagggttgtgggtgtgtgtcttcaaggagcggagtgagcgcagcagccgagagaggggacatgagaactttggggaggtgctgtgggagcaaaacggggtgacacgggcgaggccagcctgcagagcgtgtgtcgcgacgtctcggtgcggacggaaagttgtgcatccacccccgtgtgtgcgtgtgtcccgtggggtctgggcacccattgtatgtcggtcccggactttaaggttggaggtttggagtcttcctccgcctctcccgtttcttcttcccataatgggtgcttaatgaacgtgggtggaattgacaccaaatctaggatgctgccgctccgtctttgccagacagcgcctcagattgcctcatttagctccctgccctgggcctccgcacgagtgctggagggcttcatggaggaggtgggatttgacgtgaaagaaaaacaacaacaacaaaacaaaaaccacgaaagaagcagctaagcgttaggcagatttgagctggagatagtttttacagaaatgcaggaacagtggtagacaaggttgaagaaaaggtacgctgggagccagggcccgggactcagagaatcaggacaagactcagtaggcaaggtggcttatataggtgtgatccagggactgacacgaatgaaactatttggagacagttattctagaggtcacattcaggactagagaggggaaaggaccagtagcagagagctacttaggaatgtatggtagttttggagtaagatgttgtggacttgaattatggtggtggtagtgaaagggaaggatacagatgacactgcaaaagaagagtcaaaagggcctggtgactagatt

SEQ ID NO: 37625 - DNA, 1191 bp, Homo sapiens
gtttactggttcttcttggagacgtggccgtttttggggttgaagtgatttcgggattgaaattccatttttctttattccgaggtgcaatatggtacaaacatccctggttaaagtaaactgagatcacctctgtgttggccacgaagggccgatgcatggaggcgcagcagcgaggacaccgccgggcgcctcccctccgatggagcaccgcagcccgggaaggatcctgcgtaggtcaagggcgccgccttccgccctcacagtagcggagatgcgaaaagtcccacgccgggcggggtttggcgcggccaccgcccagagtcggcaccgagggaggagcggcccttccagagtcgctggcagggttcagccagctggtcagcgctcctccaggtcggtcaggagcgtgccgcggcaagaaacgcagccccgggagcaggtggccgcagggtcctctgggaagcggtgttgggagtgagggccgtcagccgcgccccgcggaggattctgggagtggtagttcggcctcatggttggccggcgctaggcgtccccgccggctgttagatgcctttgtcgtcgggctcggcttcctcagtgtgtggctggaggtcgaacccagggtagaggagggctgaacgcatccccttttaatctgagtgtccgggaggagggtggcgggaggacccccgggtgggggcgccaggctgcccacgcgtgcgttcccggcctcttgggggacccgagcggcggacctccggctccttcccctgtcgcggttgcctccagcgcgggccggaggaaggagtctccatggaacctgagggcagaggtgaggatttgggagtgatgcggccttggtgcccgctgcagagggagaaagggagaaaggctacctctggctggcgcaggctcaggaaggagtagcgtcacgagccccttcctactagccggtctcacttggggttttgagggatagcccgccacttccattgccctcctggtctgtagggcgctggatgcctcccttgctcaagggaaaatatcaacacatctgacaatttggcttttgataatgacttcttttttgatctcagaggagccccataaggcagtaggaaggaactatccgacccttttggaaggtagggaaagcagggatttgagaagtcacggaatttgtttaca

SEQ ID NO: 37626 - DNA, 622 bp, Homo sapiens
ccaggtgtgggtggccaggtctgtaaggcagagaatgtaagtaagaagtgggggagaaggcagggtagggtcagatctctggctcctctcagtgtggaagatgggaagccaatgccgctttcccctgaccttcccattctgcctccttacccttgggggcggctcttgtcctggctcagtgctcctggccctgcctcatctcactgtcactgtcctgagagggagtccaagctgcagagcagggctgggcagtgcaggacgacagcacaggccccagctgccagacctttgacctccagggccatctagccttacaaaagcatcctgggcatctcgccacattattaactcacaataacttgcggtcagctaatcctttatggtctttctgtttccacaaacagttgtgagtctgagaatccttgagttggccgtttcatcctccctttcgggcagtgggtatgagccccattccagtctctccagatcccttccaggcctcctcctgccatcgggaccacacactttccccatggttctgtgcagtaggtgctctgatgagactggtttccaggtgctgagcagggcaggctgtgatcagagtaggtaatgggccgccaga

SEQ ID NO: 37627 - DNA, 1049 bp, Homo sapiens
tgcaatgatgcaacccaccagtcctagtccgatttcccagttcacacgcactcatttccgtgtgcattttttgctacaatttttatcacgtgtaggttcaggcactcaacagcaccatcaagatgcaaaacagctctgtcccctcaaggcccctcctgccgccctgtgagagccacacccctctccctcctgcctgcctccccccatccttaacccctggccctctaatctgttctccatttctaaaactttgtcattttacaatgttatataaatagaatcacacagaatgtgaccttttgggttggctttttcattcagcgtaattctctggaggttcacgcaggtgtggtgtgcgccaacagtttgtttgttttacttgtccagaattccgtggtatggatgcactggagtttgtttaatcattcacccattgaagggcattgggttgcttccagtatggggccgttccaagtaaagctgccatgaacatttgtgtacatgttttcacttgaacataacttttcgtttcttcaggataaacggccaaaaataccgtggtcgggctctgtggtagcgcatgcctagtttttataggaagctgccagactgttctccagagtggctaaggcgttttccctttccaccgacaatggaggggtgattccgtttctccacatcctcaccagctttcagttgtcattatctttggttctagctgttcggacaggcacatggtggtgtctcacagcggtcctcctctgcgttgccagaatggctaatgacggcgaacatctcttcccgccgcctttgccatccacgtgtcctctctggtgaaatgtctgtgcatgtctttcacattttctaacctgatggtttgctcttttactgttgagttttgggagtgaggatctcttgggtgccaggctgtgtcacgaggaaaagcaggtcacatgaggatcaggttccactctcgcagagctgatgcgctaaaggggagagacagaaaacacaataataggatcagttcacaagggctgggtgaagaa

SEQ ID NO: 37628 - DNA, 1228 bp, Homo sapiens
acgcgccgcggctcccaccccacccaggcagcgagctctgtgcctgggaccaagcaccgtgttacgctcaacatcagctgaatgaatggccgagtgagtggcagaggctccctagatggaagctgcaattgctcaggccgtgagtccaaacaggactcgcgcttataggcgtggagcggagctggatttctcccttggctaacacagcgggaaggatgaggtgcgggccgtagccgcgctgccgcgctgagtccgtccggcggggatgcccacagtgcgccgcgcccgctggagggcagcagagggccaggctcccggctcaggtctccggcctcgcggctccaaggaccccgggctccgcccggccacgcctcgtcctcccctattttctccttccttttcgcggctttccctcctctaccagacccggcaggaagaaagccacccacaaacgaataagcatgcccttgccctgcccgtgcgtggcactccgcatccgcttagctcttccccgccgcccgaaggcgggcgtctccccctctctgcggagcaggcggcggcggctgcgagtccgtgactcgaccaaggtcacgcagcaaagtcagcgaccaagctctgttccgcagacgccagggccaaagcccacactttccctaaagccccgagtgcacgcgcgtttccagaacgggagaactttggagaccaacttctgcattttcaaagggggccagcctgggcccagtttaatctccggcggaggaccggggttgcgggaaatgcgccggggagtgagggcttcccggatcccccgccgccgactccgcgcgggccagcggcgcggggcgggccgggatcagcgcctccccgggagagcgcagccgccgccccctcctctcgggctcccggcccctccccagcccctcggcccccatcctgcgcgtgggagaaaccgccgaccgcgcggcctccaggggctggcggagcagcggtggcgacgcgccagactccgtcctgggctggcccgtgccgggcggggcggggccggctccctccgcccttcccgggcaggcgcgggggggccgcagggacgcctcccggagtggccgccgcgcctaggccaatgagcgcgcggggagcggcgatggaggctggggcggccgggagcgcccgggacccccgccgccgcgccgccgccgccgcgcccccgcgccccggcgcccgcggggct

SEQ ID NO: 37629 - DNA, 1351 bp, Homo sapiens
aggccgcagttcctgctgtcaggaaattcaagtcttgtggggacagcagaaggcagtgagaacaggccctgatggtgatggggtgatgcgggaagtgacctcagggcacaggctggagattgcacttgtggggatgcgatggatggcacatacatcccctagaactgtgaatagaataggagtgagcagaaccttccttggtgtgggacatgtctcccatgtgttcagatcactgtggagcctttgatccccatcacctgccctgactttctggcagacgcattccaggcggagttgtctagagtgagtaaggctttgacacctactgtggaggacctctctgacccagttctgccctcctccaaaggtggttctttgatctgttcattgccctcatcaaccttctgtgtcccagacaagcccccaagtccagaggcactgctgccagcccaaagtaggtactgggccctcccccagccctctggccctctcacctgggtcccagccccttgggttaggggcctaccaaaggctgggcattcctggagaggaaatcactggtcatgtgtgggccagctgcggtggcctggactttgtcccagccacctgattgccaagggaatgtgcagagtccagctccctgcaaggtgagcttcacaggggtcagagattgggaaagagagttgggggctggggagaggtggggccctgcttcacagggaaggggatctgagggccggtgacagagccagcatggccaggagtaacctcatgcctgtgtgaggccaagatggtaccaggaagaaactctccccaccccacccacacccccgccactcaaacatctcatggatctagaaggggaacatacgggtcttgttcgcctttggccagagctgagaggtcctggcgaaggggctgtgtagcgggcggggacctgtcaggaaggccctgtgtggccctggaagggagtcagcctcctcctgcacagcgccagagtgcagccatctttaagtggtggtggcagcactcagtggaccaccattgcctcccctgcccacccccacccgactgctgcctggccaccgagggccatcagtcttagcactgggctccatgccagccctgcgcacctttctgttctctctgttcctcaagcaggaaacccggcttctctggagctcaccaggcccagccatacctgcctttgctcctgctctttgacccgtgcacagagctccctctgttcagctcttgaccagctttgaacataatcaaaccctccacggataaaggatctatgtctaccccatccctctgcctgagataaaaggcccccaggaacttctct

SEQ ID NO: 37630 - DNA, 709 bp, Homo sapiens
aaaaaagagcaaggccaggcctaagccactgggtgcattgcccccctcgggtcatagtgattggtggaggggcgggcacatgacctgattatcgtcattaaggcccagggagacctttgctgggaaggctgggaaagatgctccctcctcccccatctctgaagctgcaaaggtgtgagtcctggagctgttgctgccattttgtcactgtgaggagccatggaaggaagccagcaagggaagtcctcactgagaggaaacaaaacctgggagagcatcagccctgcaactgcacctgaagccacctccttccaatcgctggactattcacttatgcgagccagtggggaggcaagactcagccagtgctgctgaagtgaaggtcacagggagggaggccctggcagggctcccagggaggggccaggcacagggccctgagcctttggggtcgtgaggccagctgtggggttacaccagggttgaaggctcttagagatatatctgctggcaggctgcctgcactggagggcctcagcctgggcacccaccccagcccagcccctcctccatgtactttcctctcccgagctctcctggctgtgtcccaacccaggaacacagcatgtgacgccaggtggcactttttcccagttttgaaaaatcactaaatacagtaaaacatccagaaactaaaaataaggcccca

SEQ ID NO: 37631 - DNA, 1416 bp, Homo sapiens
tacagagcccctcacactgttcaaagtcggcagctgaagagctgagcagtagctgtctgtggagttcagctgccactccctacacgcctgccctctgcaggggatggagtcccgtttccccacttccccacctgcgcccagcagtgcaggtgaaggcctggctgcggagagtggctgggaaacgctgcgctttggggtcaggaatgccagctccactactcaccgcctgtgtcaccctgggaaaacagctctggccccaggttctccataagtaaaacgggggcagtcatccctcccctcctcaacgacatatgtcagaatcagaagccacaaatcattctctgccacccagcacgctgccttggtctcctagaccactttccccaacaatgggaaaggcgccaggcccagaacaaggccgagaccggatgaggccagcgaagcgcccagggacaaaccttcgggcagcgcccactctcgagttcaggcaagtgcagggtccctccgagagagagcgtctccagagaacgcggctggcgcctggctgaacccgtagcctgaagacccgccggagccgcccgccccacgatgggcccgcccctccgggattggcgccctgctagtggccattgcctgtgacgtcacaggatcgcgcccgcttttctctcgggtgatccggccgagtggccctgggttagcagctgctgcatttccccggctggctgcggtcactggtggcagtgctcaggcgcccgccgcccttgaccttcggccccgcgagctctaaccctacagcgcaggaagatcggccgccgcggccaggtaggacgagcctggctgggtctaggccagaagggtgtccgtggcgccggtctcccgcggagcgcagaactagtaccggatccccagccgcttctgaccacacagacggggcggacctgtgtgagcactcactaactgtcggggctggagctgggcatatggggaaactgggggaccggcacgggttccaggcgagtggacggtgggatggaatccgacgtgcacacccatgtctcaggctttgtttgatggaggctactgtttccacctcatgtcgccgcccctttgcttatggactcttgcagagttggattgagctcgggctgtgtgatatagtggttgttgcagaagccccagggccactttctgactagtaccttgggcacctgacatcatccctttgagtctcagtgtcctcttctttaaagtgagggcgctctacctgaggagattgctgtaaggttggaatgaacctgcatgtgtgtgtcatgtgggaagggaacagtcagtggggcctggggttctcttggagagctggtaaccagcctcgtccctgaggcaacagccagagggcgcctgtagtttccccacgca

SEQ ID NO: 37632 - DNA, 1388 bp, Homo sapiens
ctgagcatctgtttcatgactttcgtggctgttttactaaagaggctatcctggcccagtcagggcacgctatcatcaccaactacttgttgaactacgttcagggtcttgatcttgaaggagggacgcgttcgggttgaaagccgccatgcagggtcgaacggatcgcatcggagccctgagctagcaggggcgggtgtccacgcgagggcccccgccgtgggatgtcgccagaggagtggccacttatacgtccgcctcatgcagaggctcctggagcgcccctgccgggagctgttggggaaaaagtaccagcttgagctgccgccgctccccgagaggccgcaaaagcccgagggctccaagaactgcctgcagaggctcagggactgcgagctgtccgcgctgacgccgcgctccatgcggggcccagaggaccggggcgccctggaccacatggtcaggatgaccacgagcctctaacagccccgccggggccctcgcgtgccagactatgtgccccgagagcaccttgtgctgggggaagaggcggctggcggtgcaggaaatcctggcggcgcaggaaattccggcggcgcggcgaggggtggggggaggcaggcgcaggaggcgggcgaagaggagggcgcagagtagcataagccgctcggcctagcggccgctggctccacaaaggcctccccaagagccggcctcccacctgcccggctgccggggtcctggggctccgccgcccccgccccgcggacggccagcctcctgcccctgcagtgcctgcagcagagcagcttggggcccagcgtggtggtgcccaggtccgcctcagcaaggtgcccgcgcccaccttccaacccaaaaggccggcgcggaagggcagcataaaggcagcggccacctgcggatacccaagtggccttacaaggtggccaaggaggagaaacgggaggcggaggaggccgagaagaggcgccaggccaaggtgcaggagaagcgcccgccgccctggaagaagaggacgtgagagtccgcgggtgcttggcacggggtttgagggctgggtgaggccgcggggctgggcaccatggcagctctcgggaccaccgggcagcgcgcgtttccacgctgtctctctaggatgctcccagaaaggggctgggggagccacatcgattcgcttcacaccagccaccctagcaatcagtacacctagggggcatgttccctaaaaggctccctttagagaacctcaattaagatttttttaaagattaatttattaggccaggcgcggtggctcacgcctgtaatcccagcactttgggaggccgaggcgggcggatcacctgaggttaggagtttgagactag

SEQ ID NO: 37633 - DNA, 603 bp, Homo sapiens
ctttacttgttcatttaaattgtttctcctggaaaaaaactccttaaagaaagaaactgtgtgacccatctttgtttctcctgtagccttgcatatagcatgttcttgataaaggatcctctgactgagtgaatggctggagattttttggaagcctgtgatgaagagtaaccaggtcattgacacagagggcagagtgactttcagaccagaggagactctcatgtggttagcgacacttaaggaaagatcagatgtatgtggagagggagaaggatttgtattgaatagaaataacgagagctgcagtctaagattttttctagaaaaaaaaaaaaactttccaaatcccatttagaaaaactgcgacatggtaccgccttgagcgggaaaaataggttttacagattaggacaaggtcaggcaaacaaacagcccaaagccatgccatcagctcgaagcagctctgccccagcccactgctcttcctgggcctggctcacccctgcacgtgggacaaatccttaccctgctacaaagaaaccagcatgggaatccaaagtccactatgtctcagaaaaaggaagagaaatgtgagaatac

SEQ ID NO: 37634 - DNA, 2594 bp, Homo sapiens
tcactagtgttcaaagcttcccgagggaggccaacagcaaagcagaaagcactggagtgtgcttgtgttgacagctgccggatcagagggcctggcttgggatcacaggctgcgggggtggtgaagcagtgtgcagattctgaagcctggcactcccacgtggggccccaggagccaggttcacccacacagaaactcaagggaggctgcgtttcctaaccaacagccttcaccttgtggtagattcttttcctgtgggtcatctctttcaattctcccaagactgcaaagagagattattgttcccattttctagatcagaaaactgaggctcagaagagtgaagtagcctgcttaaggacgcatgtcttcatcataatagttggtatgcaggttcccctccctgtctccatcacacacacacacacacacacacacacacacacacacacacacacacacacacacacactgcaatgactgtctcctaggctggctaacagtggaccaagatgagcccatccttatctgcatcctgcatcagtccacggagagcaggcagcagggataaggatggggaagacagggtcaaggagtcagactacaggcacccctgtggctcagggcatagagggggctcaggacacatggagcacccccttgcccacgttccttttccgggtctgcctctctaccagacctctctccttcctcctttttcgcatcctctttggattcattttctcctctcatttccccttctctgcttcctgattcaccctttgctatcttttccagtcttttccgttcctctcttcagtctctccctctccctttgcttcctttccctggactcccctggctccttctccctttctcatcctccctcgtgttttcctgtttgtctcttcgatctccttccctccttttccgtttgtctctccccggcctgcgcccctccccgccgctcgcaccctccctcgcgctactccctctgcgcagccaaccctccctccgccccctcgggcccgccctcccctcgccagtcttccccgttctctctccgctctcgctctccgtggtttagtgcttgccctcctgcttctgacaaactatttgtaggaaaatgagatttggtccgcgctggacggctcctctgggaagcaggcgtgggggtcgggtgtcggaggccccgtgcgtccccccaccccgtaccagagcccacggcgcttacggagctctttaagataaatgagtaaaattaagagactcgccgggggaagaaaacactggaagggagcgagcgagagcggatggtacttggtttcctcccagaaatgcatccacgtgcgccccactggggcctcccccatctgctgcagactccagggaacttcctcccctcaaagacaaacttccagccctggagcatgtttcttccttccctgggatgtggcgctgaaaagggtagaaacctctagtaaggcacaagcaacagattgggggtggagcagcaggtctctttggaggtggcctggaagaaacctgacagagaggatgggaaggggagaaacagaagagtgtgacgaggtgggtgtccaagggcagtgggacaggctgtccgggtgggagagtggacttgaggaagtagctgcaggcccagactacttcagccacaccctgatcccctgggaccctcagggcacagaaggcagtgctggctccaacctcagtccaaggagctgtggaagcctcagaggcccttggcagaggtgagccctcatttctcacctcaaaggcagggattgaatccttgtcacccagacaaggattttctcttgtctgggtggcagaactataagttgtcagagggcaagtagtgggtctttggtttttctgcagtaccacagggctagcttaccttaggccataagtattatttgttgagatgcgtgaatacaagaatgtcttaaaagctctaggctcaattttcaactcccacagatgtgcaatgaaaacaattttccagactactttttttccctcttattttgaaagcaatacacttattttttccaacaaacattgagacaacagagataagcaacatagaagaaaataataatcacctgttattctactataaacaatttggaatttatcctaaatctcaaaatatacatgtattaaaacacaaggtcatattataaacattgttttgacctgctttatttcattcgatgttaaattgcaaatacctttttatatcatattaaatatttcttctaaaactaaattttaagttgttacagtgttttattataggtttgtatgctctgtggatgatttttttttaacaaggcacatatttttgttcattttgattgtttctaaatttttgctattatcaagatttcctaacttttgcattattcagagttttgttttttttttgacagagtcttgcactgttgcccaggctggagtgcagtggtgcgatctcctgtcactgcaagctctacctcctgggttcacgccattctcctgcctcagcctcctgagtagctgggaccacaggcgcctgccaccacacc

SEQ ID NO: 37635 - DNA, 1284 bp, Homo sapiens
agtgggggaaaatcaaaggatgcagaaaagaaaataagacaaggaaattctggctgtgactaaatcctaggaacaggtgctcagacctaaagagctgctgccaaccagaggtcttggtggactgactgatggcaaggtgtccgacttctcagggtctcttgaaatccctttcttttggtgccacacagaggctctaagggaggaggtccttgttctgacagcctgagggtgggctttgaactctccctccccttcatcatctcatccttgggagcaacccaggattcctggactctcagagggtaaagccaagattcccaggtgggacctctcatctttggggaatgcctgtcccacacactgagcctgaacttagagcacacaactgtagggtgtcatgagttgatctaaggtatgagcatctgccagggttattttattatctcccctggcctgaatgattactctctgtatttaaacaaacataaaaaggtaaaacaaaaataacaaaacaatgtattctcagtcttgcatctcaccagtctgtaggttcagataatgacatctgaatcatagctttgagccttgctacctttgagctcccacctgcttcacagtgtcttactgagttccctcctcccaaatattcttggactacccatggggtagttgctgcagtctgagctaccatttgatgctggcttctgttactttggcctgtaacctctgctattgagcaagagtctttgtttgtcccaggattgccacgataaggggctcgctctgtcatcccaaattgctgccaactggctccgccactaatgttcataggaagtgagaacattgtgtccccagtgcttcattgaggaagatctcaatatgtggttgtctgtatctcaaagggtcacaatttagtgggacaaaatttagtcaatttacaaacacacagacgtttcttctctttgtgactttatgatagctgaattgggacaagttcctaatgttactcaaatgctgcacacagagccaccatcactctaagccccagtcctgctgctgcgtctggttcaccttggcagactttcttacttttggtgaattatctcacacggttcagatcattcctttctgcaaatgggcttccataaggaaacacgaagtagctcaccagacatgtctagttatgtgcaaactcctatagaatcagtttaagatttttttgagcgatatctcatttctgctgtaatcaagggatcacacagatttttgagagaaaggtatttc

SEQ ID NO: 37636 - DNA, 1093 bp, Homo sapiens
cccaccccctcccccaacacacacacgtataaaagtgtgtgtatatgggcaaactgctcgcatccccaaatggcaggctctttccctagaggcgcccagtccgcggcggggagagagggaggttcgggggaggggggtcaatactcacctggtcgtagacaggagccctggagtcggagcggctggttttgtcccctgttggcggcagcgcaggggcgggggcctcagagcacagatcgggacagcagccctggaagccgtcgaagcctcctgcaaggaggggaagagcacgatcagcagggaaagccgggctggagtcgggtggggcgggccaagggcggccggcttgctcacctcgcaggaagtacacggcagtgggccccgcgcgggtctcgtgcagcagcgcggccagcagcacatgagccgggctgtcgggccggagctccgccaccgaggcactgccctcgtccagcaccacggcccgcgccagctccccgcggaccaggcgcgtccgcagcgcgcggtcgggcagcaggcaggcgagaacggcggcaggagggccgcgcgcgcggcgccgcagcagcgcgttccaaggcactggccgcgcggcgcgcacgtggcgccggcagaaggccaggaaggggcggcagtccagcagcagcgtgcgttccgcctcccgcggatcccgcagcagcgtgcccagcgccgcgcactccagctcgcgcgccgcctccagccccatggccaccggtgcctcttcctcttcctttcggtctttcccgcgtcccgggctctcgtggcggtggcgctgcccgagcggtcgactccgggcgccctccgcggcggcccgggttaagtacccgtgggccggcctccggggcaccatacaagggcagagcaggaaggcgctggcgcccgcgcccgcccccgcccctcacgtggggcgcagtctgggctgacctggagacttcggggcgggggggaggttgagggggaaggcagggcgcggggaccaacacaccgggaggaggcggggaccagcgactaagggaagggaaggtgttacccggagtcggagggactagcacccctc

SEQ ID NO: 37637 - DNA, 2650 bp, Homo sapiens
aggcaaaatacctatcacgctttgatagcttaacttttttgtgaataaggttgtttgtggttattattttaagttgcatttataaaagttatctttcctgctaggaaaagtattcccagttcttaagatagacttgcatttacccacaattcatagtgtggcacaaatagctgcctggcatctgggtgttacacctcccacacaggccatggtataaactttattggggtatttccatttttaacctaacaaaaaatgtggaataacaggttgtttccctgtggaggaaatatcaagaataaacaggcgagtgtggaatctgcggagggaggggattgtctctggttcccgaaatcacggcaaagtactttctgtgcagggagggcacagtttaagaatatctgttgcaaagaaaatacagacacaaggtaaaccaaaaaccaaagcaaagtttccccatgacattacctggaaactacagtctcagaactacagattaacaaacgtaatcaatggtactgggcttttcacagttttgatgacgacagcatgacttcagagtctaatgggacactattcccaaagttctagttaacgtcgcaaaaatctgacctaattcttacaggttcaaatgtctgggctgctggtttgtgtaacctggacaaaatcgcttccaggctctcaattttgccacgagtcacgatgacagagggctctcctggcttttctcacaggcctgagtcccatctggattgaagtcattttgcaaatagcagcccaccacccttaggccaaatttaaaatttgttttgaatttgcacctttctggttgtgttaaagattacagattacatgaacaagggcctccatgccttcgctatctaattgatttctacagtgttgtttctttactgtcttgctcgccccactcaaagtctccctcctacacaccagcctacacactttcagttctattttataacccgacaaatgcaaattgacacacagagacaaataacaacgcggtttgctgaagcaggttcaatcgactgtattgccaattaaaagaccaccgggtaaacaagggccaacgaccacagggcaggccccagggttcacaagcccccccaccccacggcccagaaagagctcgccgcagcgcccacctctgcaactcctcctcctggatcctctcctcgtcccaaacgaagacgccggctaacgccgccatcaaggcagaggcatggccaggacggccgtgcagccggcgccagaggcggccgaggagaacgcggcgtgagctctcggagtagaggcggccgtagagctgcgcgatctgctgcgcgcgccgcacgcgcaggcccgtgacgaagcggcactgattggccagaagcgccagcaggcccccgccccgcgtccccgccagccaggcggccagcagcctccgcgggagcatgccgcctcccgcagggcccgccgcgagcttccggggcccaaggaaccagtccggaggggcgcaggcggtggtcgcagcgtccccctaaatggccggccacgaacccgtctcacggtcccgcggccaggagccgccgctcatctgtctctgcagccaccgctgaggaagagtctcctctgaggggagagtcggtcatggcagcagacgccgggatggctccgcgactgctacaccaggcactcctgggcccgggcagcagaccagtcagccctgtggctcctcggcgacctccagcgggcgcccggggccgggatgcagggcgcgcggacagaaacgagacagacagctcaggcccagcagcacgcaagctcccgcgccttccgcgactgccacacgcgcggcgcgcgcgcaccctactttttctccgccacctgggccgtgattgggcgcgacctgggctcctgggtgctcattggcgccgtgaagtgctcgtcaccgccccctcctgccccttcatgcatgcgcggaggccgcctgctagcaaggtaggtggctcggcggcgagagccgtcaagggcgcattggagagtgaccctcggacccggctgccgccgtcgccgccatcttccggccgtcccagccccgccccgcggagaaacctggccaggttcctgttagaatcctgccaggtgttaacttgttttaagaggccggcacgctggcccccttctttattagagtgcagggtgggggcggggctccgcatgtctctgcgggggctgggggctcccagtgataaccgccattgcagaattaaaactgagacagtgaaagagatctgacctaaccaattccatcttgcttctgtccttgttcattcctgagcttaggtgaactaattttgggaggaacttagtttatagtttaaaataaagaggataacagccctttcccaaaacaaatcttcttatctgggaactagactgcctttgtaggactaataagttagccataagattggaaattatggtttaggagtcatgcagctggaggctacgatattgtgatccccctaaactgctcttaagatcagtgcttgagatattttgctgaccccgcactggttggatcctggcaccacccagatggataaactggctcatctgaccttgtggcccccacccaggaaccaac

SEQ ID NO: 37638 - DNA, 481 bp, Homo sapiens
aaccaaatcaggaaaatcgtgacagaaaaatgacaggcagccattgtcatttccattcttattcgtggtttctggtttttttggttttgttttcccttttaatttttttctagaaaaaaaaacacaacccggggaatttatatgacaaactatcagtgtcaggatggcagagggaaagagaaagaagaggaaggccaaagacatggggagtgaataaaaagtgggttccggatcgtgcggaacagtccacagggtcatttacaggtcctcaggagatgaccagtccctttggcatgcaggtccagtgcctggtcttctggtctgcctgctcagacacccaagggcagagagagctggccacaagtaaacctgccaatgacaaactcaggacttaacagaaagacttagttcagttccttggctttgtgctcaggcatcacatagcaggcagcctgcagcctttcttgcctgagagaagagt

SEQ ID NO: 37639 - DNA, 2790 bp, Homo sapiens
cccctacactgtgctgctcggaatcactaagtaccagactcggccactgtatttttccctggagataatcaatcaattcctaaagagttgtgcgtgaatgaggggtcagaagctaacaggaatactgttggagccatcctcagagccagctgctaagctcactagaggaacagcttgaagcaatgaaatctctctaagaagcaaaaaaggtttgggtcattaagtcctcacatggggaattattgggcaaaacctgccaggcatggtgtctaagctcctgcagcattgcaaccatcagagcctgctctaggaagtggtcaggacaccggaaaggcttgggacctggcgccgaatcctagctctagcagagactgtgttactttgagcaagtcccttgagtgcgctggacctctgttctctcatctatcaaatgaaaacaataacatctgccccacccaccaccagggcatgctgggtcagctgacaccgtgcccatgaaagagcagccacctgtgctgttattaaccagaggctgtttcagctgggccagtgtgtcacctcagcatgcctttccttcttctaccaagacttccttgaccacacgtcagcccgtgtggaccaaggcctactaaagccagactaagggcctaccctacaagtatgacaatatgatagagagaagagacttttgacctaaaactccaataggttttgtttcaatataactgcctttccccactccaaagctgtgagtaaaccctcagggttagtgagaaaaccaaatatgaaattccctttgggtaacgttaacagataccccaggggcctgccccatgtaacaggtgggttttcctcagagggtctcagagcacaccggaagaacaggcagttatcctagacaggcttggagcccagctcagagactcttctggagtcagtatctcaatgtctttctctcctcccttcctagacgtcggtacagcagggaaggcaacaagcacctgctcccatgaggggattgctaaagaaaacccctgaaggttatgtatgtaggattttattcgagagagaaatggcatgcaacgcaggaccctaacttgaaattcaagccagtggtgcagtccacgatgccctggctagacacagaacacctcctaccttccagctgtgctctggcctgttgattttggtaaacactgcttggcggtgccctctagtcatcagggaagtaggcagctgtaataggatcccatggaactgactttgctcaaggtcactggtgagtcaccaggctagatttgttttgaaggtcctgcctcttcctgtctatctgcccattgctctaaccactcctgacccaaacagtctgcaggcagaaaggcttaaaaggacttctgtcccaccccgcctcccttcttgctggagtccctctgaattagagacacttccccaatgccccaatccctctttatgcatctgtgcaacctgctcagcgtctcctcactgtgacctttttagcttccagacaggcctgcgacacaggcctcttaacagagccctctagtgcccagccaggttatcccacagacaccaacaggccccgcagggcctggcagtgtcagctgccccagtcaccacctatcaggcacacaggctctccctggaaggcccttgatcttccagtggctgctgtcaattgtgattcacctgacttctactccccaacttcctcattctccaaagatgcttcctggggctgttgccagtgccctttggtggccacacttgagaggcagaaaggctcagaagaaatgactatctgcggcccctctttctggggtctagaggtgtgagtctatctccacccagggccaggttgagagctgtgtgagaagcaggcaccgcttgcaggggcagtggagaaaacccaggatgaggtcttttttttttttttttaaaggaagggtctcactctgtcacccaggctggagtgcagaggcacgacgatagttcactgcagccttgaactcctggactcaagtgatcctgctggcctcctgcttcagcctcccaaagtgctgagattacaggagtgaaccaccacacccagcccaggatgggttctttggagccagctttcattggctaaagcctctgaagctttgtgaatgacaatgggagagtggctttgccctgggatcaccaactaaagcctcaacactgaggcgatgaagttatgacaaaaagcacagctttggctgggcttatgataaaactcaactagaataggaaagtgataagcctcaggcagctttgatgggaaataaactcggagctcactaaggtgttgcagtaagagtatggactttggagtcaatgtccactcagattagctgagcaaactacctagcttccctgagctgggaccttttgaagtggggctgaaacagtacctaccaaataaagatgctgtttaggaggaaaaaagcaggcatggggtgtgcttagcataatgtcaaaatgtggcactcaggcaggggctgagaaatggtaaggctgctccagggcctgctggctgcccaactcccatcaccggcagagacctggcagggtctgttctccctctggaagtatctacatgtggccaggagcggtggctcatgcctgtaatctcagcactttaggaagccaaggtgggtggatcacctgaggtcaggagtttgagatcagcctggtcaacaaggtgaaacctcatctctacgaaaagtacaaaaattagctgggcatggt

SEQ ID NO: 37640 - DNA, 2088 bp, Homo sapiens
ttttccgtatttcacaggatccttagaagaggccagctaactgtgatacctagcacccttatcttttctcgatacacagcgtccttcctccagcagaatcctaaaatagcagcagtccggattaacatggctgtgaggagtaggtgcttagctgaataacatcagaattaatgaggggccggaccccaaacagagccacctggtgggcatgaacaccaggcagttatggggccgtttccttcaaccaagtgtctggtccctggctatctctgcttcagccagaacacattctgtcccccaccgaggctttaagggccagcgcgcagcaccctcacctttcagcaggtccgggtgcacatagcccaacacgtcggagacccccagctcctggcgcgaacaggtgcctccgtggatgtgcaaccaggcgggctcggcgagggcagtgcacagcgccgtgatagacagggcgccaggcagggccgaggccaggctacgctccggctgcttgggcagagcgctgcctcccgggctcctccgccggcgcccgccgggcagccctgcgcctccgggggcgtacatgcccggggccgcccgccgtcgctccgcagtcgctgctggtcgccgccgacctccgcggggcgcgcagagcctgacagtccggtggaggatagcaacgctccgggttcgctgcaggtgaagccgggactgggctgtcagggttgacaccagaggataggggggtgggacccggggctgacggagacggggagggctgcgggaattcggggggcggagacaggagactccggaatgggactgcgggacgacaaccgaagagggccaggggccagatggggtctgggcagactcgagtggggggcggagggatcggggatcggctactgctagagcaaagacccggagtcagggtctcagccagaggatgccgaggggcggaggaccgggctgggccgcggggatcggggacccgtgatctgggaccggcggtttggggtgcgacctgtgcgcagaaaagaccctccccacgccgcccactgttcctcaccagtcagcaggccccagggctgggatggtgctgctcagcccagtcacgggcttctcggctgccgggggccgagcgttcccaggccccaatcccgcaacgcccggacagacccggggccgatgcacttccggcttcctcctcctctgcctccgcctcctccggctccccgccccgtcccccgcgcgcgtcacagcctgggcgcgccgccggctctgcgcagggcctcacgggactggtagttcgaggcggtcccgcgatgctttccctgccgaggtgaggggagcgactacaactcccagagggtatggcggccgcagcagtgggcagttgagtttccggggcgacccaggtcctccggcggaagcgggagcctctgtcggccgcggaagcctggagtgggcggtacgcagacgcgcgcggtgagacccgctgtctgctcagcggactctgcccgcccccacctccccctgcgtcgggccgacatgaaggactcgctggtgctgctgggccgtgtcccggcgcacccggactcccgctgctggttcctggcctggaaccccgcggggaccctgctggcctcgtgcggcggcgaccggagaatccgcatctggggcacggagggtaaggcccagcctggttgcgcggccctcagcgctgagggctcagcctgcgcgtagtgcaggcgctcagcctgcaggggaggctgaacctgttcctggcggagggagagtgggatgttagccacgccgagaagggctttacaggcaaagaagtctgcgactgttgggaggaaaaacgtcagcagacaagctgaaatgtcaagggaattgtgttagctgcagaggcaggaaaatgggaaaagagaggtgttaggaaagtggccttcagagtaacttgcgactggatggtcacattttatcccgagggcattggggaaccaatagcaattttagatcagatttgttttagaaagatgcctccagaggttgggcgcggtggctcacgcctgtaatcctagcagt

SEQ ID NO: 37641 - DNA, 1942 bp, Homo sapiens
aaaaatgctgctcgaatgttaaagggaagagactttggatctgaaggaaaaaatagtatccccttggcactcacttggctcttctttcctcctgcatctgcggtttggtccgttgagccttgtctcccatacgggtgccctccagcttcccaacaagggacagcacctctcctgtgggttcatcccggcgggtccggtcaatgagagaacggtcagcttggagcacaagattcgagttctgaaaagatcaaaacattattgaagctttgacatgagcagggccaattcctactatcatagttaccccagctgatggaaaaaatcgtagtaactagttgcttatcatcactaatcgtaataaaaatatattttccttaagaattgcatagtataacgctgtgcagaagcgtacagctgaataagtcttatgcgctgtcgaatcagctaaacaattcttgttcctaacagcgcccatcataacccacacctgtgaaaagtagtgagtgggttgggagtgacgtgtggaagggggagggcttagcgttgaaggtactcgagaaactcctcctagagagatcttagcgctccccagaccccagtaggttattcacgtcatcgtataacccccaccttcaccccgattccatttccccttcgttttcgtggctctcctgtaggccttcagactgaaactccctttttcagcctccccctccccattggactcctgagcctggaatccttccccaagaccaaacgcaccgccttgtactcgtattgcagactacgggcggttacatccgccatggccgcggctgctcggaggcttcagaccaccacgcctccctaccgcaagctgcaaacggccgcagatctctgctcccgccgcgccggaacgacgcaggaaagacgcactggggaaggaaaagaaacgggttcccttccgcttccgggtcgcgccccagaagtgcggggcggggcgtgtctggggcgtgtccctgccgtgtgcgcgcggctttccgcacccttctgagcgggatatgtgggcctggtgcgtctgggtccccgaatccctagacccccgcactctggttctggccgcccgctggcactaaggacccagggcccgtgctctccccgacctcagtctccagcccccggcacccctcacatcataacgaatgcacggctgcttagcccctgtcctgtcccaagacctttccttccggttccttcctctttggcaacagtcccatgaggtaggcaggaaaagaggggccgaaaaccccatttccgtttgaggtaactaaagtacccagcgagcaaggtgacttgcgcgtgtgtctgtgtttgtgtgttttaatgattggcgccttgctttgggtttctcttctgtgttcaacaattgaaaaagaaagctactatcccccaccaatcccacctaaacctgtgcccccaagaccctcgttttcacccagctgaacgaacagggccggggcccccatttgctcccacttgtcggtaacattctatggtagggccctccctgccgcccagggaaaccggtgaaggcagggccaaatccttggtgactatgacttaatttcttccccagctacaaagtcttctctgtcccacattccccaccacttctcgccagtagaatggcgccttatggctgaaggtgacctccctcctcacttagagcatgtttgcttttgagaagatgaatgaacaggaggatgggtgttaagccaaaggaattcatcctcaatagcagtcccctagaccagatttgttctgtagtggtatcgtgtttggctcactgttggctccttctttaaaaattgggataatttcatgcaaactctggctctcccccatcagttgagatactagaaaatcagccacatgacacccacactgctgcatggcatgacct

SEQ ID NO: 37642 - DNA, 1027 bp, Homo sapiens
tacagtaaagggccatttaatttttgcaccaaccttaaaagagaaggacttttgtcgtcatgtttgccagattaggaagctgaggctcagggaggttcggaaccttgccggaccgagttggcaggaggcgagacgaggctctaagccctgctcccagagctctttctcccccatcaagctgcgtccacgcggttaggaagcatcgcttgggccctgggggatgggcagcggcaaaggagagctttttcctgtccgctcggggaagagcgcccaggggaaaggggttgtgggtcccggcacgcggcactacgctccccgtcccccgcctcgtctttcttcggctcggcccgtggggcttccgccgccctgggcttgcagctgggactcatttccagatcggtcgaaggcaggtcttccttctagggaccggtagctcagaggaaggaccggcggcaaccgctgccctgtccgaaagtgcgtctcctttttcattccgaaatgaaattcgtagttggttaaaacggggcttgccagcacgatttacaaacaagacgagcgctcgctgcaatcacatgaggagaaaaggaaaggactaattcataatgcggtcactagagcctcgatgtgcccaggggagcgcccgccgagcgccagcgggaacagcgcatcgcggacgctgcagggagtgtggcccctccgcaggcgcgtgcacaggctcgcattctggagggcagcgcatctcagccgtgcgcccggtccttgccaccccaaactccggcagcgaacaacgcgtcctgggggcggccccgcggctgctcttggaggcggcggaaaaggcgcgtccgcggcttgggggacggaggcggggtcgggggcgaagggaggcggctcctggggcccagaaagctggcgaggatgaggaacctccccccacctccactcccagctctccgaaccgtgaagacactgccccggcgcaaagcgtctctagcggtcctaggcgcacctgtttctgtagaaaacgtgt

SEQ ID NO: 37643 - DNA, 1118 bp, Homo sapiens
tgatctgcagttcagcactgactcacctcgcttattggcctccccctccagcaggtgaggtgctcctgggctgtttctccttgaggcagccgccttgatatgggctgcgtaggtccaggcatctccacaaaacttcatgggtctaggttttgaaaatttaaactatcatggattcttgccagagttgtttgtttttgttttccatttaggagtattgacatttcagctactatccccaagtttacaaacacgcagattacggaacattactccacctgtatcaaactgtccactgaaaatgtgagtatttgctggtttattattgaagacgtaatcccttgatcacaggggaaatccagctatcttgtttctgtagataatgcacaatcaatgatgataattctctggtgagtcatcttagtgctggtggttttactgtttactctggacccgtggtgcacctcctgagaggctgccagctatctgctgtgtatctagaaaggcagcatggcgcatgagttaatagtagagttctggagctagcctgagttggaggctacatgcttctaagctgtgtgtgagccacccaaccattttgcttccgtgtcctctggagaatgggggtagtgcctgcctcatgaagttgtttggagggtgagtccctttgtgtgcagtgcttagagcagggcctgcacacactgagcattcaggaattttgtgccgtcattccctagccttgaacatgaggacatgcctgtgaggatttggctcttgacaagtgtttttgggaagagagatcagtgacaatatgtgggtattcctatgtaaagacttagcttcctctgttaaaagcagcattatttacatgagcctaggctataaataacaatcctttctgcaattttctgttttcagaaaatcactaccaagaatgcttttggtttgcacttgattgattttatgtcagagattcttaaacagaaagacaccgaaccaaccaactttaaagtaagaaggatgtccactttctcttgcatctgaattaaatgatgatgatttctactacttggcataacacagttgaatgctgcaaatacatgagagacttctcatttaga

SEQ ID NO: 37644 - DNA, 903 bp, Homo sapiens
gtctaataaaaaaatctccaccagctctttttggagagtcagtcaggaaattctctctctctctctccctctctctctctctgtctctctctctttctgtcgctctctctgcctttctctcactgtctttctgtctctctctgtctctgtccttctgtctctttctctgtctttctgtctttttctctgtctctgtctctctctgtctctcactctctgtctctccgtcactctctctctctgtctctctatcactctctctctctctctctctctctctctcctctctagtgctgcctcccttatgtccaggcataagctctaatgaagcctcgtctgggaaaactcttttggcctcatgtcaatttcttttacatccagagccaacagcctgtggtgggtaatcgtcccttctctaattacttgcccagcatctaccaagcaggccctgtcagcgggagtcctgcctgcactcctcccggggcggatgctctcctcttggctagcccagacaggtgcccttgggctccccgccaggcaggcactgacctcccgcggtccagccacctcctgctctcagggatgccccagccggatctcagcccagcaatcccgggtctccagcctgccgctccaccctgggctgcctcctgactgttaacacatgacattgacagggactgtctctgttatgggttgaatgtttgtgttcccccaaaggaaacgagaatatttcaccccaaaatatacctctttggcttattttgagatggctattcagagaggctgcaaacagaagaaggactttgaaaagctgcctttcgtgagggagagttgcacctggagagaaaatctatgttagtgaaatcaatgcccaggctttccctgaggaccctgtaagca

SEQ ID NO: 37645 - DNA, 998 bp, Homo sapiens
ttgacacttggggattattacagttcaaggtgagatttgggtggggacaagccatatcaaggtgcatgccaccacacacacctaactttattttattttttagagataggattggcccaggctggtctcaaactcctgggcttaagcaatcctcctgcctcagcctctggaagtgctaggattacagacatgagccacagtgctaggcccaagcatctttgattggaagctgcctgctgtactggaagtcccgctctttgtttgcagtggagatgattcattcattctctgactcctaggcctggctctgggctggtaaattcttcctcactttgtttcaagtggggatcccctccccaaatcctgggctggaagattcttccctggctcttcatgaaggctctctgttctctatttggccctgctcctcccacgggaatctttcagtccactgaaacttccttcttgaaccctggctaactatatgctccaccagctctgtccatcttcttagtgcatgagctggctgaggataatttagaacttgattggtctttctgggaaacttaagacctccccaaaacggcccctctaagacctccgtcttcccattatttcctcctccttcctcctccgaccacctttgatcttcccttcagctcccttgaatcctttgatgtgtcccctttaaactcctccccctcctgcctctgtccacccccaccagacatttctctttcccagcccttggctccctcagccatttcagtccccctgccccaatcaggggctctcaggggactcatgttatcccaaaagcaacttcctgaagctgaaaagaaaaaagctgattggaattagattaaatttttatccactcacgtgggctgtgaggacattcaggcagcccccagcatctccttagtaacatgcttgaaatgtgatccacaggctccaagggattacataacagggcagaaggaaatcttaaaaatctc

SEQ ID NO: 37646 - DNA, 1222 bp, Homo sapiens
gcgtctgtccttcttcatggtccaggacacacagtcctcctgtacaaataactcacaatctgcctgtgcccagctatcaccagacccttgcctgacagaaaaatgcaagctagctcactgcaaccttggtattatcagtattgcacgcagccctctccatcacaagcaccatcctattaaatccccagcagtcagctcctctcttgctgatctgcctgttgctttcttgcaatgtattttcctattttcgctaaaaaatttgcctttctgtaccgacaattgtcttggtaaattcttttaccacccacaccaccagccccagctagttgctatccatgacatttgggtggcccatatgaagactctctcttcttacaggaaaccctctcccctctctctttcccaacccagggccctcggtggacagcgtctaagcatggagacaactgaaggtctctggccgaagttacactctggtgggactgaaaggtgtccatatgaaagtgtctaactgccaccacccatcaggtgagggacctaagtttattttctcttttcagtcttccagcagccggctgctagtatccctctagcaactaacagcaaccagctggggctgctactcagtgttgcctaaaggccaaagggtgaacagggttggctgccttgcctgtgatggaggaaaattccctcttctctcttttctggccaaaggtccctaatccctatgtatgacatgactggcagcggtagctcattcagagtgacttcacacacattttgggtgactcatatcctctctttctcactctaaattctcctgtggagtcacccagtcatcttgctctggatgttgctaaatcaggtgatcccagacagcctcagaatggtacatctttctttacccaccccctctcctggactggcaccaagccaagttgttcctttaccctttttcctcatacctgggttaatcacccagcataacagcatacctggactggccatctggcataaggcaccagcatgaagaggtcttttctaatgggtgggacacccctttagaaagtgcacctgaggccaggcgaggtggctcacacctgtaatctcagcattttgggaggccgaggcaagcagatcacgatgtcaggagttcaagtccagtctgaccaacatggtgaaaccccatctctactaaagatacaaaaaattagctgagcgc

SEQ ID NO: 37647 - DNA, 1422 bp, Homo sapiens
cacacaaagcctctgcgcctcagtttcctggctataaaatgagaatgtcaccccctgctgtgcccctcgcacttcacacagatctgagagaaacaagctggctgcgccagaaaaccacagaggcaccacctctagattcctgtggagatcctaccacccattccttcaaaggaagggactggggagcagggcagctggcagcagaggctaatctgctgtgcaggtctgtggaggaagggaccgtgcgcggttctcttccctctgcctccaggcttaggagtcatcccccacacgcgggacccccagtccccactgtagacttcttccaagtggaatttcttcaacagttgatcagcaggggggtcagggcgtgcagtgcaggggtgggggtgggggttgcgagaggagtgccatcagggagtaatgctggcgaggcctcatgaggacagcacgctggggccctgtgtgcgatgggcgccaggggcaggtgacatggtggacccggtctcccccttccctctccaattgatctaacagaaagcctgatgtgaaagtctggacgagggaattttcccatatctgcaggaaagccccgtagcaggtccctggagccagcccgggcaggcctccgcttacaggacgctaaagatccctggttgcagttctactttctttttactgcgtgtattctgcccctgtgataatgattcattacacgcttcctccattgttttactccagtgacctcacgtcaagggaacctgtgatctcaggcttctaggaaagcgaaacttagccgcagcctgcctctctcccagcctgccttacaagcactgtgagttgctggctggccgaggccctggcagatcagacctcctgcagccccagggatggcacgggcaccgccactcacgcagccggtagagcgctcctagggcaggcccatctcgcttccctctcgcctctcccccccgcttttgcttgggccaatccgacctcctcacctcctcgtagctcccccagcacaccttgcctttgccatctctgcatgtgccgcgcctgctgtctggaagaccggcatccattcccctctgccttccaaactctccctgtaggaccagctcaaaaggcatctcctcttcagctgttcctgctgccagggctaatatcgtcttcctcttttttccccactagcgcttctttgtctattttggagaggttttgttttggataactttttaattgagatgtaactcacattatcataatattcgtcttttttaaatgcacagttcaatggtttttagtattctattcacaaagttgtgcaactatcagcataattaatttcaggatattttcctcaccctaaaaagaaactccgtaccctttagttgtcactcctcatttctgcctctcccc

SEQ ID NO: 37648 - DNA, 1573 bp, Homo sapiens
ggtgtggtggcgggcgcctgtagtcccagctactcgggaggctgaggcaggagaatggcgtgaacccaggaggcagagcttgcagtgagctgagatcacgccactgcactccagcctgggcaacagagcgagactccgtctcaaaaaaaaaaaaaaaaaaaaaaagaccaggtcctctatctcccccacatatggctcttccactacgggacacctgtggcctcaggtgaggcttgcagagaacctttgtgcctatcactcttttgatttgtgcgtttgattttataaagatccctgtaagccagcaggcatcgtccctggcctggagatgtagaaactgaggcccagggacaaagtgacttacccaaggtcccatagctcaacttggcagaactgggaccccaccagccccctaaactttacactgaccacatctctactccagcaatgacacagagcaccctctgctacctgtacccccagtccagagaccaagctccaggcttgcaggaggtctacttactggcctcgaagcagagctgggcacccatcagtctaaggtcctcgggcacaggtccccaggtctagaaggaactgcctggagaaggccagtggacaggttaccaaagattcagcaggtctgctttttatgggccagagatcacgttacaaagttgatgattaattcaatggtgctgtcatgtgttactatatccaggggatttcccagtgatttctcctgactcgcagactgacctgctggagctggccggcctaagagaaggaaacaggaatgggggtctggcctgggtaggtcttacggtagccttctttctcacttctgaccaatctcaagctggctgtgcattgtaatggtccaagcatgttaataaatacctatgtccagccccgcccccaaagactccggttccactggcctagggtggaacccaggcatcaggagtttacagagcaacgcagatgattctaatgtacagccaggatggagattcactgcagcagaccctggcacacagaaggaactcaatctgtgttgctgaagcagattgaattgcatttgctgtatcccaggacctgggaaattgtgcacctccaacagaaaggaggggtaaagcagacagaagaggagaggagctgatggtccctccagcctttctcactggaatttctgggaattccactttcccagaactgccacaaaatgcaaatagccctacagacagtcactgcaaaggtctagctcccaatgtgttagcactggaaaagaagccaaaggtattctagcccgtcaatatttatttcggttaggaaaactgaggatcatggagggaaggtggcttactctaacctagtgctcctcactcacattgcaacatactctcaaatctcctggggatcttgttaaaatgcagattgactcagaaagcctgaggccctacctgagataagtggacccgacttttttttttgagacagggtctcactgtcattcaggctagagtgcagtggtgtgatcatggctcactacaacctcaaactcccaagctcaatt

SEQ ID NO: 37649 - DNA, 622 bp, Homo sapiens
tggagaccgtctgccttgcgcccctccacggccactcgccgcggagactccgccccttggaagtgccccctaattaggaatatctcctccactggactgcgcgggcacagagcaggagatttgtagataggcctaacttgctgctgagtgtcaggttgaggctgccccgcagtagatgtcacccgccagccccgctgcaaacctttgctctgagaggggcgggcccgtgccctcaagcgcggggcggtctccgctgtgcagagactgaggcggcccctgctggcggcggtcagtactgcaggaggcgccgagggcccgggagcccccaaagccgggaggggcgccccagagggaggtgagcggcgccgaggctcactataccgcagctcccacacacccgtctcccagggtgggtggtagcctcactgggacccctctgttgcagtcggcctctcttgcccagagccccatcactacacatgtcttcacgcaggttatctctcaagactcaacccgcgctccgggaagagcctggcacacgaggaagccactgctgccccgcgcccactccagcgtgcggcccagcgggaccgggagcccagcccaacctggggcactgtca

SEQ ID NO: 37650 - DNA, 482 bp, Homo sapiens
gaggggagacactgaagaaaaaaaaaacaaaacagctgcccccaggagggacaacgattctcccaagagcaggcagtcccgaacttctcccagcaccctgaacaatgaggtaaacggaggtgtggcgggccgctccccctacccctgctagctggatgccagcccccaccgcaagcccagggctcagctggcagggccccgcatgcagcccccgccgggggcagggctgagtggcagagcgcaacagccgtgcccccttcctggccgtgctcctgcctgggcctctggagcctgcctctccccctctgatgtaagctgatattttaattctcttacaaggaatggtgtttagagaaatgacttaaccagattactcatcgtctctaatgacttggcccgactccagcgctattcctagacgtgacgcttgaggcttcgattctttctctctttccttttgctcctttttttttttttttaaa

SEQ ID NO: 37651 - DNA, 1317 bp, Homo sapiens
caggggctccagtctgaaagcctagaggcgaggggcgcgcactacaattcccagaggtccccggactcaagggcggtccccgccccccgccttctccgcgcgacgaagccgggcttaccaatgggagcccggagtggggcgagcaggggcgggacggggcgggactgcggggaggtggccggcgggccgcgccgcgagccagtatctcagagagcgcggggtccggacagccgcgcgctgagggtctcggggcgggcgccgcgggacctctccgggccatgggtaagcggctctgcggcgcggcccggacaggggctcggcggccctgcagggaggttcaaggtgccggcgccgggtcccctccagccctcgtggcagtcggtgcgctgtgtggggcggagaggggcccggggtgggtttcggggcgcgggccaaggggagcgagcccggcccgcggcttcagcgctccccggccggcgcggaaggggtgaggctgggcgtccgcgcgagcttcgagaaaaggaaagacaaaaagttttggcggccaggggcttcccgggcgtttatctcgaaactcttttcgccgtctcttgcctgaaatatgccgagcccggtacggctctgtcgtcccacttcctgctgcggtttccacctcgagctgggctcagctaatttgttgtgacagctgtcggcagccgcccctccgccccgtgacatcccgcaggtttcagaaccgcggcgccgccgggcacagactccgggtccagagcgcgcggccctttcctctgcggccgccgtttcctgaaaggggctgcgcgggtgtgaagaacttgctcaatgcgctttgtaggatccactgttcctctttcggccgcgggctgcgccgatggtccggggagcccggcttctcgccccctgccccttccttctcttcccttttctcttttcctctcctgtctctccgcccacccgccgcagccccacaggagaggggtcgcttccctggttgctctcctctcctgtcccttgtgtgtccccttgtcttccctcggtctgcagaagggacggggtggcggctggggagcgtcaggggaagagggcaagagcgtgggctacgagcttgcaggcgatgcccggcttcgcgctcggcgggagctgcgggccaacccgggcccgcgctccgtccctccgcggtgtctaggggtcgcccgggctggggtcgcgtcaccctccgcccagcgccggcgtggtggggcttgcgcggtgcaggacccccgagggcccagggggtcccaaggcgctgcgggtccagtgtcc

SEQ ID NO: 37652 - DNA, 2213 bp, Homo sapiens
ctggacagaggaagagccaggatccccagtcctacccctgcgtccctgcctccctgccttccccgctggtactctgctgctcaaagcagcttttcagccttccccatctgttctgcccgccccgtgttgggaaaactgcttgggccagcagtccatggccctaggagagagaatcggctggccgctgctggagccgcagagcagctgccaaactgcagtccttcgagtccctgcgagggcggccggagctgcaaggaccccgccgccagggggcgcccgccggccgcgccctcacgaggtgcccttgcaggtgaccgggcgccgcctctggaagaacgtgtacgacgagctggggggcagcccaggcagcaccagcgcggccacgtgcacgcgccgccactacgagaggtacggcggggcgggcccgggtgctggacgccgcctaccctgcggggctttggccgaccttgccgggagggccgggtggactctgcccggagcgggcagggtatgcgccgtcctcagagctgcgggagcccaggctggctgggcgcactcactgagggagctgaagctttgggaccaggagagggccttcctcggcgccggcggggaagggggctcagaggaggctacagaggcccagggaggggatgggcgccggcctcctgggggacatgcgtggttcctcaccaggctggtcctgccatacgtgcggcacctgaagggggaggatgacaagccgctgcccacctccaagcccaggaaacagtacaagatggctaaggagaacaggggggatgatggggccaccgagaggccgaagaaggccaaggaggagcggcgcatggaccaggtaggcctgcggctggctggggccaccctgtcccttgcctcttgtagccccctaccccacaactccctgtggccgcggagctgtctgctcagaatacacagaacctgcacccagggcgggacttgcaaggttccaggttctccacagatggttgtgcaagtggactctgaactccagcctgcgcccacccaccaggcacctgaggctgtgtccactcagaggacagggcacctttggaaaattctgtacagaggactgcaggggctggcgggggacctgggcaggcctgaaagtgccacctcttgctcctcaggtcaggatgtggggctgaggcagtcctgaggcaagactttctctcattccagatgatgccaggaaagaccaaagcagatgctgctgacccagcaccacttcccagccaggagccccccaggaacagcacagaacagcagggcctggcctctgggtcttctgtgtcctttgtgggtgccagcggctgtcctgaggcctacaagcggctcctatccagcttctactgcaaggggacacacggcatcatgtcaccactggccaaaaagaagctcctggcccaggtgagcaaggtggaggccttgcagtgccaggaggagggctgccgccatggggcagagccccaggcgtccccagctgttcacctcccagagagtccccagagccccaaagggctgactgagaactccaggcaccggctgacccctcaggagggattgcaggccccaggtggcagcctcagagaggaggcgcaggcaggcccctgcccggcagcccccatcttcaagggctgcttctacacccaccccaccgaggtgctgaagcctgtcagccagcaccccagggacttcttctctagacttaaagatggggtgctattggggcctcctggcaaagaggggctgtcagtgaaagagccccagctggtgtggggcggagacgctaaccgcccttctgcgttccataaaggtggctccagaaagggcatcctctaccccaagcccaaagcctgctgggtgtcccccatggccaaggtcccagccgagagccccacgctcccgcccaccttccccagtagcccaggcctgggcagcaagcgcagcctggaggaagagggtgctgcccacagtgggaagagactgcgggccgtgtctccctttcttaaggaggcggatgccaagaagtgtggggccaaacctgcagggtccggcctggtctcctgccttctgggcccagccctggggcctgtgcccccagaggcctacaggggcaccatgctgcactgcccgctgaacttcactggcaccccgggccccttgaagggcca

SEQ ID NO: 37653 - DNA, 2850 bp, Homo sapiens
aaaaatgtgggtatcaggcttctctttaaaaaccagaatttttggccaggcgctatgtctcacgcctgtaatcccagcactttgggaggccgaggcaggcagatcacctgaggtcaggagttcaagaccagcctggccaacatggtgaaaccccgtctctactaaaaatacaaaaattagccgggcgtggtggcaggcgcctgtaatcccagctactccggaggctgaggcaggagaatcacttgaacctgggaggcagaggttgcagtgagccaagatcgtgccatgcactccagcctgggcgacagagtgagactgtcaaaaaaaaaaaaggaagaaagaaaagaaagaaatcagcacgtgctacacatcagggctccccccgcccccagccaggggtcaatcacctaacagcacgcactgccgactcagctccaactgccttctctccctggggtcccgcttcaggatgcattgtgaggggagaatcttatctgaggcctctgcttacccggtaacctctgaggctgttacctcagaggaggtgtgtcttccgtagaccaagacagtagctgctgtgctgggtgacgccaggtgcatacccttctcttggcctccattccctcacctgtgatatggaaatgagtcactcctacctcaagagtggtgggcatttagtgaaagtgctctgtaaactaaagttctgatgaatgtggatcatcacctccttccccaccagcagttctgctctaccagcctgaccgccccgtgccctgccctttacctcactgctttttaacattcccgctctcccgcctggcttctgactcacagtcacactgaactttggatcctgtcagcatctgagtcaagtatggcaagtcacttccccccaggtatcaactttgactgatggtggctgtctgcagcttggggctgactcagtgtgacagtgatgcaattgattagtaatgtctgccaaggccacaggcagcggtgcggaggctcaccagccacttagttgccatctctgtctacatgcatgatgatctaatcgtgcctgatgatggtctgtctgatgtaggtcctgacctcactgccacatcttagccacagctcctgtgcagagctgcctagtttctctcccacatgagcaagggttgtggaggagcaggtcttggattgggcagtcaaatccttggccttgagctacagagtttgatccctgggtagtcgtcagggaggctgcctcttgggagaaacccaggtaggctgtccaaaaaccagaaaggtctttccacagcagctggagagggatgatctaggatccacaccaataggatagagtataagtggaacaattctggtgtcatttgtagagtaactgcagtgcttttgagctggggcctgtggccttgagtatggggataatcagtagatgataaattttttaaatcatttcaaggccgggcacggtggcccacgcctgtaatcccagcactttgggaggccgaggtgagcagattgcctgaggtcaggagtttgagaccagcctggccaatatggcaaaaccccgtctccattaaaaatacaaaatttagttgggcatggtggtaggtgctatcagctacttgggaagctgaggcaggagaatcgcttgaacttgggaggcagaagttgcagtgagccaagatcacgccactacactccagcccgggtgacagggcgagactctgtctcaggaaaaaaaaaaaaaaaaatcatttcaaagtccagctctgatcagctcacccctctgcataaacctggtccatgaccttccactgacctcaagttaaaacccaaatgcctcagtctggaaggctcttcatgggctctgcttccttccccaggctcctggctcacctccaccccaccctccaccacccacagcacccaaacccctgcagtttctgtcttggctgatccctgaggccccactccagctccctggcctgcctggctgtccctcaactatagaaggacatgccactcctttcacccgaaaaacatgtcactgctcccacttttccttccagcctctcagaagtttcttcctccaggaagccttcctggcttaggtacccatcccgtgtgcccctacagcatccagtgcttctccacccgccactgtggacccatgacttcctgcatccctgccttcccagactgtcaactccctgagggcaattcacgattcccgttcaccaccaaccccaagttatacctagccccatacgacaggggtcccttcctttcttttcttttcacctaaattattttggtacatgtgcccactagcaacattcagaaacatccctggtattcctccgcgtcccagtggttcccagagggctcctgcatgctcaggaggcagccccaggttctttcccactgcatttgcccagatcgctctggccctggggaggagcggctcttcccaccaataacctccgccacattcccatctggctttggagaagggagagaacccgcccttgattcttccttcagaaatacagccacaccccgtcccttcccctccccaccctgcacacacccatgagaccgagcagggacatttaataaggttttactaaagtttctggaaagcagcagaagggactcaaaacaaggacacaacccacaactgcttcttgaagctgcctcaaccccagctatgcagcacatgccacacccagttcctgacgtgggtccgcatcagagtctagacctccagacaccacctgcagctccaggaggctccacacgttggaactcactactcagagaaaggaggaaggctcgttt

SEQ ID NO: 37654 - DNA, 1439 bp, Homo sapiens
gaatttgaatctgaatctcgtctgtccagtgcatgggcagccccttcaatcagccagtcagctggtcttaaacttcccaataatgaagcccatgtcctcagtccttcctggcagactcacctgtgagctggagggcagcacctgggaagaggactcctcggatggggctgctcctgagcccatagggctcagtgtagtgatcctgctcggctggccacgaagtgtcagagtaatggtggtggggaccttcaagcctgagataaagagagagaagcagaatttttgagtcacactctccaccttctactgaggctttcctttcctggagagcttctcccccacataacacagtcccttggcctcctccccagctgggtcatctatgccctatcagtcaatctgaaaggcaacaggaaacagcctgtgttctctcaacctctctgggggatgggtccacacagctgaatccaaaggtcaatgccaggaccctgtgggactggtttcaacatcataccttgcccacatgagatgggaaggtcctgggggaaagatcccagatctgggagtccccacagttctcatgagagactcacctgatgcttggttagagatctgagccaggccagggaggctgcttgccaacttagcgaggcccccattggtcagcagctggtggatggctgtgggcttcccaccaggagtggcacccaaggaggagagagtggtggccacaggaatggtacggacaatggtgctggtgcccgtggtgatggcacccaggctctgcatgggggtgggcaacttcacactggtggcctgtgggacacacaagcccaggtgatcagaagctgtcgcccaacagcaacattcgagcttggagggcccacagcatattattaaaggctaacatgtattgagtgcctactacatgcaaggtactcttccaggcattttgcatatattatttcattcttataacaactctatgagggaggtactattattacctcattttatagacaaagaaacaaaaacagagtggtcaagaaacttgcccaaggtcacacagtaaatgatagaccttaacttttgtaagttccctgctatgtagctagaaggctgtttgtccttgatccactgactccagacctagtttccctgccaaaaccaactaagctgaggaggcctcctccctacacctgcccagcccagcagatggcagatgtgcacctgtggggctggtcctggggagggatttgctggaaggccagaggtcttgctgctgatatcctgcaagctgaagctgaggccttggaggaggctgctggctgatgtggcccctaagagaggacatagcaggaatcagtagagactcaatcacttgcactatcccgagagcagccacatccatccaccctcaccaccaactaaaacaccag

SEQ ID NO: 37655 - DNA, 4807 bp, Homo sapiens
agtagggagagttggggttattttttccttctattttctaaacttcctgaaatattctgtacctttaattgaagccaacaaaaaaagaacaaaatataggatgctttgaacgatggcacagcttcctctcatattctgcctgcctggtcctcattcagatggactcatgccaactttacccacatgtacagactcatgtcttctttgctccgggcatctctcaaaataaagcaaaggctgacatgctggtgaatggccaccaaagggcaatgctgtgtacctgagagagctcagttctcatttaacgtaccaagagaaactcaccttctggagcacttccttgggaaggagcacaaggccctccagctgtgtccccttgggagataagggacaccttgatcttcggtcgtttggaggtcttactgccaggaaggggactcgagggatggtgtcgcttcagctgaaccctaagatcctctttctctccttcctctggtggttctgatgaaatgggaactaagacatggagctgagttgagatcctccacaatccaaaaaatcccaacagacactcagtcaataccagcaccaacacagccatgtgtagaatgtagaacacacaggataaccactctacgtacagggccacccctcaaaggagactgcccatgcttcaggaccacttcactcaggccctgtccgtgggggaccccactttgcccttcttagaggatggcacccttctcatccctcatcctgcactggaatcggaagagaaggggccctgagttggtaggaattaaaagacagaagacatcctgaccctgcctagccaaggccaatggcaacaacaacaaaaatagaggattcaacagaatgagtaaacagtccttctcagactcaaaaaatgtgatcatcttcctgtctgaagccctccccacatcatcacacagttggagacatcaaacattctatgagaactcatggaggagcaggtcatccagtcctctctaaaaagtagagttttccaaaggctctcaagagtcccaccctgccctaagagcccacagttgaggatccacttgccaaatggaggcaatgaagaggagtgtcaccaggactaaaagctggctatgagtagctactaggagagagagtacctcaaccaggcaacctcacggctcccacccaaaagtaacagggcaacactggcccatgtcacaacctagtccccaggtcatgtgtactagtacagacaaaggccatctgttcacacatgggcttccacttccactgaatcaaacaggctcatcatgtatacagccaagctttttggactcttaggttatctttcaagcttcctcaaagattccctcctctttaaacccagaagtccaccctagtcctcttgtagcacagggaagcaaagactggtgtggggaggaaggtagcagtcacatgaggagggaggaggggtcctggcatgaggcaacagtcaggacataaccagctagaaggattgcttaggggacaaatgcactggctaaaatcagagtaggaaggagggtgtaggggaaaggagtttcaggttctatgctgatatgtggctggtaggcttgtagccaccagataaacacaggacaggaggcagggagaaaaacacacaaggaaactgagactcaggcaatgccacagacatacaaaaaagcagcagagccaagaccgtagtgaaagaaagaaccacactaagagacaaaaaagaaaacaccatgagaagcaaacaaaagaatggaaaaagggcaaagactacagagtaagcaaaaggggtcagcaaaacaaaagaatacaaagaaagagagagaaaagaacaggaggaaaccaaactgaggcagatgagaggcagagatggaaaataaataaggggttgaggagcagaatgtagtggacgagcaggcaagaaagagtaatactcaccaaagagacaggaggaggtgccaggaggaagagctttcctcaccagcatattttgtttcagaaaagcagcaaactgtgctggaatgaatcagaaagaattacagaatcacagccagccagagaagggagaaaaagagagggaataagaaaaaaggttgtagaaaatggccaataggggctccttctgaaattactgcatggcaacctgactctgccacggagtcagtctgtagaagcatctaaaactgaatagtactatctgcctcatggggccatgccaaaactcaacaaactacagcaatgcgagtgccatgaagaaggcatggcacacagcaaggactccatatatgttcgctattagtattccccgtttgcccatcagctctgctaagccagggttctaaagctgctactctcccccatgacaccctagatccccatttcaaacccagctcgccaatcagccttccaaactccttagattctcaactaatcaccctctgcagaagcacagcagaccaccagctctgtcttcttcagaagtgtaaagacacactgtccacacgggacttggctctggccaccactcatgaagatccatggcagagcatccgcgcagacccttggggcctggcctcatttctcaactcctcccatccactcacacttctactccttgttagtactactcttataagcaaactcacaagaggtctgggtttcggttctgatcatttggctccactaaaagaaacacagggaaagtaaacagatgagcctcctatcccctccacgtctgtctgccagacagccagctctggctgctgcctcttcccaggcacccctattcctgaaaagctcaggtgacatgctcctggacacatcgttaaacaccaatgcccaagaggccttacctcaaggccacccaactggatcaatgtgggggaagggggacagaaccactgtttcttctttccctacccaatgaactctcccttttctatagctcctttcatagcactcgcagctcaccaaactcttactttcgactataggaatacttcccagcttcatctgaaacctgtatgcagagaaccctgataaacttcactgaaagtctcagtgtgagaatcttaacgcttcaagggtcaaacaaagaaagggcatgatgccaggtgagttaccctagaatctgattaataaaatcaatcacccaatacatatgattggagagccccgactggaggagtggctggcaaggtagaaaaaagtttaggccaatatacatgttcataaagcctagcctccccagaacagcaagacaaagctataactagtgatcacaaagccccactaactcagaggccttggcattcatttcaataattaattttgaattttgcctgcacagaaatgtgagaaagggcgcctctcacatccccctgaaaaaagccatagatatcaatactgtgcaactgccatgtgacatgaactacagaagacagacccaagaggagccactggccaagtgcctataccttgagcttgtttgtgggtcagcacagcttctgtccgctgcacatgtctcttcagcagctgagaacttccaatctgactggacttctgggcagaggtcactgtggtcactttggtcttgggactggaggtggggctgctggacacactggagagatcctgagtaaggtgagaaggtcaagagatgagacaatgttactaggatctgaccatgagtcagcatgtccctctggaattccccttgtaggaactcacaggcccatggcactaataagacagaggcatccccaggaaattaaggaaccaactctgtggtgctgattccccagcaaaagcgctccctccctgctcacactacctctgagcctgagggtgaggcgggcagcttggcagctggggaggcaggtcgactgccccgctcagggacttcaaaggccaagtctctgcgggccacatcgcggggcttcttcttcttctcagcatcctgatcccgaggttcagagcccatgtgaccctcagcacgagtgagcactccagtcagaaagtccacaatctcatcctagtgtagagaggagccaaccaaggccttttagtcctcatctggagaatgggaacctctcatatactttccaactaaaacagattctccctcagctctggcatccgcatgtgccagtccttccccactcaaacaaggtctggcgcaaatcccaggcttctgagcaactgtggttcaagaagaccagcaagtgcctctgtcagggggagctctggggtggtcacattccaccacttttccaacactctcccccgtgatgctttgcttacattaattcaccactctcatttttcttttctttgcttatgactgagacctaccagaggccccagtggaggccttagagccaaagagaccactaccaataagaccaaacctaaaaggctacagaaaggcaagcctagctgagaaaagcacacaaaacaactgtttacctgaatacatctgtccaccatgctctgagtcaacccttctgatttcttctttgctttgcttattctaagaaacaaaaaggatgacatgtttacttcttacacattgcacggcatcctatgaaaataagaacgtatttcttttctgggttgtttattttctagccccagaaggagggccatgttagccttaggcaggtaatgcaacctctccgaacctgtttccgtgtctgcaaaatggggaatcataacatcccattcatggagttgtggggattaaacaaaataacatatgtaaagaaaccaa

SEQ ID NO: 37656 - DNA, 4102 bp, Homo sapiens
caggcacagatggacaaaagtcaaggatgcaagtaaggaaggaggaggatgtaaaaagccagtaggaaggataggaccaaaccgcaaaggataagaccaaactgcaaaggatcttcatgttctttgtaactcactctagaactgtgagccactcaacactttgaggcaaaggatgtgaccctgggttaagctttatctaacagtagtatatagctttgaaaccaaaaagccttgacacttgcttcctgtcaacaagggataaaaaatcaatactgacttttccacttggagctgggaagaccaagcttccctggcccttccagcattgcattcactctcaacagccaattaaaaggctaaggtctataccttctctgccctctttatcataatggatctaatagtgaaagtagctgggtgaagagcatgatcccatccacctgcgctttcacatccagcaggcactttaaaagtaaaacaatcctataatcatttatatcctttgggaaacaaccaaagtatttgttgtgaatctaaatatagtcatgggaaaataagagtccgatggcagaggaaccactgcggagagcacagcccagagaggatgttgccttgagtctgaggcccttgctgactggtgtaccagcgagccttccactattccagtcaacccacaccgtggcccagcagcatgggaggaaaacacccaactatgcatgctatggagtccccccagtggtctgccatgctcataatatccgacatgcacccaggagatgtccagtcagtaacttaaatagggcagcagtacaaattcctccttaaagggaaattatgctagccacagtgagtgaagcagggtcaccagagaactgagaccctggccactaccaacactcatctcctacagtgtattcaccaatgttacacttttaccgtaggtagaatgctgaggagaacatatgtgaagatgcctacgatacttctgggccaccactctctgtctgccaggatccagtctgggccccacactctacctgcccaccactcacctcccgggtccagggtttctactacaggggagcagtacaggggaaagtctgggactcccttttcatttgtctctttcttcactagaaaatacactccaccagagaagggaccagttttgttttgctcaccccagtacctgacacacgtagggcccaaaataagtattagttaaacaaaaaaactagtgtcaaatttcctaccatgaatatcattaatgtatctagtcctgagttttatttcagcactaaaccagtcttctaacaaacttggcaccctttaacttaaaaacacataagaaacaatgagtctgcaagttttggggatgtggctgagggaacgtgttggccaggcaacttacagcagcaagatgagccagcttcctgtgaagcagaaagtaaaactattaaaaaaaaaaaaaaaagtgtcaaaaactgaatcatgcttatgcctgtaatcccagcaatttgggaggacaagatgggaggactgcttgaggccaggaattcaagacgagcctatagcaagaccgtctctacaaaaaaattaaaaatttagctgggtgtggcagggcacggcagctcacgcctgtaatcccagcactttgggaggccgaggcgggcggatcacgaggtcaggagatcgagacatggtgaaaccctatctctactaaaaatacaaaaaaaattagctgggcggggtggcacacgcctgtagtctcagctactcaggaggctgaggcagaattgcttcaacccaggaggcagaagttgcagtgagccgagatcgtgccactgcattccagcctgggcgacagagtgagactttgtctcaaaaaaaaaaaaaaaaaaaatttctttgctgggtgtggtggtagcacacacctctagtcccagtacttgggaggctgaggcagacggattgcttgagcccaggagttcgaagttatagcaagcaatgatagtgccactgcactccagcctgagtgagagaggaagatcctgtctccaaagaaaaaaaaaaaaggcctcagacaacttggattgatttggttctttctcttctctctctctctctttcttagagacagggactccctctgtcacccaggctggagtgcagtggtgggactgaactcactacagcctcctcccaccagcctcctaactagctgggactacagacgtgtgccaccatgcctggctaattattttatttttagtagagacaaggtcttgctatgttgctcaggctggtctcaaactcctgagctaaagcgatcctcctgcctcagcctcccgaagtgctaggataataggcatgagctactatgcccggccgtgaggccattttgtattggagcaaaacaccccaaatatttcaagaacctatgagggtactacttaaataactgttaatattagtaataataattactgtgggctcactgcttactatgtgcccaattttgtgttaagccccctacctgaattaactaatttaattttcataaaaatcctagatagctattattatcagccacattttagagatgagacaccagtccaagcttacacagctaatcagtaacaaagctgagatcagccaggcaatctgcctccagcatccgcattctaccacattgacgatagcctgatgcaatcactggaatcaccaagaaaaacagtttaactttgtgcaatactaagtaagaaagcagggaactataatgatatgtttgtactgaattataaaagtctaagtgttgctactaaaggctcatgccctggggagcagaattgaaggcatcacggcacgttcctgctctgcaatctcccagtgctccgagcaccaagggtctgcttctgtcacctttctcaacaaactcttccctggtaaacccttcgtctccttcatgataattcaattcagccatgactcaaaccacaagctgcaaggctaggaaggctaaatgtatactctggttttcaggccccatacctcatcctggagccagcagggctgaaaacgtttacaccagacacaaatgtgaaatgataccctgtctcccaattttagtaccaaacccattagttttggccatgcactccagaccgaccagataattactttgcctaaccccacatcctgaacccacaggggaggatggctatccctaggacagggcagaccccaatcacagccttaccttccccttcagcgtctgcaaagcatccaggtaggctgccagcatgggcagactcaaggtctccacaagggtggtgtgcagccactggatcagcttggtatcccagctcacacttgccagagcctgccgcactctccttgcacacttgtccacagcaacacggcgcagcactggctcattacaagcctgaaggatgtaagtggaagtaataaaacatgaggactacctggttaacaagcagggggacaagtcagtcagccagtgaggcctgaactacgaagagcccactgtgggcggattgctggtgtcttaccccttcgttggccaagcgggcaagccggtcagactgcagggctttgaggatcttgttgaatagcttgttctgggccattgtccagccagtcctataagggaaactctgaggaattatagtcaaaccctggggacgctccccatgtatgtacaccatataaagaagattatgccatagttttatgtctctgctagggaacagtaaaacgaagtagcttagtctaagaccactgacctaaaacacaagacctagattcttctggtctcaatcctaccaaatcaaatcgtcacagcacacacttgtattaataatacacacatacacacaataatatacacagtacaagtcaagactagtcatgaaaaaagtctttcaggctagcaaagctaattacttacttagtagctaaaattattccaatcataaataaacgcacagcaccactgaacagacgacatatttgaatttcataagttttatatttcacacaaaaaggcagacaggatcagcaagcattttaatgtactaaa

SEQ ID NO: 37657 - DNA, 2626 bp, Homo sapiens
atctataaagacaaaagtcaattagtgcttcctagggaccagagaagctgggaggaaacgggaagtaactgtttatgggtaagaggtttctttttaggatgatgaaaatgtttatcaaattgatagtggtgatgaatatacaactctgactatactaaaaaccaatgactgtacatattaaatagctgaattgtatggtatgtaaataatatccccaaaaagctgttatgtaattaggtaaatgtttaccaaatgaacagggacaaataaccaggagaggagtgctgagtcccctgggggcagtagaaagcttgggaacaaaactagccagtatactcgtgaaaataggcttcagtgtgccctccatagcctgcaaatctatttttaaaagccactcaaacatctgttagcttttcatgtgacttcacaacttccatcatcctagttataaaccatttaaacacaatatcttacaaatgtacatttcatttttttgcagtttgggtaacccctatatcataacttatacaacagaagctactacagagctagtcatatgtatcaaatttaattcacttatttattcaacaaacattatatgcctactgtgtgccagacaacgtcctagtgtgaagtatgcaaagatggctgagatgtaagccctactctcaaggagctcacacacagcatggtgaactgagagttataatgtgagactttggagaacactctgacttgtgttgctgcaaatgaaataaggtcctaataagtgttatttcaatgaagatgatacaaaataattacagggcagtgatcatcctcctgatgagcagcctacctgttgacatgctcctcccagtcctctggtggaggaggggcatctgcatcagtcctggcaaagatgacatgccgttcacactcattcatcacgctgcgtgccttctgattgtcatagagtggcataggcgttgatgtgaccgtctccacatctattgggacgtctgattcactgtaaacaggtgaggaaataggaccgggccacacatacttcacaggtatttaacaatcatctggttgacaaaaaatgtatctttaatacagtcagctttaaattacgcataagcacattatattcacaagaaaattttgatccaaagtcatctttcccacacttgtctagatctctgccctctcagacatgatggtatgtactggaagaacacaaagtcattttttcaatgagtctatataaaaaatgataaacatctattttttttttaagataaatatgggccaggtgcactggctcacacctgtaataccaccactttgggaagccgaggcaggtggattgcttgaactcaggagttcaagaccagcctgggcaacatgaggaaaccctgtctctaccaaaaatacaaaaattagctgggcatgtggcacacacctgtgatcccagctactaaggaggctaaggtgggaggactgctggaacccgggaagtcaaggctgcagtgagccatgattgcatcactgcactccagcctgggtgacagagcaagacctggtctcaaaaataaataaataaatgacaaatacagccagacacagtgattcacacctgtaatcccagcacttgggaggctgaagcaggaggatcacttaagcccaggagtgagctggtctcaaaaaataaataaataaatgacaaatatagccaggcacagtgattcatacttgtaatcccagtactttggaaggctgaaggaggattgtttaagcccagaagttcaagaccagtttggcaatatggcaaaaccccgtctctaaaacaaacacaaaaattagccaggcatggtggtatgcgcctgcagtcccagaaactgaagtgggaggatggcttgcttgagcccaggaggttgaggctacagtcagctctgatcatgccactgcactccagtctgggtgacacggcaagacccagtctcaaaaaaaaggacaatatattccataagcaagttgatttggctcaagctaatatttttaaaagatcactttcaatttttgtttagtaggctacagctcaggagtggaatttagaagaccagctaggcagccactgcagttgactgagatgggccagaaatcatgagagctcgtttagggacaagaacagtacaaatggagaaaagtggctaacaagttgattgcctagatactgttcaatacagtaggtataagccacacacgactacttaaattgaggcaggtggatcacgaggtcagatcgagactatcctggctaacatggagaaaccccgtctctactaaaaatacaaaaatttagccagccatggtagcaggcatctgtagtcccagctactcaggacactgaggaaggagaacggtgtgaacccaggaggcggagcttgcagtgagccgagattgcgccactgcactccagactgggagacagagcgagactccatctcaaaaaaaaaaaaaaaaaaaaaattactgggcacaagggctcacaagggctcaggcttgtaatcccagcactttgggaggccaaggtgggcagaacacttgagcccacaagttcaacagtgtgggcaacatggtg

SEQ ID NO: 37658 - DNA, 3508 bp, Homo sapiens
gaggtcaggagttcgagaccagcctggctaacatggtgggtggaaaccctgtctctactaaaaatacaaaaattagccaggcacagtggcacacgccggtagtcccagctactcaggaggctgaggcaggagaatcgctcaaacccaggaggtggaggttgcagtgagccaagatcacaccactgcactccagcctgggcgacagagcaagactccatctcaaaaaaaaaaaaaaccacacacacacattgtggtatctctaactcattaggtcattaagtctcaattccaggaggggtgactctaaagaagcctctacaagggctctaacccccaacaaaattaaaaccagtgcttaaggaaagattaaacattaggtcagattaaaaacaaacagacaaaactcttctccaaaagtttacaaaattattaaggacatgatttgatcaccataacggaatatatcaacacatcatgaaacataattagaatgccttaaagtgcaaaagaactggcaaacaggtttatttagaccaaatgtaactgtatcactcatcaggtagtcaatttatgaaacttccttaccctataacataggctgggtgaaaatatcattagacataagaagggtttagattaacctatggatagcagctctgtaacaagggaagagaaaaagcaacgtcttgggaattggctcctaaccttcgtgtgtgaaaccaagaaaagcaaaatgcattactataaaaaggctattgttgccactgtcaagcaacccagagcactggactaatgtgataaaagagtcgtatcctgtgggtaatcttttaaaatcaacttttcagtctttttcttcaccagttaaataaccctctacgattttcccctttccacacgtcctactatctaagtggaataggttgtctgcttttcatttgcacgtcttgctttcctaactcttgttagctgtctcacagagatagccacattcaagcctgctatccttatgctgcttaagagatgcctgaatttaacatccaaatgcctcatacaatctcccccagtcaatcctgagaaaatcctctctaaattcccatctgatcactgcccagtgaggttaccagcagcccttagaagccccaactcacatggtactttcgtgctgccgccggggagtgacaaagagcatgcgggtggggcgggcactactggcatctgggtgggcactccaaggcttggcatagctatgatccagaaaaaccaggtccagctcccgttcatgcactgaaagctggaagagcagcgaggtgcccatgcgtcgagctgaagtctggaagtccctctccccaccccggtgggccatgtcagtggaggggcagaaagtcagagcatgggtatctgcatgctagtcacctgcagtgaaaagtttcagtttaggtcaattccaatatcctaaatttctcccaatctacaccatctaacatgcttacttttgtaacctactatcattcctattgagtatccatttcacggcagacctctggtggggacggttcgtggaatcccacaccaacaccaaaaaaaaagaaaaaaaaaactatggtgccacgagttgtcccatactcaacctctagcgaactgaaattacctaacgggagagctcaccgaccccaaggttcagaaagacctcgcgtggacagacagtaaacttgcttggccagcaccacttcctaggtgggcaggaagggttttgacaaacaggaaatcacaaatatgaattcgttgaaagctaaggatctctgttgcttcacaccatcctctaacgacaatgcgaagggagccggggccgcagctagagcgtgggcacccctaaagggcagggcaacgccggcctcaaaaaagcgaatcccagctagggctccacttcttcaagcctctcgtattgtgcgaaacaaaagttctgttaagtacttcgtaatattccagagttgtttacataaaaatgaaaactgcccccccaacaaagcctgtgacaaaatgatccccgtggaagccctttcaccctcacccccagtgaggcgtccctagcaaaccgcccaggaccccggctgccccgcaggcgttcccgccactgagcctccacacggcccatctaggagacagggctatgactcgcattttacagacgaagtcgccagctcggggaactgaagcgatttggccaaggtcatccagagttcgcgacgaggaggagccgcctggcccccgcctcccgcctcccgctccctggggcagggctcggcgtccgcgtcacggaggcccagacgcggcccctgccagcccgcccccggcccgacccgccccgcccgaccagcaccggcagccggccctagcccgggcccccgcatgccccgggagccctgaagccctcgccgagacccccggccgtcccaaccacggccgcgatccccacggcccgccactcccctcgaagccaacgctgctctcacccgcggtcttacggccgcgcgctcggccacggccggatccctaagcgcgtgcgcgttaacgcctccacgccccggcgctgcgggcaccgagtaaaacgcggaagcgggttacggcctgggaagggagaggcggtgagcggcaaagcccggaacggatgaagctccggcgcctctgtccggaagaggagagccaagaacacgcgagcatgtccgaagcagaaagtcaacaactaggctggagtttccccctcgcgcatattcagtagggaaagcgagggcggaggactaggctggcttctacggccccagttctcgccacccccaccgtgttggtcctttgtgccctctgggcggtcgagcacccaacggtccacctccaccagggcagccacctgaatttactcattaagaatttacctaatgtggctcacgcctgtaatcccagcgctttgggaggcctaggcgggaggacctcttgagctcaggagtttgagatgagcctggccaatatgatgagacccccgtatctacaaaaaattttagaaattaggtgtgtgtgatagtggtgtatgcctgtagtcccagctacccgggaggctgaggtgggaggatcacttgagtctgggaggtccaggctgcaatgagccatggttgcaccactgcactccagcctggacgacggagtgagactacgtctcaaaaaaaaaaaaaaagaattttgttactgaccctagattgttttgtgtggttaactttcctatgtgttttgtgtagagagagtagatcctcaaaatcagggacattaacctttgtatcctccagagaacatacacccagaacataggtaattgttcaaatgttgactgatcaataattggttatttggttgactgactgacaacatgacatcaagagacatgagacaagacagcaagagacatggttcaagatgataaatctcacccgggatctgtggctcatgcctataatcccagtac

SEQ ID NO: 37659 - DNA, 793 bp, Homo sapiens
tgccctttcacccacatataaaaacaaaacaaatccctttaaagacacattttaaatgataatatacattttcttatcttctcagcaactttgccctgaatataattagagctttttgttgatggcctggagccattatgggaacatagttattatcctgggctatctgcagtaccgggctacttgttcctgcactaaatggctctgagatgctttctttttggggttctgtagtctgattttgatcgcctttcaatctgtctccgtcacctatcagctgttgtggatgacagttctcttgaaggcggagtcttactggccttttgactctaagtcaggcttctaagagcagtgtgtaaaataagaacacagttctgagagagaacttgagctgagagataacttgagctctctcataagtgcaggcacacaggaatttgtgtgacatggacttggcaacccagagaatgttttgtttcctcataccttacattgtgaaatacaaaattagctaatgcgctccccttctccctcctgtgaactcccctccttgctgcttctagtagctacccagtctgccttcctgtgagtcatcactttcaaccattcctcataatccctgcctccttggatgattttatagactctgaaagtaggaagacatttcagaggaggcctagtccatcccccatccttgccaagctccctcccaccttttccggcctgtgatgagggcacagggctgggatcctcagatgttctgtggctgttcagagccttgggaaatcttctt

SEQ ID NO: 37660 - DNA, 1433 bp, Homo sapiens
caaggtcggcaaaaatctcagcagtgaggaggccagaaaagtctccaaggggcaggctgcaatgccagcctaagccctcaggtttcctttttctttttctacatcaggaaaagcacttttctcgccctgcctgcagagcgggccacccctagctgcaggtgagggacgggagaggagcctcccacgtgcggccgtgcgaggccgaggaacaggaacggcgtagctaggagaccaggtcccggagaaggagagctggccccactggcagagaaaggcggggaagggcgcggaggcggagcactgggcgggtacccgctggcggctctcgcgcggcggcgctgctccaccttaagcgactgtacccccttaagggcgggcgctcaagcagcgagccccgggggcggggcctccaatgcaaatgaggggcgtgggcaggcggggcggggcgggcggggcgctgacctgacgtcaggctcgcggcccgggcagttggctcggcggcagcggagcggccggagctgcggtgcggaccggggccgcgcggcgtggcgcggggagcggcggcggcggcagagccagagcaacatggcgccggtgggcgggggcgggcgcccggtcggcggaccggcccgcgggcgcctcctcctggcggcgccggtgctgctggtgctgctgtgggcgctgggggcccggggccagggcagcccccagcagggcacgatcgtgggcatgaggctggcgagctgcaacaagtcgtgtgggacgaacccggatggcatcatcttcgtgtccgagggcagcaccgtgaacctgaggctgtacggctacagcctgggcaacatctccagcaacctgatctccttcaccgaggtggacgatgccgagaccctccacaagtccaccagctgcctcgagctcaccaaggacctggtcgtccagcagctggtcaacgtgagccgcgggaacacgtccggcgtgctggtggtgctcaccaagttcctccggaggagcgagagcatgaagctgtatgcactgtgcacccgggcccagcccgacgggccctggctgaagtggacggacaaggactcactgctcttcatggtggaggagcctgggaggttcctgcctctctggctgcacattctcctaattacggtgctgctggtgctgtcgggcatattttctggcctcaacctcgggcttatggccctggaccccatggagctgcgcatcgtgcagaactgtggcaccgagaaggagaggcgctatgcccgcaagattgagcccatccggcgcaagggcaactaccttctctgctcgttgctcctagggaacgtgctggtcaacacctccctcacaatccttctagacaacctcatcgggtccggcctcatggcggtggcctcctccaccattggcattgtcatctttgg

SEQ ID NO: 37661 - DNA, 801 bp, Homo sapiens
ggatattttggtgtattttcttctaccaagtcagcaacaaatgatattgcttctcccccaatatgaaaatagtgtctaattagaagagtaaaaataaaaaatagcatgtgaagtataaaatgcattaagcaaaagtgaaggaaaccagcagtccttcctactctactgttttggaactttttactttacacaaatagtgaatcaccgtctcttgagataaattcatgtctgagtcagcctttttaagagccctgcaatattgttacaaataacattggcaggccctcctgggcacaccttgcatgctggcctgggtgtttcctttgtattaaggtcacttcctagggttgggagaaatggcagagtccaaggtcttgcatattttacattttggcacatactgccaaatttctgaagtaaaaattgaacttccaacggtgggtagttctcctgccaacactgagagtaccaatctctgaaatcttgactaatatgataggtaaaaaatgagttcattttgaaaatttgtatttccttatattttgtttgtatttattgtatttctatttaaaattaagctagtggtttttcttagggatttataagtctggtataaaacagtgactttggaccagttagcccagtaactttcattgaataatctctcttttctcctgcaatttaatataccagatttattatatacagtattcccaatttgttggagtttatttctgtccataagccaggcatggtgactcacgcctacagtcccagcatttggggaggccatggtgggag

SEQ ID NO: 37662 - DNA, 1325 bp, Homo sapiens
tgtccattgttctctccagtaccgcactgtttttgttttgtttgcttgtttttgagacagagtctcgctgtgttgcccaggctggagtgcagtagtgcaatctcaactcactacaactttagcctcccaggttcaagtgattctcctgcctcagcctgctgagtagctgggattacaggcctgtgccaccatgcctaactgatttttgtatttttagtagagatggggcttcaccatgttggccaggctggtcttgaactcctgacctcaagtgatccgcccattttggcctcccaaagtgctgggattacaggcatgagccacagtgccctgcccagtactacactgttttaatcgctgtaatctttttttttttttttttctggagacagggtctcactctgtctcagagtctagcgagtatagagtgtatggcctgcctgctgggccaccgcagccttctggtcttctggcctttgcctggactgactgccctgactgccagctgtgtctctgggaggaagggagcaacatagatgagccctgtttaggattatggatgaacccagctgccctccccgaggctagagggcaggggcttgtcactctggctggttcctctcctgccctggctctgccttcttgctgggctggctgccactcatcccggtggttgaggtcagcactattaatagccagcttaatcctgcgggagcttgggtgaagggaggaaagagcagagaatcgccaagaaatcagggtgctcagctatctgcaggtgtggacccagggcccaagcctgtggcttccagtcagtccagcccgcacctctcccatgggagggcctgagagcgcgggaacatcctgggcccctgggatctcagaggctggaccttcctgggagactcattgagtaagatgcagaggactccttcttgggtggtgggagtccctggtctgctctggggcccctggcttttccccatgagaaaaagcagctggagctggtgagtagggccctctcatggcccctgtggactttgtaacccagcacctataatacggttttcttaaggacttcaaggggctgtaaagtctttttttatggagggcggggaaggaggacgcagcagtttgctaaaatgggcattgtgcagggtggggccatcctttctgtatccagcaggggtgtggagcacctgctgtgctaggcatagtgggaggggttggggtagcatggcgaggagcgagggcactactcaggcctcgccaggctgcagcctggtcagtgggagatagacgccggtcagccgatggcacagagc

SEQ ID NO: 37663 - DNA, 2128 bp, Homo sapiens
aagtgttgttagcagttggtttatttccttccaatcacatacagatcatatctgatgggtaaagaatattccatactgtcaacagaccacactgtcttctaaaatcgcttcagcagtgaggatcctctggaatagatcttgttaatcctgaggaattattctcccagcggtgagctatgagaagtggaatcaccagatgtagtaattcctgacagaactgccgcctgcttgtgtggctgagatgctgacctaggtatcaggctggtcgcgccggaacccagcacccacgctgagtctttctgagctccactctgctcctgttagatattaaccacctgaggtagctgtccagattcaaggcggtagtgattttgtgtgtctgtgtatttatcacggggtccgcggcgggaacgcaggggctgtgtcccacgtccccaaacctctagtagggtacggcgcgatgaacatcttccataaaccttaaacctcccggcgctcagtcactggttcttatttcagccctcttagccccgtaggtcggcgcgctgaaaacctttctggtacctggggcctttcctaagaaaaaggcacatgtctcgcacatttcagtctggtctgcaacttcaggcgcgccagcacccgaggttcttccgaccggccgctccgctcccaagccgggaacttcccagagaattggctcggcctccgggcgcgggggacagcatcgggaggagtgggactccgggcgccgcgcacgggccgaggacagccgggcttgggaggccctgcccgccgccccgcgtcctcccggccactgccaccccgcgcatccggagccgcagcagactcggcggggcccggagccccacgcccccggcccgcccctggccgccacttgtttactccccggcgcagcctagtccgaccctggggcccgcccccgcccaccgcctattggccgaggaggcgcgaagagccgtaacgattggcccggggaggcgcggggcgagcggggtaggctgcgcgagaggccgagagggggcagcaggcgatggcggcggcggtagctgcggcgggtcggttaggctggttgttcgccgcgctctgcctgggcaacgccgcgggggaggccgcgccgggcccgcgagtgctgggcttctgcctggaggaggatggagcggcgggcgcgggttgggtacgcggaggggcggcgcgggacacgccggacgccaccttcctcctgcgcctcttcggcccgggcttcgccaacagctcttggtcctgggtggccccggagggggcgggctgccgggaggaggcggcctcccccgcgggcgagtggcgcgcgctgctgcgcttgcgcctgcgggccgaggccgtgcgcccgcactcggcgctgctggcggtgcgcgtggagccgggtggcggggcggctgaggaggcggcgccgccctgggctctgggcctgggggcggccgggctgctggcgctggcagcgctggcgcgaggcctgcagctgagcgcgctggcgctggcgcctgccgaggtgcaggtgctgcgcgagagcggctcggaggcggagcgtgcggcggcgcggcgtttggagcccgcgcggcgctgggccggctgcgccttgggcgcgctgctgctgctggccagcctggcgcaggcggcgctggcggtgctgctgtaccgcgcggccggccagcgtgcggtgcccgccgtgttgggcagcgcggggctcgtgttcctggtgggagaggtggtgccggccgccgtgagcgggcgctggacgctggcgctggcgccgcgagcgctcggcctcagccgcctggccgtcctgctcactctgcccgtcgcgctgcccgtggggcagctgctggagctggcggcgcggcccgggcggctgcgggagcgggtgctggagctggcgcgcggcggcggcgacccctacagcgatctcagcaagggcgtgctgcgctgccggaccgtggaggacgtgctcacgcccctcgaagactgcttcatgctggacgccagcaccgtgctggacttcggcgtcctggccagcatcatgcagagcggccacacgcgcatcccggtgtacgaggaggagcgctccaacatc

SEQ ID NO: 37664 - DNA, 891 bp, Homo sapiens
ctgtcgttgcaggaagccaggctttgtgataatgaccgctactcctgactgagcactgccgtgtgccaggagctgatgggcactttctgtgtaatctcgtccctcattccttgcaggaggcctgggtgctaagttactgttactgctgtagctcaggaatgggtgggaggcttgggtgggcagctctattcttttagactcttgggtgctcctggctgtgtccctagaacatggccatgccaccctgccctggggagggagcctgggtttgggtccagacagagcctcgcggtggtaagtactcccatctgggctgccagaggcagcccctgaggcaggggtggttctcctggtgtggtggccaacattgcaaccctggaatcagcggagtaggttccatcctgcccttgcctgcccccaggccctgaaggctgctcagcctcttgtggtgcaaagtcctctgctgttagtgataagagtgggtaaacagacctgcggggggagactcatcaagcactttggccagtgcctggcgtgcatatgctgtgtgcttggcgttagcaggtggttcttactccgggacaggctctgctggtaggtgagctgtttgccaatccaggagcaaggggtgaatctggaattgcagatttctgttcttctaggcaggtcaccagacttccttttttttagggaaaaagtggaagactgtagctgtccttttggtgttcaaagcactcacgtttctagattctttaagaaaaagctcactctggtgtctggcttcagctggctgctgctttcaacagttgagcagtcaccaagcagagatttggagcagcggagatggaagggttgtcctgttcagaactaaaggcaacttctgtagttggt

SEQ ID NO: 37665 - DNA, 812 bp, Homo sapiens
actaggcagccccagatctggggaacagatgagcacgtggggagctggagtgagctgagcagaagttttgtgcccgcctgcccccatcccctccaggccacgttttagatggcccttgtagttgcgggtcctgggtgtcctcagaactagacatcaatgcctggatccttcagccggccctgccctcctttaggagacaggagtcaccagggcacagccctccaggcccgcctcaggaaggaatgaaaggaatgccatcatctctagttcccagggcccagccttccccttctcccccggggcagggacagtgcggcatattcagattcagacctctttgggctgagccaccttgtgagtgcagttactgcctttgtgtggccgtgacctctatttgtttgcttttaatttgccaacctatcgctgctggcagcactttttgagcaagccgagagcacccattttggctgggggttcagatcgatggccttgtccatgttgtcctttctggcttccctgatggtgtcatgtttcagcgcatgcgccccagcctttcccatgtgccaaaccagaagctccactgcccgtaggctgtccctgtagccctgctccctccctggaggctgctcttctgattctgagagctggcctagtggtgctgagggcccctttctgcttctctgcccacctgctgagttgccactcgcagtgttgtcagttcccgtgttctgagaagaggtcatgcctgggaggaagggatcgtcatgctgcatcgaatcctctctccgccgtgtggcccccaggagagtagc

SEQ ID NO: 37666 - DNA, 550 bp, Homo sapiens
atgaagtaatgtttaaaatgtttggatctagagtgaaattcaggtcgggctgggattacaggcgcccaccaccatgcccagcaaatttttctatttttagtagagacagggtttcaccatgttggtcaggctggccttgaactcctgacctcaagtgatccatttgccttggcctcccaaagtgctgggattacaggcgtgagccaccgtgcccagccagaaacaacttttaaaaaatataatgatgcctccagaaggctgccaaggcagtgtgacaatctcccacagaagaggatctccctggtgagcacaaagactgaaagttgcaaaacaagaagcaatctgctgccctaagagacaatcagcaaatataggtgagatgaggggagttcggggagttcagggtggcatggcgacagacaacaactagcaaatacaagtgggaacacgcatgcctccaaagtgagccattattgcacaatccaaaaaagaccttaaaacaacaacattgaaggtgttcacagagacaaagggatagaatccacaaatc

SEQ ID NO: 37667 - DNA, 2366 bp, Homo sapiens
attttcaaaaagccgctctggctgctatgtgagagtagaaaaccctgtaggaaggcaagcgtggaagcagaaagaccctctgaggcaaccacttcagcagtgcagaggacagcggtaggaggggcggagggaagtaggcaggtgccagaaccacggtaaaggaagagttccatgagaatgcttacacagcagtggcaatcgagggctgcatccgcaagggcagatgacacagcacagtggttcccaacgctcacaagaagcaccctggtttcccgccttcctctgttcctattggcaccataatctctgtataatctgggccaaacgtgttacctctctgggtcccacagatgagatactgtgccctgcctcgaaggctgcccgtgcgaagctcttgccatctttaaagcatgcaggctgcctggcacccggggctaaacaaaggccactgctctccttcaccgcgcagcccccaggcctgcagctccatgcccctcaggttgggtgcaatgcccctggtgcagattctgctccccgggccctctctcaaacacctgagcaggcttgtgtctcccaggggaggtcgtcccccgctactcgggagggttacggaaaccagtgcttccgcttccccgccgcccgcgggacaggtgtctcctggccgagctcgtgcggggccctgggaggctctcagtacacgggaaccgtgggtcccgcccgccttcccgcaccaggccccaagccccaagccccaagctctcggggccccgttcatccgcctctccttggccccacgcctcctccttgggccggggcctggtgagaaccacgagggccgcgcggcagcctcacccctctcgaagtccatctcctccagcgtctgctgtacgccgagcaccgcgctgggatgcgagcagcagggcccgtccgcgcagggccgaggcgtcgccatcccggccccggcgtcagtcgatccgccccgggtctcaggctcagcctcggcgggaggggcggacgcagggcccgccccgcgtccctgatctggccgctcggcgtccgcggctgtcgccctagtcccgccttctcgccaaagctgaccaatcaaacgcctaggccttagctcgagaaccaattgcaacggtagggcggggcttgttgcgcccggccgtgccccgaggcctccgcgcgagggcgtccaaggccaagcgaggactgaggcgctgggttccgggagccgcgcgccgctggagggccgccgggccgcctggccttgcagggtgtggggatgaggcagctgggtccggtcgggagctttcccgttaccttcgccatgacccagccgtccagcgacctcgcagcctcctctctttaccgcccctagtccctagggcagggaggcgccacgcgctccgcggtcttttttttttttttttttttttttgagacggagtctcgctgtcacccagacttgtgtgcagtggcgcgatctcggctcactgcaacctccgcctcccgggttcaagcgattctcctgcgtcagactcctgagtagctgggactacaggcgcccgccaccacgcccggctaattttttgtattttttagtagagacggggtttcgccaggatggtctcgatctcttgacctcgtgatccgctcaccttggcctcccaaagtgctgggattacaggcgtgagccatcgggccggggcgcgctccacggtttttagcccctcttcctggcaccaccccggaccaaggccgaccgcccccggggcagcggcaaagtgacggctggaaaggcctcgagacgcccctccccgtaccctgctcttccttacaagtccagcaaggggcaggtggccacaacttgtcctgcctgtagctccacctcagggcaggggcagggccttggtttgtgcagaaccccctggccccacagtgggcgctgagtttacggaatcggtcttcatgatcaaaacccaccgggaggccgtctgcggaccgcgcaccttcgcagcgtgctcctcagcggaccccagccttctcaattcccagttaaaacccaggcagctgcctgctcaagccacgatcaagtgtacaggggagaccgcctgatcggcttagaaagagtgcatgaacgacagaatgcaggttgggttctgtgccagtccctctccaggacagtggtctggtgcacactggatgtaagttccttcccccgctagttggggcacggaagaccctagcattcctggtgggtagaaggctggaagtcgtttctcctcccctaagcaggttgagaaccccatcctcacacaagcaatgatctcatctccacaaccttccactcctttggcccctca

SEQ ID NO: 37668 - DNA, 1281 bp, Homo sapiens
actccagctctggtccagggctcagcccgatgcgacgggaatgaaaaagctcacctttcttactgccacggaggttgcagatgcctgaagtgtccgaggtcatcacatgctggatcagtagagatctggtaggggatgtagggtacatcagcagcctggctccaaccaccctgagtccctggaggtcctggcctatgtagagcccaactcacccagagtggccacccacggccacacagcggctggtgttgacgctccaggcgcaataggggtcccgggcgaggacacagtctgcacaggagcgatacttcatgcagtcggccacgggcagctgcaccagctgagagcgggagccggcaaagagcagcttctgcgagaaaagcggggcgcaggaggggggtcggccagggccacaccacgggaggggcggccggaccagaacgcagcatggggacagcttggactcctgcagggggcacagcacggggcgccagaaggaggaacaagggaacaaggcagagctatagtgctgaaaagggaactctaagaaccgcagaactcagagggcttacacaggccagatgcaatcctaagccccttatcgacgtgacgttattagaaagggatgatggggctgtgaggccaaaaagtataatcacacacactcacacacacatagtgcaggaaatacatttcaaggcccatcagccctcacaacagcagcagcataacataagatgttttcctgtttcaacggtggatgccaatctgtgtgtttattcaaccacacactttctttctgccattattccatgttctaggggacaattttgagtcataatagctggtaaaaggcaaacaaatcaaagttcaggaggtgtagcaaacatgccacaagagtattgcacaaggcaactaggaacagcaggtcatgcctggaatcccagcactttgggaggctgaggtgggcaaatcacttgaggttaggagttcaagaccagcctggccaacatggtaaaaccttgtctctactaaaaatacaaaaattagccggctggccaggcgcagtggctcacgcctgtaatcccagcactttgggaggctgagtcgggcggatcgcaaggtcaggagatcgagaccatcctggctaacacggtgaaaccccgtctctactaaaaatacaaaaaattagccaggcgtggtgatgggagcctgtagtcccagctacatggaaggctgaggcaggagaatggtgtgaacctgggaggcagagcttgcagt

SEQ ID NO: 37669 - DNA, 2950 bp, Homo sapiens
cacgtgagaataaagccagcacactatgggggcaactcctcagcagcctgtccctgacttcctcctcacccctccaggcactcacccccagaagacactgtcttacgcggcacaaggttccaccacacctcagccccaatgcccaggccccacagccttgctgccagcagccagacagcccagtgtggggccatggcgcacgccccggctctgagcttcaggccagctgtcctgctgagggaaaagacatggtcagaaatcacagccagagaaagcaaaccagaggggcccgcagcaggagaggccacaggactcctcatcaggccttccaggagccccggtgccctccttccccttctctttggaggtggacctaagtccccacacttggcctctgcctaaaagaccacaggtctccctgggaagcggggaggagttgagttggctgaaggctaaacaggctccgggaagccctccctggcctccagacccaccactacctctgcgcaacaggaaatcatttgagaaataaaaaggggacccccgcccaacatacacactcaggcctaagaggtttgagtttcttgaaagaacctcaggcagcaggccttgcagccactggggctccggaccctgccaacacctaattctgggaggaagactccttagggcgacgagggcatgcggtggggtaggcggtcgggaaagccccaaaggggaaacctggtgcggccggctgcgagcggaggtcccggtcccggcctgtccccttccccagcgcagacaatagccctgcagaaccccaaaccccgttccacatcagcagggcaggagtgtgagaagggccgggagcgaaggggcccagcttcccgaggcccctttgttgcccaagagggaggcaggaagtgggtgggatgggcgtggaaatgaccagggcctcatcctgttcctcgcactgcctcctccgaaacaccagccctctggcggaggggcggtggggggaccgagctcgggtcgagtcggggactccggcggcgcgcgcaggcgacggggggaggtaggggcggggacgcgagggggttcctcccgggccgctggcaacgcgccgcgcacggccggcacccgctgcgctcccgcgactctgacgaaccttcccaactcggggactgcgccccagggaccctggcctgggcgggccagcgggattggcttcccctgctccagccttcccgtgccaggggcggagacgcagaagctggggacctgctcacccccaaacaaagggtccccgccaagaccccgtcccgggtccccccgggttctcccctcccccagctccagggatttgaacgcaaacaaagcggcggcgcggggagcgtggcgagcccggcctgcggacgccccctgtcggcccagagccccggcgcgggagagcgggggctgcgccccagaccagccccccaaaacgcccgcggcctcatctcggctccttacccgaggatcgggccgcaccccgtggcgtgctccgaggatccgcccggcagcggtgctcccacccgcagctccccccagggcgaggaaacgggcagccgggaggaggggttggggggaggggtgcgggatccaggcggggcaccccacaccctcgcccaccccgagcggccagccgtggaccgcggccctccctgcagggcgagcgctccagccggggacggcgcggcccggctcggcccgggggcctggctttccgggacaacccgcctccccagcggaatgggcgggcgggcggggggccgcggcagggaaatccgatcccacaacatcggcctccctccaagcccgccccaaactttccatcgggggtgggagcgccgagggcagtccaggagcctggcgaggatcccggccgcggaccggaccgcgcgaggaaccctcgctggcgcgcccctccggccccggggctgcggggctgcaggtgctgtgcgccccactcccgagaccctgcgaagcagccgcgggggtcgcaggaaggatccccgcgtacagccgtctccgccgccgcggctccccgcgccccagcccctgtccctcccgcgtccggcagcccctgcccaagcaaagggacaaagcggcggctccggggccccgcggctccagcctcacgcaagcccggcctcgctcacctattgcgcgcagctccagtccccgggcgccgccctcgcgttcggctctgaccgccgtccacccctgcccccgcgtcgccgcctgcccgcgctcgcccgccagccctccgcggcctctctgccaccgcccctccgtccccgcccggctccgcgcccctaggctcgggctccccgcgccaccacggcgggcgccggctctttctccagcgcggccgcggctctccgcccccttccccttgacgtcaggctgggggggtcgagcggaggccgggggcgggccgcgaaggctcgctcaggagggggctgcgacccgcagcgacctgtggacccgcccgctctccgcccgggggctcggacctccgcctctctgggtgcccggacctcaacccctccgggtgtccagcagccccggggctcggagtcgcgggctgcgccacagcgcctggagggaggtggggcgggggagggactccgggtatggccacgggggaatcacactcacccgatctttctgaagtgtcccccgaagactccgggcgggctgggctggggagagggactcccgaccgtgcagttgcaggaacgaccgcgggcgagccacgtcgaggcgagtatccaggggaggcacgctgggggaaccgaggcgtcttttggggcggaccagaggggtctgccgtttggcccccaattctgcctctttctaggccccgaggaccactggtccctgccctcaagtctggaaagggcttcaccagccaggaagaccc

SEQ ID NO: 37670 - DNA, 1801 bp, Homo sapiens
ctataaactggttttgtatactctatccaagtagtaaatttactaaaattactggatcctactatataccagacctctgcaaggcattgaagattcaatgatgagcattaattcccactctaaggggatttttctatctggtagggaaactcagataccgcatgcagctagcctgtcacagggctatactgactaaagctcaccctaagaaatttgcacatcttagcctatgggcaacgggaagccatggacggaatatgttttccgtttcaaacaaggaactccagtcacagcaggctctaactccatttcctattatcaactccccttcctgctcctcctcccttagtagcctcgaaaaagagtggccacttccttcacatcaccagggccttggtcctggtagggggtcccgcccccggccctgtcctcctccccaggccgggacctccgcgcctcccacacacagtacaactctaacacgaaactgggccaggactgcaggtaggtcccgtccaatgcgacacgctcgcgacggcccacgcactgccagaaccagccctgccactaaccagcctagtaaggaacgcagtgatctttaggagcccacttctaaattcaaatcatttggggttcagtaagtctcttcacagacggggacctaatagcttccattagcagcctccacgtttgctgaacacgactacggggccagacccacaggaactccaatgtggttcagccgctcaactccagggaccaaaaagactttcccacctcccagcgttattaaaggcaaccccgcccccaagcctcagccactacgcggtgcagaaagaggcagagctgggcatgcgcaatttccgcccccgccacagtcttgggagtgggcgggctcgagggctgggaggaagccgaaagctgaccgagaggagaaagaagcccgcccccggaagtccctcctgtctctgcagcttgttcccggaagttttgctgctagtcgcggacgcaatggcttcaaggttacttcgcggagctggaacgctggccgcgcaggccctgagggctcgcggccccagtggcgcggccgcgatgcgctccatggcatctggaggtactcgggtctccgggcgtgccagggaccagagtgttgccctcccagggtggtcccagggcggcaaagcggcgcggctcgtgcagcttctcgaggtcccagtggccgctttacggtccccagtgcctcaggctctgcaggcatctccctgtaattctggaccgctgctcctgccgctccccgaactcactccgctgcgaaagtatcctaaacggaggtgccgggtgaccttgggagggaccggggctgccaccgggatggggaggggtccggcctcccttcaaacctgcgcccacctcaagcagagtgggttctacatgcttttagacaaatgtcgacaaatttgcctcggtggttggagaaagaaaagctcataggccgggcgcggtggctcacaactgtaatcccagcactttgggaggccgaggcggacagatcccctgaggtcaggagctcaagaccagcctggccaacatggtaaaaccccgtttctactaaaaatacaaaaattagccgggcgtggtggcgcgcgcctgtagtcccagctactcgggaggctgaggcaggagaatcgcttaaacccgggaggcggaggttcccgtgagccaacatcgcgccattgcactccagcctgggcaacaagagcaaaactccgtctcaaaaaagaaaaaaaaagctcccccgagt

SEQ ID NO: 37671 - DNA, 2933 bp, Homo sapiens
caaggatgctgctcaacatcctacgatgcacaggcgagcctgcactaccaacaaggagctagcccagaatgtcaataatatagagatagagaaaccacgaagggcaccttcctctgcacaactaatggttggctccagcaggattccatagcacatgctactcccaaaagctagaagaaacccctctgtgtgggtctttttttttttttttcaacagcttccttctcccccaagaacccagaaggcatggaacatggacgacctacagggcctgctggagaagaccaatgggtgcatgggatgaccggcagcttccctcaagtggcttcccagagactactaggagaacttggtcctatcgctgcccccacctggaagctggacttaaggatcccccaaagaacggggcaattagaaacctcccacccagcgaagggataagcttctcaactcagtcccaccactcttcatcgcaaccctctgagtctgcagcagaaacaaacatctccaagttacagaggaggggatggaatccccaaggggccgagcggtagcccttttaacttataagcctgttgattagcctatacgagttatttgcacgtcaagaaaggaagtagcctgctccttcctgcagcgtcctgctggtgtgacagcacgtccccaagctcagtgctaacctccttattaaacatcccctgctgtgactcagggaacccacatgggtactctaaaacagtcattcagggaccccacggggtcatgtgggagggagacagatcccagaaagagcacaagtgagtcattaccaaaaactccaaggcccgcacaccggacgcacatacccagctaggggcagactcaaagatcccagcccttatcttctccccatatcagagctcggaagccagaaatcttcctaaggcaggtgaaagcaagccgagccccactgctgaaggacaaagccacaggaagcctgatgacatctttcctctgaggcttccaaacgatcaccccaaattgcttgctgatactgggaagagtggccatgaactctccattgctctgctggctgtggaatgtttgctcagcacaggaagcatttaaggagaaagtcaaagtagccaaaaggcaaaccagatggtggtggacatgtgggtgacagagcatcctgcatttgttgcctcggggtgcagccccaaagataaagccagcagtgtgcaaatgacaaatgctaccccacctccgccaggcagccagagccagggccgaaggacgcggaaaggaactggtgtggaaacctgcccaggaaccgcactctcaactgagaagagtccggggcgcgtccccgcccggccgcccggctgtcactcaagctctcctgaacttccccgcccgactcggggaggggtcggggaagaggctctgcgacgcgggcgagggggctcgccccatggccggccttacaaggccaagagggcgcgcgcccccggggcgaagccagcggcccggcgggggcgacggccacgcagtgagcggaggacgcgccgaggcgggcgggggtctctccctgcgccgccgcgtgcgcccccgggggcggggcgcccgccctccccctggctgccgggcctcacgttgtcgatgaccacaggctggttggcgatgatgtcgtaggactccatggccgggccgcgccggccctgcccagcaggcgggctgcaggaggcaccggatgggcgggcgggcgggaggaccgggacggcggcggctcccgacgcggcgccgctgccctccctccccgagcctgcagcctacgcgagccccgcggggctttctggagggcgggcccggcggccaatcatcgctcccacctggcccgattgacagcaggtgcccggggctggctgcgcgaagggggcggggcctccggaggctggccagccaattgaggtcgtccggaaaaaagtggtcgcggcgttgccaaggtaggctgcgcagtgtctgggatgatgtcatggctccgtcttaaaggggacgcgggcggcagaaagtggagctgggctggtgtgcgcgcggccggagtctgtggagctggaaattcaccggtccaggaagacgtctttcccgcgtcccagcaccggtccagaaagacgtctttcccgcgtcccagcacctcgggccacgctccttcgtgagagcgccctctccaaggaggccggccctggatatttcacccaaaatatttattttttctttttttctaggtaaggtgtcttgctctgtcgctcaggctggaaatcttgggctcaagcgatcctcccgcgccagccagtaggggggactacaggcgcgcaccatatttatttatttttactgaaatagtctccgtagagactgttaaaaattgccgatgtcgactatattgcaagtcgtcacggtggggtattgcgaaaagttttcaattagcaataatcgcgcttcggataaacctcattggccaccatacggccaccgcgcaacgctagctaattaaaaaaaattttttttgtagagaagggatctcgctatgttccccgggctagcctcgaactcctgagcttaagcgatcctcccgcttagtctttccaaagcgttgggattacaggcgtcagctattgcgcacggccccataatatttcctcgttgagcactgaagaaaagatccttttccttataaaaattacagtttcgtggtattttggtcctggcatttattgagcacctgctctgtgcctgcggagcacttctgcccactttacataagttatattaaatccttgcaacaatatcaggtagttgtattattactcccatttttcagtcagggtcttcacactttggtaacctgcccaagattattgggtgtggaattggcatgcaggtagccccctgcg

SEQ ID NO: 37672 - DNA, 1147 bp, Homo sapiens
taattacaataattcacaacttttcttgaacccatcacagagtgagattatcaactagcctgaaatcgtagaaaagacaagcacctccaaggacagatagaatgggaatactggctcacccatggcagagaagggaagaagatgaggctatcatacaggagtgtcagctagaaatgcagctaacatgtttacacattgctagaggttgactgtgtgaacttgcacgggagcacaaaagccctggaagctgtagacactggtgctattcacacctgagccagaaattagcaacagaaagatacccggcaaaccctcaaaaagtctgaaattcaacaacatacttctaaaataagccacgggtgaaatgagtagtaacaagagaaattataaaatattttgaattgattggaaatgaaagcacaatattaaaatctgtaggctgcaggtaaagcaatacttggaagaaaatttatagcattacatgcttattttgaacagaaatgtttcacatcaataatctacatttctgttttgagacactagaaaaagaataaattaaacccagagtaagcaaaaggaaggaaaataaagagtaaaaattaatgaaatagaaaacagaaagtagcaaaaaaaaaaaaaaatcaataaaaccgaagctggtgcctcaaaaagtccataaaatggataaaactctacagagagtgactgtgataaaaagggagaagtcaaaaatataaggaactaaaatgtggacatcattgcatacactttacacacaaaaagaatgataaaggagtattacaagcaactccatgcccacaaatttaacagctaggagaaatggacacattctttgacagtcggctagatctgacacaatctgccaaagctcactcaaactgaaatagtcgtgcacacagttaaaatttaatttgtggtttaaaatcttcccacaaagaaaagcccgagcttaaatgatttcactcgtggaaaagaattctctaccaaccatttaagaaagaaataatacctacgttacataaactttccgacatacaggagagaacattcctaattcagcattaccctgaatcaggaccacataaagacttgaaaagtataagccaatatccttcgtaaacataga

SEQ ID NO: 37673 - DNA, 2541 bp, Homo sapiens
tccttctcaatgtttttccttgtgtaactttagtacaatcaatctcagctaagataaagaagacaggatacataatggacaggtaatttggggtatccttcaagaagacaggattggaggtggcctcctgcaggagagggctgtggggaaaagagacaagtgtggaagtgctaggagcctggaagcaggagtggatcagaatgcttgatctgcaatgcttctgaggctggccctgccctttcttccagggatcaaagaggaaaggcatgggccacatcccatagaaatgaatgaacccttgctcagaggagatgagtcatctacttatgttgttcaaagtagcttggagtaacaagaacagagggaagctgtcaggaaggacatcagcaggctattttagtcgttgcgtgctcaaacagggcaggctgcctctagctctgggcagtccacaccacaggaagcaaagggagcgggcactccttggacagacttgctcacagacctcataggtctgtgaacagcttgccttcctcctcaccatcctccgttcctttggtgacatgagcagaatctagaccatggaaagtacatgaccatttgtaaactcacaatgtgttgcttttctatactatgtaacaaattaccacaaactttgaggcttaaagcaatgcccgttcattatcttacaattctgtaagaatgcctggtttatctgctcgaggtctcacaaggaaatgcaggtgtcagcaagatgtgtcctcatctgaagctcaaagttcttttaagttcattctggttgttgataaaattcgggttgctttcagtcttttgccatatgaccctaccattttcaaaagcagcacgaagaaactctcttgcatccaatatctcccttacctcaaatacctgacatttctgtttctgattgctaaagccagattttaaaggttcgtggattaggtcaggctcacccaaaaaaaatctatctcaaaggtcaattgatttggggccttagttacagtttcaaaatcctctatagcaacacctagattggtgtttgattgaataattgggagaatgtatgtacaggtacattagaggccagaaatttttagaattctggtctatcttagaattctgcctatcataagcaggatatatgactacttggctgaacaggtaaaatttaaaaataaaacaaagatttccaaatgcctgccagtgctggtcctgtttgtttccattactggctgtccaaagacagaagtagggccaaaagggacagtgtgaggtatttataaaccaagctgaagcaggcatacagctgttctctgtgctgctgcagcagaactacgaactgtccatattttcgaatagtctgaggctcaaaagaattagaaagcagcagctatgaattagagactagcttggaaagtaaactgcaattttgtggtcaagggcaagtttcctacaccacagaaagatgacactgcagtgccaggaaacagctgaagaaatggcttagcaactgccctgaggcagaccttatgaatgacagtgacacagcactctgttaagcatagttttgggcaggaagtcgggtcaaatcaatatgcagtactttgtaccactcaattaccgcaaaatactactatcctcctttcaaaaacattttagattgaaggctgagctggggagttgatgtaaaatcttttatggaaagattgggtaggtaggaattgaaaagctaagaggcaccaagtatccctttagggggcctatttgattttcttggaataccaaaaagtcatcagagaaaaatgcctttcataaactaaatttatcttgacaataaagacatctatttttagcaatagtctattcaacgtccattttttttatagccatgaagtacctactttaaccttcagatctgaaatcaagattttctgaatgtaataattatataagccaaagattttagtaaaccaagtttctacccaaagcatcttttacagcctgcaatgaatgtctggagtgaaactgcctttgcaaaattagaacagtaagagaaatctgacatagttgacgccatcttgcttctgacctccaagctgtcctttgtcatttctgggaacaggcaaagctaactttgggaggaatttagtttatagtttaacattaaagcaaggatgataataacctttcccaaaacgaaactgcttctgaaaactaatgaaaagccatgaggttagggttatcagaggggcctgagataaccggacattgtctgggagatcataaggtttctaaatttcccaatcactcctgtaggaagcattactactacagaacctaaggttggtcttttgagagatcctttcagatgtttgcatttctgacaactggctgactcaaccggtcctgtggcccccacccaaaggctgactcagagcaggaggaccatattccacatccctatgattccatcctcaaccaatcaacattcctcattccctagccccctgcccacaaaactat

SEQ ID NO: 37674 - DNA, 454 bp, Homo sapiens
atgttaattcaatcaactggttttgacagcaaaagttgagaatagtttgaagaaacaaaatagcacagaagaagaaaaaaaagcaacagaggtactgtcagtgaaaatggcaaagttagggacatttgaaaattctaacaagaacaagaaaattggcagcatcagaataaactttctaagaactctggcaattaaccaaaagcttgcagcaatctccaaaagcttgcagcaatccatggaatgttaatacatttttaaaaagctgaatctcaacaagaacagtgaaatatgtggcatttaacttttctattctcattctcttctctccagctctgtgacagcactataaccaacagcccaatcacagtgaaaatcagcagcctgacaggcaataagggtggcagaacaatgctgcagctcctcgaaagcctgatttccagagaactgtctttat

SEQ ID NO: 37675 - DNA, 2128 bp, Homo sapiens
ttttttttaaactattcacttagtcaattcttcatgaaggctctgtgaccattcacatgtcccttggctcaaaaagaggtagtgtagatgaaattacactgatttggtcttcaagattacaaaataatttttgaccctgtccaagtacccgttttgcagcagtacaatactaatgagatttttaaaataggggccagcccttaactgtaaattatagataaatgcttgcaagctggcaacttcacgtttatttttaaaggctttcacatcaaagataaaggcaccgaatcacgtattttaaaataagaaatgtaaacaggctttcaacagcttactaaagagttaaatggaattgtatttaggtctaataataaagttatcaataacgcagagacactaaaggaggaagctacaggaccaagatttcccctcgaagaaatgtctgaacaaattcaaagtgaaattttttaagctgtgtctcgctatttttaccacattttaaagtaagctctgtctgcatgcaaccaaccgcaaccaagaaaacagaagtgtcctaaaatgtacctattcgccgcaataaagccaaaaaatatgcccctcctacctagcgggccaagtggcaagaacgtacgagaagtcaggaagttttgaaatggcagtgacaggagacgggggaaggcacgggaaggaatcacggagagcgaaggccactccgtgcggcgggcgccgcgaggtcccggctcgggacggtacccgaccgcccaactttgcgccggagccccggccgcggcccttcctcccggcccagccctcccggcctccgcgagagcggggtgacagccccgccgcagggacgccgccgggggacacccaccttccttctcggcccgcgccgcagccactacgagggtcatcaccaggtgcagcgcgcctaggaggccggcggccgcgctccgcgggcccccgctacgggcggccgcaggttccagcccggccccggcggacgtggagacggcggcggtggtggctccggttgctcctcctcccgcccgcttccccatccctgccggccgggggccgccgcgctcgaggtccggcgcggcccttctcggcgaggcggcggcggcgcggaagccgtggtccgggctctggccgcggcgccgggagcgacaacggttgcgagcccggggctcgatctccgagcgtgggcctgggtccgtgcgtgcgtgtgagcgagagtgtcagtcacggtctttgcctgggcatcgcctacaagcagtcggagcggagaggccgcgggtcaggcgcggcgggcggccatactggaaacgggcacggcccgcgagccctgagcgctggcctgcgaggggcggggcgcggctctgggcaccgcccacgctgtgccgacacctgggctgtccggcggtcagtctgtccgccccggagccccctgggccccacctcctcgtcccgctctcggaggcctgcggcttcacggccagacagaaccaggacagaacaaccccagcccgttaccgctacctggcgcaggagaaggagggaggcaggcccaggtccagctgccaggacttatgatggcggcttctgcttcgcggaggcggtgtcggcaatcacgtggagacggggcggcctcgccgcgcagccgccgcgttgcgtgggcggggcaggggcggagttgcggggcgctaacctcttctccggcgcctgggcaatcctccgtgctctgtcctacagtggtagagccttccaggggtgtgagtgcgcatacagaccgcgagacgagcgcggaaggtccgttccagtgactcttcctggtggcacccccacctctcgaccgctttgacgtcgagaataccccgggcctgactcagttcttgatggtgcttccttgaggatggtggcccgctgaactcatccttgggtcttccaaatcatggtacccaggaggagcttgatggagtcctcttgccttggcttgtgcccacattggcgcggaacacctcgtgtgcagaaagcgtcggtgactctggatggagaaggcaggggcaaacagactgctctttagaatatccagtagccggcttcctctctcgaggaagaattcttt

SEQ ID NO: 37676 - DNA, 653 bp, Homo sapiens
aacaaaggttcagcaggaactgcctcactctctcagtttctccttcctcttcagagggagtgcctctgttttaattccagctcaggttctttctcacacatatatacaaggagttaacattctccgtctcctctggttccagtttttgcagtgggcttaggaaaatgcttttcctcccttcatttcctttatcaccctccctcctccaccaaacattctgatcatggccataagcccaagcagtggcagtgatagacttgtataaagaaaaggaaaacccattgaacctgaaaagtaaacagcacaaaggtcaaataacaacgaaaggcttgtcaaaggcttgtacatggttgccaagagtgtggtactggcaagcaatgctttgagactgtacaggtagagagaagttattagggccgcagcatccatgggagggctttggggagagagagaagagctagagctgaccctgaagggacggtgattcccaaactgtggtaatctgggtggcctgagtaaagtcatctgtgctcagaggcagggaccaggtgggtctctctgggatgggggtttgtgttggaggcaatgagcaaaagtctgaaagtataatttgagcccttaatggtaaagtccagaagtttgacatcaaagat

SEQ ID NO: 37677 - DNA, 1609 bp, Homo sapiens
aagaattaagattttaattttttgcttgtctggttggaatgttcagtttcctaaacatctcctggggagtgagtacgtctgcacttcaggaagtgctcttgtccggagggcaaaaggttgggggcgcatccccgggtcgcggctcctccaggaaactttcccttggggatccgtcagggcctcagatgcctcagtggatgacagggtgaagatgccatcgctcagtcaagtccagaagttcaagaactccttgcaggtgaagcagtcacaggatagggtgggatcttgtgggaacctagcagtaggaattggcgcgagcagctcggtcaccggccctactgtctcagagggcggacccagctcgggctggtagtggggcgggggtcgcagggcgcgggccgggccctcagcgcgcatgcgcgacaagggggcggggccagggcggggctgcgcccggcgtctagagcggcggcggctggctagggctgcggcgcgcgtggagggttcgctgctggtttgccgccgggtcgggctccgtgggccggggcaggaggaccagcacctgaggccgggcccgcagcccgcgacttcacagccaggcggcggcgctgctgctgctgcggggctctggcgcgcagcccggcgggacagcggggcggctggcgccgggggccggggagcgccaggtaggtgggccgggccgggcaggaggcgacgcggccgccgcgggggccggggccggggacggacagcgggcgcgggggcgcgtccaggtccccgctggggcggatgtggacggcgcccgcggttttcatggaaattgcactgcctaacggtgccagtggtccacctgcggtggcgtcttttgagaacaatccgagcccggccgacccccagccccgtgaagacgcggccgccccagcagggagccgggtgccgagcgggcgcgtggccgcgggacgcagacgcggtgcctgcccgatgcggctccagggctgggtctacgggctcctgaagctggaggccttgccgtgtttggggtggaaacataaccgggtgaaagtaaacatgcatctccgtgtgggaaatctggtctccatcctcgaaactcttccattttctgcctgcctttagaccccgacaacatttctagcatctttgctttctatattttatttctctctggctttgctagtcaattaattgaggcctgagaaatgtgcagggatctgtggctgtctcttgaaaagccagccaggaatgggtaggccccagaagacagacgttcaaaatgtcagaggtaaatttgtgtctttgtgggcgaaggaagggaatgttgatggtctcgcttcccttcccctgtcgcctgccctctgacattacataatgatgggttcttcctgccccgagttcatccgtaatgacagaccatgaaaatgttcctctgggtaagaaagacctatatgtggtagagcccatcttctcttttgctttgccactgaatgtgtcttgtgttgggaacctgcctaagagtggaatttgatttgtcgcctgcccctcagggcatttaaaccaagggaatgggggtggggtggcgatttgggtgttg

SEQ ID NO: 37678 - DNA, 1646 bp, Homo sapiens
cagggcatgagccactgtacccagctacttttacgtttttcattctcacccctttcttctggaaacactgcagagaccatgagaacaggagcttgtcttacttgatagtgcaaacagtcttacaaatagtgttcaaccatcgattgcccaaaacacgtgttttgtgactattattgtaggtgcctttgaactgtatggtgtgttaaataactccattggagggaggaagatctttgtgttttgagttgattatttaattattctttaattagtctaatgtctttaccaagctagatattaatatcttttgtcaaagagagaagaaagccagtggatgggttgtgaagtggtgaggggccacttcacaaatggtgagtgggtgggtttttatttccagcagtgtcactggaaacaactttgtaccaacttgcatggtaaggagcattcaggttttaaagttaatctcattcagtttctcctgtgggacaacattggcctttctcattggggatttgactgttgggccttgtccctgggtatgtcccagcccagacactcagggcactggccaccctgcctcagcccctctggagcaaagagagttttaagcagtagtggatgtaactcatttaaaataggattagatctagctgggttagcttagtggcatgcacctggtgaggctgtattctctagctacttgggagaccgaggcaggaggattgcatgagcccaggagtttgataccagcctggtcggtatagtgagaccagcctgtctcaaacaaacaaacaaaaacaggattacatgagctatgactaaattccagggcagtaactgctgtgtcattctttgggaactggtcatcccaggatttgatcagtgtttcatatcataggttggctgttttgtaaactattaggattgtaccagtgtttgtcatgggaactagcagcctgtgacgtagactgtgaacctaacttaattgactactgtaatgaatacaaacagttgctatttttacctcagaacgtagatttgtctgcaaattaaacatttgagacaataaacaggagtttggtttattaaagctgtttgagcttgctacttaggcaggcctagaaataggattggctagctttttctgattatgtagatgttgactatattagggagaaactcttatttttgttttattttattttagagacggggtctcgctctgttgcccaggctatagtgtagtagacagccatagctcgctgcagcctcaaactctagggctcaagcagttctcccacctcagcctcccaattagcaaggactacaggcatatgccactgtgcccagctaattaaacaaaaatttttttttttttttttttttgtttaaatgaggtcttgttatgttgcccaggctggtctggaactcctggcctcaaatgatcctcctgccttaacctccgaaagtgcttggattgcaagcatgagccatcacaccctgcctaacttaacgtttaaacaaggcttgagcctgggcaaaatagtgaaacttcatctttactaaaaattaaaaaattagctgggcatggtggtgcacacacatctgtagtcccagctgctcaggaggctgaggcaggaggatag

SEQ ID NO: 37679 - DNA, 2477 bp, Homo sapiens
ccactgtgaacctcactacatgtttcagtgcattccaagagggtgctgaggagacctgtgtctgtagccggggagtgaaggaagagtgtaggggaagcaagatacgaaatcgtgaaaatatggagttgccttatttttacaacttaacatccaagaatgcagagaactgtaactcagaaacaaattcacatcaacacaagtcaaactgagcacacattgtcacaactgaacaggcaggagacactactggccagggcagtgtaccaggtttacgcaactctctggaatcattaattctacagattatcatttctaggcaggcaagaaacctggcttattctcctttatgtctccaaagcctagtagagtgctagcattcaataaaggcttcgtgaactgaaatgggttaacctttacaaaaacccgacagggtgcgtttatcgttatctccgatttaaccccacagggaactggggctccgacagctcagtggatctgcgcacgttcagtgagcccgagctgtgacctacgcccgggatggttaactccaaccgccgccgcgggcgacccgctgccctccgccgagccaggcctgcctgggacaggggtcgtcaccaccgggagcgcccggccgcgctacctggaccacacagtccgactgcagcagacacgcgcccaggtcctccttcaggcccgcgcacgcgccgccctgcggcttgtcctcataatacttaggcatgacggcgcttcccctccgatgcggacgcgactttctcccaccgcaacacttgcaaccgggtcgggagcgagcgaggccccagtctcaggggaccggaagccagcggcaacaacttccggcgggccgcggcggtagggccgaggactacgggggccgagaggtggcgcgtccgcggcggaagtcggttcccgtgacgcggcgcgccccaagggccggctccgttgagggaagggaagcccgcccggtggcggctggggtcggctgctgggaggaggtggtgggctggttcggacgtgggtcgaggctgtagcaggactccaggtgaggcctgaggaccactctgccctcccgcggcccgggctcgcgccgggggccatttaatcccgacagcttgcggcctgacgtcgctgcggcctggcagtgaccatgtcggcgtccggcccctcggccggcgatagagttgcggctaaaatgaaaggacgcccagttacatttgcatcgtagataaagaaagagcatttagtataagcatgtccgaaatgttgcgtgggatgtaggcatactaaaaccttattcgtggcctgtctgaaatccaaatggagctgggtattctgtgtttttatttgctaaatctggcagccgtacccgcggccccgggcagggagggagcagctgggctcggccagaccctgccggcgtctggggggcctgcgaagtggaggggagacgggcagccgggcagtggccggcgttccccggagctcggaccggttggattggactccgacgctaccgctccctctgctgaactattccggatgtaaaacactagggatcggagtttttcttggttttttaatctcattctagtgaccgagaagcttgctggcagtgcgctgatggatctgtgtgaataggccatttatttgacctcttcagtaacactgttctaaccggctgaaactgctttcttaggcattttcttaaaagcttggtggttaagagcacggaatttcgagtcagatttccaatcttggctctatcactatcctcggagtcatggggcagtcacatcatccctgtctctgtaatggtagctgcccctggataagtgttattaggtgattcagaagggtgggctgttgcccttgcctgaggttgcagtctgcggttcccaagccccaagacccgcctcagaactaactgcatttgcttttgactcctggcctttctctagggttgggaagaacatggaaagtgacctccctgccaaataactcagaagaggagtgtcggtagccaaatgtttcttcagaatacgtgtaaaagaaatgtttttcttccatctaggaagatgttaccgagtacttcagtgaattccttagtgcaggggaacggagtcttgaattccagggatgcggcaagacacacagccggagcgaaacgctacaaatatctgagaaggcttttccgctttcggcaaatggactttgaatttgctgcctggcagatgctctacctgttcacatccccacagagagtttacagaaattttcattatcgaaaacagacgaaggaccagtgggccagagatgaccctgctttcttggtcctgttaagtatctggctctgtggtaagtgtgtttatctgagatagaattgaacgctgagtgtttctgattagattttttgttataaatgtgttgtgggtcagaatctggaaatattggaaactatt

SEQ ID NO: 37680 - DNA, 2006 bp, Homo sapiens
ctatttcttatgagagtggaaaaggctattataaaaatggtcttcacttcatgaacctcctgaaagggtctagagatccccacaggtccttggatcacatgctcagaaccactaatccagaaaaaatgaaagaaaatataccaaaaatgtttaacactgctctaaagatttagttcattggtattttatttaagatttcatcctattaggtaaggctgatctattagtctcttttttatgctattcttgtccactactggtttcagagtccagtgcaactttatccactgtatccattgcacaatgggtctagaactggacaattactcacatccccaaaacctgattagtaatgtttctgaagcagcacaaaaaaatcagttaatgttctgtaataacccaatgttctcagtgtagtcccctctcatatgtcggccatgaataatatcctttcagagttaagaatacctcaaacagattccagacaacctctgagcacagcacatgtactgcttaagaagctttccaacctggaaaaattagattaggagtctgtttcaggaaatggatgctagccaactaagctgaacataaaataaaataataccatgccaagtgcaaggtctaaatcggcaaactttaacatatcagcaagaaaggctgctgaccaatttggcagaggctaggtctacattctagaccctagttaggtcctgttttaaaattaggtccttatttataacacctgaaacattcaagactcttctttttagaaagtcaatatggcaaaaactttcttatgccctgatgttgtatgtgtatatttacagctcaaagagtcccaggtgtgctggtgcctaaccctggctgccaatcagaattacctaggggcacgttcgagaacttcccaggggatgtctaacttctagcataacagagtgagaaggctcacaaatcctcttcccacaaagcaactataaagctggtcaagagtcaaaaacaacctagttggtgctctggaaagcaagcaagacattcaacaaactgagaagtgtttattcatgaaacccactggactccaggtgagaacagcacaagtctgtgacttttcctgccaagagctgccctcatctgccctgccctcagctctgtcaattcagaagtttaacaggcgtggggcaggccttgaaaactagcaaactcactgccactgctggcagggactcattggatttgcagtgttgtcagtgagagcagcaagcccagaggcaggcaagcagcacggagggccagaggcctgctgccatgaggctgctgttctatctgggacaagcaatggactggcacaccagctggagacttaatagggaggccttgaaaatgagatggctgtagggggcttataaagctcttcacacatcccaggtggactggaggctctgagcatgcacagcagacagcagtgcaggcccacaccacccatgcacacctggtcattagagcccatgcatgcacacacacagaggagctgtaaaaggagaccagggcaaagtacagctggggcgcactcgcaaacagcttgcagtaccgtgtgctccacagtccaacaggtcctgagcagagaagggagccctaccggctcgaggtgtttgactacaagcactgaccaatctttactgaacactatgctatgcagacacaggggcaacctctctaggaaaccaggcttaaaaataagaactaatcaaaacggaagtacagagacatccagagtcagatacagccggagagacagacttgagatttagtccagtccagttacttaaacaaatagcaaataaaacaatcaccatccacttgagttaaaatgtaaagaatccagaactgcatcaatatattacctaaaatatatggtggtcaacaaaaattcacaagacagcaaaggaaaaagaaaccaggactcatactcgggggaaaaataaaattctggcagtcagtggaagtgg

SEQ ID NO: 37681 - DNA, 890 bp, Homo sapiens
ccaggcatggtggcacatacctgtatagtcccagctacttgggaggctaaggtgggaggatggcttgagcccaggaggcagaggttgcagtgaaccatgatcacaccactgcactatagcctgggcaacagagccagatcctgcctcaattaaaaaaaaaaaagtactatgccaataaaccactaatatcctgtaactaggattagcaaatttccctcaagatcaaatttgttattgcagtagtttatgtgctgagaccaataaggtcaatgttcaattactcctccacagctgagcaaacatgcttctggagagtacaccagaggcgcaactgacattgggaacaaacatcccttaaggcaggtgacaggaggacatctggagtgctgcatttctaccttatcattaaccctagctttccgataaggaaacccaagttacttaccttgattccaagaagctcccctgagaagagggtttattgagcttctagatcttaatcagcacactgaaagattacctttcattactgccccagcaaatgcctgccaccacctccggaaatgcttgccctctccccattttaagcacggattgcaatgctgtgcaggtttcacaggtgtgattaattcattggatcgtggactctgtcaggtacagaggtcataatgatcttaaatgatggttctagatcgcagggagcttcattcaccagcatgcctaaacgagttcagcagcagcattcaggttccttgttccacctgatcatggccagtcattctctaccaccgcctctcacttcatgaacagggtgactgcatgctatctttgcctaggacggttccaatttacaactgttaccccagcatgactgtcaacagtactccctt

SEQ ID NO: 37682 - DNA, 2342 bp, Homo sapiens
cgttccaacgaacgactgtcattatcttttatcaaataatctgtccaacagcaaaagcacaacagcaaaatacgtggaaagcattcaaagcatacattgtgcctgcttctattttccaatgcggaatgtaggcaatgaaaccgctccagagaaacacactgttgcgaggaataaaggcgggtgtgcaagtggctcgactgccagctcagaaaagctcgcctccgagatgtcacctggcacacttggtggagtcaccgagacccagcctcagggtcctactgcagcttcctcattacggagagagctgaggcctggggaaacgggggctgctctttcacgcgggccccgcagcccttcactttgtgtgaaaattccctgcgaaggctgcacggccggtcccctcgggagcagcccctgcccctgcgcctcggaccgtccggccccgcccacctgccccgcggcccccgcgaaagcgccgactcccgcgcagcccccgggtcccacaggcagctgtccctccccctccgcaccccccggatcagcactttgctccactttcccccaaagtcgccgagccccgccacgccggggagcgccaggaacgcaccaggcgccgagccggccgcagagagggcgcgcgaccccgaggggtgcgcggtgcggggcagggacgctgggaggacggcccggcccgcgccccgccgcccgcccccgaggcccagccgctcccggagccggccccgcgcccagaggcgccaacagctcccccgcacagagctccggccgggccgcggcgcagtaggctcctttaccagcaggtggatctcccgcagcccggggccgccagcccggccgccggcgccgcccccaactcccgcgccctccgcgcagccgccccgcgccccctcccgcccccgcgcgccgccgctgccgccgcgagcccctcacccgccgctggcgtcgccgtgctcccgcggctgccggcggagctgctgtagccgccgccgccgctgccgccgccgctgcgggccgccccgcccgccccgccggctccgcccccgccgctggagcgcccgccccgccccgccccgccgggccgccccgaccccgccagccattggccggccccgcgggccccgcgccccgcgccccgcgccccaccagtggcccgcgcgactgtcacttaggggcgccgccacgcagcctgcggagcgttcgggaggctggcccggctcatcggtgtcacggcgaggtccggagcggagccgcggtctcgggtcccagctctgggcgccggcctgctccccgccgccccgctgccacatctggctgagatcctcccggcgcgtgcagggaccgctccggcggccaacaaaggcccgggcgagccctcggcctgcgcctcggcgcgcgacccgaccacccggggctgccccagctcccaggcgcctgcctgcctcgacccggccccttcccagcggcgcgccccgctccgggccgcccaaactgggcggcctccccggggacaggtcccgggcccagccccacaggagctcccgaggccccgcggacggtcgcgacagccccaacttcccggtgagaaccccgcgaatcggccagaagggctgatttcagcaactgggaaggagaaaaacaactagggtttcaacgcacatcgttgggtgctaatgcccctgattttccactatgccccgttttcttgaaccccatgtccttatctgtcgccgtttcacaaggttagaggttaacttcaaaggcaaaaaactgactcgtttgtagaaagcctgggtggtctgtccctgtttttcatagtatccataggacttgtgctaacagtaactacccctgggtacgtcctcttttgaatacttaactgtatagcaggcaaccgtatagcaggcatgggtgttagatcgtttattgcatatctcatgttttaaatttattccccatttttcataagaggaaactagctgagaggtgaaagggcttgcccaaggtcacacagctggtaatggttcaaaaacaagggatgtgttaactttattgccgcaataatccttacagcaatcctaccgagtaacctgtaagggaattgaggggccaaagatcaaggaggcagccttgttcctgccaaactcccaaagtaataagtagattcttttcagaaaacagtaatttcaataatcgaaaactcttaagaggcatcaatcagaacagggtcccctccccacctccgataaattccattatttttatctcaagataagaataattaataatcagctagaacatgcatggagttatcagccttcccatgt

SEQ ID NO: 37683 - DNA, 1050 bp, Homo sapiens
aaatcaacaacccaagggagctgtgtgaacacttcatactttggcatatgctacttccaattttctccattatgctgtcatcctaaaaatgcacatcaacagctcattcccaggtcttcacaacattctctgtggaaaagaggcctgagtttgctaagacttcggatctaaagtggatccatcatcgccatttctcacagccagctgtgctagaacagtcactgtgcctcgttgcttcaacaaatagaacagcggtcctctgctctgcctgccatccaggtccactgccacagccctggttgacctggtggaaatgggacctgtctacagacactaagaggacttctggggcagaggtgggccccaggccctggggacacatggggccacaccactgcggcagggtttgtcaggcttcctagataaacagcttgaggggttttgctttttaaaagccatttattgatctgttgtcagtcttgactcacaggctgctcctgatcaatacatgctggcaacgtctacagtcgctcgtcatcagatctgtcccagagccaggctgtgtgatctcactgtggaactcagggtggtaatgctcaaccaagtcttcttctcaaaaccatgctgagcattttgagactgagcaagagcttttcagggcaggcccccactgctaatgacaggagacggtgctgtgtcccagttccaccttaaattaagcttaccgccattccttcctctcctcattcaacaaatagagtcaatcatcgctgtgagctgactccatatttgagaattcgcctactcgctaaaatacatttgtaatcccaaaatcaatatgcatggtgttggcatggtcatttgcaaacacgtgcagggcagcaaaacatttgagtttcccaatgtgcaagttcccagctgaggtcaagcagtgatgcgccgccttattgttttagctcttacaccgtatacagtatcttttttgtagtctactcagtgccacattttggggcactaggttttcttggtgattctgctggttaggctgcc

SEQ ID NO: 37684 - DNA, 729 bp, Homo sapiens
ctgcccttttgtagtccaacattccccgctacctttaacccctggcaaccacttataacttctctgttcctataattttgccttttctagaatgtcatgtagattaagtcacacagtatgtccccttttcattccagcttctttcactcagcacaatgcattagaggctcactcatgttataccagatcaatagcctattcctttttattgctgagtagaactccattgtgtggatataccagtttgttgaaccatttcaacctgctgaaagacatctgggttcttttcagtttttagcaattataaataagttgctatagtttgtgtgtgtgtgtgtgtgtgtgtgtgtgtgtgtgtgtaaacataagttttcactgcccagtaaatacctaggagttggattgctgagtcataggctaagtgtatgtttaacttcacaaggagctgccaaaatgtttttccaaagtggctgtgccattttgcattcctcccttcaatgcatccttatcagctcctgttgttatggtggttttctccagacgtttaatacgtgtgtcctggtatctcattgcagttttactctgcattacctaatgattatagatattgagcatttcttcatatgcttctttgccattttgtacatcttcttaggtaaagcatgatttaaaatttgctccccattttgtaactgagttatttgttttcttatttttgaattttgagag

SEQ ID NO: 37685 - DNA, 1517 bp, Homo sapiens
caccagtacagaaaattttaaacaaggaaatctcctaggatataaggtcctggaatggaagaaggaaaacgttgggacactataatctatgcaaactttcccgaagctgcgaaaaaaaaaaagtgaaaaaaaaccatatttctgtgagtttttaggtatcaagtccatgatcacctagttatccaatttaagtctcaaatagtttttcaacaaaagccagctttccctgcctttactgtgtataatttttactaaaattatctgagattttcatgcaaatgcctatgtaatctcagcctttcaccaccccaagtctagaaagaggctcagaaatgagcgatcgggagtcaggctgaactcccaaatctgtgacttccaaattcctcggctccaccagagcttccagagcgtttctaaactgaacagtctccccaacaaccaagcggagagctgcgggaggacgcgaagcagtgaccataggaactgggctcaaacctaacctcccaagaaacaggggcaactcgtgctgccgagcttccggccggcagctgtgcccgccgctgcccctcacagccgctcccgctgctagcgcccaactccgcccgccacggccccgcacccgccactcctgcccgcttgcagccgccttctcagagaccttccagtccagtagcagcactctccccaccccgcgcacctccgcagcttctacctggagctccgggtccctccccgggctcctcggcccgccgtcctgcccagagctcatccccgcgactgtcagctctcggcctcagcgggggatacaagaaccgcccactctccatcctccgcccctttctcctcccttcccacccccaaatcgtcctggccccgccccggcggatcggaggaaggacggagcccgcgggaaggaggagggggcggttagcgccagccagtgccgccgtggccccgccctcacgctctgtaccggagtggggctcgtcttccacctccccggcgccccagctttgcttccgtcccgctcgcccccaggcccggtgcgcacgcgtacctggctcgaccttccttctcgcggggtctacaagccgtgcgcgcgctcctacgcacggagcgacgcgtacgtctacctgcctgccttacagggcacctaggagggaccccttcctggcccatccgcgccgcgcaggcgcacgcccacgcagcgcctagacgcccgagccgagcgtcccgtctcctagtaaccagccgctagcccccttttccacgactcatttcttaatctctgcctgaggctgccgcacctggatggaacgcgcatgcgcaaggctgtctctcgcagccccgccttccctcagcttgaaacacctgctgcttcgcggcggtggctttgtgccacttttcccagggcttgggcatcattctggacccatgttcggtgaaccggttactctcagagctgctttcgggcgcagctcctgctgcagccagggcccgttttaagagaggcttcc

SEQ ID NO: 37686 - DNA, 2614 bp, Homo sapiens
aaagggaatttagaaggaagtaatataagcaaagagcaacaatattctgtgactgtttttaataataactaggaaaattcctagtgcagttaactctgaacaaaattcattcccacctgcataatacaagatagacttactcagagtgaccttggtaaaaggtgtgataataaagaaaggaggtgtcattatgtcttcattgtagctttatatgaagccctggtcatttaccgtatcagcatcagcaaactgaacactgaatgattcttactccaagaggcaagtcttagtggtttctattttaactgaaggagagattaatttctgtgcaaggttgaaaaaggtgaccacaaattctttgggcttctttcatcaagaggtgaagtccattaccccacgccttaactctgggctggctttgttgttgttttggccaatagaatatggctgaggcgctgcttccaagattaggcctgaattgagatgccctagcagccaggcagcacctgccagagcatgaataaggctatcttggaccgcccagcgtagccaacctgtgctgaatgaagccacatgaatatgcccaggagaaactagcagaagaatcacccaccttgcccacgttagagatataaaccactatttgaggcagtttgttatgcagcaaaacttagccgaaactattaccttgctaccttgactgctggtgtaatttcccatctcatggagtcacagagttttcttgccaactgcagtgagttggcaaatgggaatgatcagtagcctcagtgtgttttctgatccactccatcctgtattatcatctgcgaataccgtttttcctttaaatgcaatgtgtctttcaaagctgacttgaatttctcacctttcgagttacctgccatttggactcacttatttggaggagatatgtaaagacccagcgtaatacctgtatgctcaataaaaagtatttgctggtactccttcctgcccgtcgtgtgacctgactgctctgggcttctgggggctccccctaaactcgctccacgaaatgacccctccaacctggcacgcccgctctcctaccttcgcccagggctggccgttatctctgtgctgtcacgcggggaagtcccatctgaactggggccttatgaccttcggtacttttattcgaacgtagcctgcgtccctgcctggaacctggttcccgccctgaaggacccttacttagcactcctgcgggctgccgggaccccacggctccgcaggcggagagactaggcgcgatccctgcgcgcccctccttctcttgcgcttcagggggccggccctcagggggcggggcagcatcgcgcgcaaggcctgccggttgctcggggtcgtatgacgcacttttccagctcgagccctcacgaggccgtgggtacgaccggaagccgcaggtgggtgaagcggaaacgcttcaaaccgggatgttgcgggccgtagcgcgtgggcggccgtggggtcttgggcgcgcgcggtgtttctggcggtgggtcaggacttgcgggtcgcctccgccggtgttgaagcctcttgtgtgcacactttctcctcagcacttgggacgacctaatttcactgttaggaacggttgatcccgaacacaggagggagggtaaatatcgtaaaacatgttggacgctagctgtgtgcacgccccctgggagccaaaagggcgaagtaaaacatgcacacgaccgtaatgagattctgagtaagttgtatatcattagagaggggacaaaataatagggtcttggcgaggtcttatgaagaagctgcgcctgcctagaaagatagatgggattgtgctgttttcgctttcagttcagtgatggggagccgtgtttggcagtgcagaggtagcgaagtgtcccaagaacatggaaggtaaggaagtcttccgaggaaaaacttcaaaaaattagtcattaaagggtgagagtagaaagattcaaagtgattttgaaggaacaaaatttaaccagaacttcaaaggcttgacactatcccaacgactgtgaaatatcctgaaataccgtgcattactcagtcggggtctgatccgctactggagcatagaataaaaaaagaggggcacacctgtgccagatgaatccacgccttctctaggggagagagggtatcccggcttaagagcaggggctctcctgagttaaggaagtgtcttccccagagcccattccgtcagacgttcatatcatgtaactcagtccttttctgattatgtattcaccaagcaaacttaagagttggcttgtcaccagacctacagtgaataattgcacaggctcatctgaatatctgatagatggtctatagttctctttgtaaatcaataagctggcagtcagggatttttggacatccctttgttttcactttttctcactctgtgtgattttttcttatctttcggggttcaactgaaatgtcacatcctcactgaggtctgtttattggtttacgtgttcaggtgcttagaacagcttcttgcatcttttctcacatgatgcctttttaatgaggcttagcctaacaa

SEQ ID NO: 37687 - DNA, 2141 bp, Homo sapiens
ttctaccgctacataattttactttggcttgctttaaatgcaaatgtttaaacagaaaattaaaaataatcgtataataaacacccttattacccatcaccgaaatttttaaaattagcatttttgctcaaatagagcttcgatttttaagaaatttttgcttaaggaaaattaactaaagacatcatagcatctctttctaaaacactttggtctgcatctctaaaaattaaggaaagttttggaaaaaaaatcatattgcctaagaaaataattttaatgccccccaatctatattcaaacttttctaatagatccaaaaatgtcttttaaagttcgtacaaacccaggtcctatcaaagcttatatattacattgcgttatatcttatatctcttaagtcttttaaaatctagactagtagcctccccaccttttctaggtaacatcaatctattaaagatctaaaagaaagcggcccagttgtcctatagaatatcccaccttctgtatttaactgcttcttcgtggtgtggaaaaatcatttttaactctttcacttcaccccagacacagcaggaaccagctccttttcctcaggtcctccccgccttggctcattgctcacctttcagaacctgcaggagcagatcaatcccctcttggtaacacaccagagcctgcggataccgcgactccgaatctagttctactgcccgctttagcacagtggctgcagctgtgctctgcgggtcctgcctcagcccggacttcgccataattctggaagttctcctccgcctcaacccaggatgaagttgagcgggtctgctgcgcttccgggaagtggtcatgtgatacccaggcgcctgcgctctctttctagggactttcctgagtgggagggatttcgccggaacaaaaatgcctcagtttggaggtcgcgctcactgcgacggcaggctttgagtgtagcacttggtagttcttcctctgctctgcttcccttcggaggaaaatttcaggctgaaggtttagcgggtgccggtgagtggggaatgagtggcggagagtgcggcattcttcgcaaggtgtatccgggaaccctctgcagatcctaattgattttccctattgcgtactgaattggccggttacggcaacctaaatgggtctgcccctgatcccgtcacattggctcccgtaaggccattggcctgcaggatccccccgtttcccaatttgcaggatccagggccacgcggctttttgtgcccagactcttggagctcaagaacggagccgccgaggctggacagcttgggaaagggaacccaagcagcattttctgtgctgctgctttattcataacttagggttgccactgggtattaaggttgcttttttttttttttaatgaagacagaaaattgcctttatctttgtattgcttcattttataatgcaaacatccaagagttggcagttagaatatttgccattttattaaaactgtgatttgttaccattttgatcgagacctaccaaaagctgtttgttctgccctttttgccaagaggcagtaatgagggctgcctactgcttgttaggcactaggagttcagagaagagacacgcttccagctttcagagatctctggtatctctgcaagagtgattccatgttttgcatttcagaagtgtttttccccctttaataattgtatacattgtcggtttagaaaaagaaatcgatttttaacattcctgttgcatgcatgctcattgtaaaaagacaaaagaactatcggtcgctgggggggagaagggggaggaaaaacgccttttttcatacccccaggggtatgttaacgtttttctgacaaccttccagagtttttctgtgattacacacgttcacagacatttaaaaaaatagaaatgggatcatacttctcctgtgatgcctgatattttcctgttttacagaagacagcgtaattgtttcagggtccaggagttacgtgcctaattattaacagtaacttttactttattaaaacgtattccttgccgggcgtggtggctcacgcctgtaatctcagcactttcggaggccgaggcgggaggatcacgaggtc

SEQ ID NO: 37688 - DNA, 3451 bp, Homo sapiens
ccccaaacttcacaacaaactgtgaattcattcactcagcttctgacacagattctgacccacacaggccctctataaacgttgagctgaagagaaatattcttgcaaacttcaattctgattcctttttctttacaggaaaaggatttgaaaagcatacttgatttcatctttgtatctccatagaacacagcaggtactcaataaacatgtatttaacgttgaatgaacacgtgcctgacttctgttcaaattactacactgttaagtttcaaaagtatttgagtctaaaaaaccaaattgtaagctcctcgtgagtgctataaaattggaaaggtgctgtatttcaaacacagcaaagatttccacgctccctatcgcccaagaaaaatgtcagtaggactgtgaccctcagtgagggggctggaaggagaagataataagatactgaattgaacgttggaagctgtgctccagggataagcacagagaatgcctaccctggaactttatagaatgagcccagaatttaattatgggataactggaaaaagacgagattaagaagagctattctgggtgtaggtgttggtggtcagagcattgagaatggggtaaagagacgatgcaacccctcgttagcttttcatttttcaaaccacagcctctgattcttcctttttacagctccgctggaagggtgggacgggacacagcgcgtcctcaaattccctagtcatttcctggacacccttacaggtatccgccaaaacaatcaaggggcctggtccttaactgaaccccaggtacctccccaatggcaagccggccactccctgcgcccggggaaacagaggaaagcacagtcccggtggccccaacttcgacgcctcctggtgcgcttgcgcaagagcctctgccaggacaccgacaccggtgctggggccgcgcccctcctccgctccggatgtggagcagcagaatgttcaccagcacccggacgtggtggtcggattcttctcactaccctctgcctcacctgagctctcggtgacgcctgagaagtgaaagagcagcagtttcaaaagacacgtccactccggcttttgccttgcagtagctgccggcggctgcaaacgggccgtcacatccgcctccttattggctgcgaacctcgcgcgatatcaccttggacgccagaggaaggggcgggcggtcgggtggcgaacagttctgcgcgtgcgcctcccgcccagcagcccggaacccaaggtgtccgacccttgctttcctccgggtacacggccgaactggaaggccgcaaagcattgtgggagttgcagtttcttagtgcgcaggctgtcgtggccggactttctcaggagcgtgcttcagtattcacggtccagtgcgccagactggaaatgagacagctgtgctctcgctcagccgtgacgcttgaactgcgtttccattctgttagtgttgaatgaacatttttcttttttttgttttcttttgttaacatttttcctaaagtcgaggcataaacatatacagcacaattaacttttgcatagttaaaacccaaaatatcaccggccagatccagatatagaacattttccaccacccctgtaggtcccctcttgactcttcgaaacacaggaatttttagaactcgccctcgctttgagggtgaagctgaagacctatgttagggaattgatcggctgtgtcctgttctgttttattcagtgactgtacataatgcataatgcatggatgttactgagaggtccctattttgtcctgaatttatctctctcgcaaacccccagaggactctattggttcgttgtggttctttactgaacttcgtgcggctgagaatacaaagatataaagggaagcccaaagcccactcctgaaccgaagcgtgcgttccccgttgggagaggggtgaggtggcgaaattgacagcttcattgtccacctccgggttctagaacgtggaaaacccgcgggtgtcggctcgtggcggacgcttgagggcagggggcgctcgggctgctgcctggtcggccggtcaaccggagacgctctacccgaagcgcagctctcgatgagccgcgccctgcgtcctcacgccgaggcggctgggcgatgcgcttgcgcactgagaactcacaccatatgtgtcctgttccagtgcgcgggtctgtggagagccgggtgcgagcggcggcagcacgaggggaaaagagctgagcggagaccaaagtcagccgggagacagtgggtctgtgagagaccgaatagaggggctggggccacgagcgccattgacaagcaatggggaagaaacagaaaaacaagagcgaagacaggtagataggggttgggtccgtacggcggcggccgccgtggctcagtggagtgtgcgggtctcgccgggcgcggcgtcggaccggggtctgggctcgcgatgagcttcgcggggtaccaggcctgggcccagagtgtgcggagcgggcccaagcccccgggccgggtgggcacgtagggcctcgacggcgggcgggtcctcccagtcgagcctcgctcccccggcaccccttccccggcctgaggagcggggtagtcatttgagggttcctggtcgcgcggggagggtcaggcggcttcgccagcgtggcccaggccagtgtgagtttttttccgcgctactcttggcgagggtggggaagttctttttatgcctcttatacctgtgagtactttgggagggaagggagcttgaatgtgatgtacggccgggtttctctactcgcggtttcaggtacgttagagttatggggaggtgtttagcagttcgctgtctctcaacttaatctgatttggatacagttttcgtttatttaagggctgattgtccagccctcatgcttttcgctttccttcttccggcctgtttttttttgtcgtttctttgctctctagccttcccctaagaaaggaagggaagaagaagaaaccaaccaaccgaggtcgctcctttctaaccacctgcaatgctttggggagggaggataagggtatatgcgagttacttacctagagatttttgagacatttctgtgtgtcacattcgattgagttctgttactcatgatggaaagagttgacttcctgggagtgaacaacatctgttacattacacgttcgtacactacccaccaaacttaaatacgaggcggagagtaaggtaaattaaaaaaactagtgctagttcatcagtctgactcaaaacagatatgttgtcttgaagttaaaataagtttactaattataaattggaagcctggatcgttttctcacctagcgtttgactagcttatgagtagaattaaaagacaacaaagatagtcttgtatttcagttttaggtc

SEQ ID NO: 37689 - DNA, 975 bp, Homo sapiens
gaaccaatggtttttttcttcttgtttcttttcttttctttcactgctgcctttagatgaagtaaaggattctttggcactaagagcagatggatataagatcctcaacaaaatgatagtatggatagtctggatgacagtattgggttctcttttctcctcccaaatacaacaggctccctagcctacacctcccctcctgccccaagtgagaggcagtgaatggcaatggcccaaagtacaggctctccaattctctctttgctttgccacttactaatttgacctttggcatgttgctcatctatgatgggtagtactaaatgtgggtttgatgtttgtgatgcattttgaaccaacatcctttaatgtattcatctcaaaggacaactagctgaacaagtatttaagacatttgtggtaatgtcctattccaactttttaaaaagtaaaaagtggtgtgtttaaatcctgaaagtacagacacaaatccaactagaaatatgatgatatttactcatactgtatacttcagatattatcccaatatgaagagctcttaatgcaacagcttagactttgcccattatatactgcaataattagacaacagtgactccattactctttgtcttcatttttgttacatgccacttccaaggctcaccagatgcgctggctgactgctggtgagtgctgttctcgccctgcctttgtctttgatcatacgctgctttcagctccctctgaagttcagcaggaagggcagcaaatacctcagggtccacctagtggaaaagacgaggtcaaagtcaaacctgagctaattgtagatggtagctggtttctctttttcacaaaacagactttgttttcaaatctcacttttctgatctgtacgaattcttaacagttccccaatatcaaagctgattaaatcttcaaaatggttagagcaagaataaggaattaaga

SEQ ID NO: 37690 - DNA, 2428 bp, Homo sapiens
aacaaaagataggagtttggtacagactctaccctcaaaaggtcctacacagtaagagaagacagggctaaaaagataaacgcaacacaggaaaaggcgcaaatagcctaagaattgaatggaagagagccttgtatactggagaatgattcctggaagaggaactttaggtgagctcttaagtgtccagtacaggaaggcagggaacaatacgcagcactggtccctgcacgggcaaacccaagaatatgtgtgaaaggttggtggacagatagatggttcccacaggctgatttgctacatacagaactccatagaaagaaccaaggttatggttggtcctaccctacctaaacaggaaatggcttattctcggagactaaagtgccaagtccggaaagaccagacagatacacagaattacagactgttacataaagtccttaatagttacaagcccttgttgtgctatgtgctagtctgcattattttcacctaaatgaaaccatttctacttagtacatggcgtgagaagacgtggagataaagagaattagcagacgtatattatctgcaatttatcttacggaggagtacattaaggagtgttatgtgagattatttctttacaaactgagaataggtaggaagagcagcgaaacacagcgcggctcggtgcgcccagagcggcgtcactgtaacagtacagaagtgggcaaggggctctcggaaggacagttggggaacggcgcccagcgtatttagcgaacggacaagcagcaaggaaaaacaagggagcaacaaccgccttcggacattccgaccggttctgggatgcaccggggacgtcgaaggcggggtgcggaaaaacgctgtggctggagtgcgggtgggagcggcggctcgaccgggtcgacattctacaaacgcttgtggaacgaacgcccgaacgcgcgcgtgaatgaatggcgcggaactgaatggccggccgaggcgccggcgcaggaggaaggagtttgcggcgcggtctgaccgggccggcgggatgcggccgggcgcggagggaagggccgctgcgccaggggtcggcgcggggcggcccatggggctggcggcggcgcggggccggccgcgccatgacggaagggaaggggaggggaggtcacacattacataacccggcggctgcgagcgtcaggggaaggcgccgtggacagcccaggccgcgacaggacggccgcgggccggggccggggcgacgcacccctcccccgcgccacctcaggccgaccgcgctctggccgctgccgggcgggtctgcggcgcctccgggcgacgcgtgtccgatcccgcccctcccccaccccgccgccggcccgggggtcgctcaccttccgcgttgccccagaccaccatgcccgggcccggcggccttctccggccttgcggaccccggccccgccgccgccagtgccctcgccagggaccagggaggagggccgggggaaggcagccccaccgctgagcagcgccgcggtccacgctcccccacgctcgcggcaaccaaccccgcgcgcgctccgcggtggctctccgcccctccccctccggttagcgcgcgcgccgcagccacgccccctagcgttccgcgcgcgctccccggccccgctcgcgctcacagccgcgcggcgcacgcgctctgctccccccggcccggggcgaccccagcctcgggcgtagcaccgcggcgcccggcgtcggcctccgtgttcctcccctccccggccccgccctgttgttctgcagccgcccgcaaggggcagcgcctgggcggcacgtgaccgtctcgctagctgggcggaggggagcgcagcgcgggcccgcccacgcactgcgccgcctgcccgcccgtcctgctccggtcacccccgcgcttcgttgaccgggtcgcggctcttcggttgccattcggacagcgcgccgctccgtgcacagcgagtccccgcgcctgccccgccttggggctccccagtggggaaggacacaagtgcagacactgaccgggcttcaaaccccggtactgtgtgaagatgcgccagacgcccgggttccctccttaagcaattgatttacagtgacatctagtggagaaagggacacacatgaactgacattttcctatgtccagagcaaccgagaaccacggcccactcaggttcgcgggaaggagcactgcgccacggcgttttcgggattcgtggcctgctcccgcagggcacagacactatcttctgtcctttgagtgcccgggcagcattgcgcctgagtatttgtaaacggagggccggtatcccatcccatgtacagcgctggagttacccgagaaagcagttttctatgaatataaaaataatatcctatattatgt

SEQ ID NO: 37691 - DNA, 828 bp, Homo sapiens
tggcctgggctgggcttcatcgaggccctgtccagtcggctggattggggccagtgagcaggcttactttgtctgtgaaatagaaaaaggggccatggactcacccttcacaagcagttggttcacttcaacattttaatggaaccgacctgaaattaatgagcactgtcacactgagtaaatactgcctctcgggatgagagcggcaatgggtagaaggcagtgtgacaattcaaacccaaggccacggacaattacatagaggaagtctgttcagaatttggcggatcgaatggctgtccccaaataacaggcatgcagatggctggagtctgatgctgcctggcgagggcagaggcagatgctgcattctgagggccagcaagaggacacgacgtggcagtgggccagccagccacagccgggagccagcacaggaaagggagttggacggagtcagaaggtcaggccgccccagtgaacagggagcacattaacctttccaaagccacgggggagcttatcaggctccaaaatgcagtcatcaaaggccagccagcccagtgcagccaaggctggcccggggctacctctgggagcaggtcacggggcggcagcctgtgagcggaggtgagggcaggccctgtgcccagagtgagcagctgcagggtggtgtgctccagctggctctgggagtcccaggctggagagtggaatggtcagggtgggactgttccaggggtgggaaaaggggggaaatggagaggacgggagtgggtagagggtgctggcctgaagggctcttaaagccagagagaacagactcca

SEQ ID NO: 37692 - DNA, 1497 bp, Homo sapiens
ggaaaagttagaccagggtaagggtatgggactgtgggatggggctttatgcttgtaatctgtctgttaaataagcatgctatctgacatccaaaacacagtataagccccaggctgttagcctcctcccctcttcctacttataaacctgtagtattttttccttccactatgagaacttcattactctgagtcataattgtgtgtttaatgtttacctttgtcgctaagctgaaagctccagagtctagggagaatggcaagaccaaggaagggtctcagcatttgaggaatggctgcagaaagtgtcacgggaaggagaatcaaatggaccacactggatgcctcgtgtttttaaaggacattgttattaatgggacagggttcatactcattctgggtcattccagacacgggagtttgaactaatgggggaaagtccagggactagtccagcttcccaaaagttctttttcacagttagaataatctacaaagaaagtaagcatgattgatttcatgttcaatcagaagttaaatgattaagtggaagttacttattaacctacacttctaaaatgtaagattctaactttaagactataattctggtcatttccaacaattttattaataaaacgttgaatggtaaatttctgtattttctgggttagtgtagtagtaagtctatgacttctttgttaagaaaacccatacagagaatacaaagattatttattctaaaagtaccaatctaaaattatgaaataagagtcattatagcagctaacaaattaaatggattaattgggtagagatttgagagattataattaatgataaatcaataaagtattcaacatgaaaatctattacaaccctgtttatgttatttaacttcaagcattcagttctgtatgcttctaattagcaagctataaaagatgccatccataaaaacataatgagaagaactgtttataatgataattaagattcatttgctcagagagaagggttcacacggctacaggttgcagcaaacaaagggttaagctcattattgaggaaaatactacatttaggcagcatttattagacatttaaccctatcaggcagagccttgccttagaaaatacatcataaataatgcttcttacaagacaggcaagattttccaaagtgaggtagcaactactgggagtccatgacattctgtaactttgctgggcttgactcatccaactgtgttagtaataattaaactctagctgatggcttttatgttctctttctggtttctcaagtcttccctgcattgatgttttattaaaaatatattgtgtattgtgaaggccagtggagaaaaaattttacattttccctttccgcctctgggctggagtttgccttctatagcactttgtctcatactccgagcactgtttgaggcttctcatgggcttgccagtggcaaaattgaggctcagaggtgg

SEQ ID NO: 37693 - DNA, 2153 bp, Homo sapiens
tttgtaattctggctttagaaaaatcaaagttttcattcagcagagaagaagcttcttccccctttcacagaaactctaatatctataaagacccactcagtgaagcccaaaatgctttctagacacataattgtagcaataaaagtgtgtcttcacctcccactgtacctctgagctgatagatacaatttgttactccattgacaacctgccaacacttcacaataattagagccaatggtccttttctagatatagcataatgtaaccttcaatattaacgtttttttcccccatcagtgcaggcctaagacagaacaactctaagactagtcctagcctgaagtcacagagacctttaatgcaggtcacgggcaggacagcaatgatcaagggtaaactctaacacatgaactggtaacccagcagtcagccactgtgtggcctgctacattaaccgccctctgagccaagcaggcaccccagcggtcctcatttaaaaagaaaaaaatataagaatcttaatagagagattggggggcttatttttcatgatcatgtgcctttaaaaggaaagtcctagagtcagccctgatcaatacagcctctcctgcttcctgctttcaatctgttaagcaagaaaatgctttcatgttggcactaatcccactgtgcccccaaagaagagaaaaaaacctcccgagagactatttaatatccacacagtcggtttttagaaaaacaaaacaaaacaaaaaacccaaggaaatgaagactatcaggagaacactcccggaaaaaccctcctgaaaacatgcctgagtaaaagaaaagtcaaaagactagatagagaaatgatgtccagggagctcataatctgcctgtgcaagaattctagtttctagaaagtcactgattaataaattcatgtgctcattcatccattcacagataactgctgggcaccaatgctgtgccagtaccagggataccatagcgagcaaaacccgtagggcctacctctcagggagcttgcacattctacgggggagcaggcaaaaaacaaacataacaattttagatagtgacaagtacttgcaaacaaagtaaatagtgtgatgtaaaaaggctggtctgatcattacgattcctttcagcatgaaacttccctcatatcacaaggtataatgaggacttttagtcctttggatggaagtcctaagatgagagactatattaatcataataggtgtaaaagacaaaaatacaacaacgtaaatttcaaatgaagaagcaatatgcaatctcaatttctaccatatccccaagacccttggaagaacctatttatagctttatcgcagccattttgaaaaggtagagaaaaaaacatcacaggtttttgaaaagaaattttgcaaataacatggcagtattgcaaaatgcaaatggaaatgctgctgagccatctgctcaatattacagcaacattgggaaaaggctctgaaagaaatgatgtttgaaatcattaaaaaaataacatgtcaagtttaaaatactcaagaatcttaaaaccagcatcaacacattcagcaaccatatggccctacagcaggttaaaaaaataatcgccctgcttgcaatttctacttcaacccaatggtttctaaaacatgtttctttttcccatttgagtaccttttctttccattgaattccttggtgtttacagttacttgaattatacctggagcataatttttgtttcaccctttctgaagtagaaataagatagtaaggaagattaaaagtcacctgttcaagaaaaaggaatgtgcagatgactctatataaattgttgaacacatcttgttttaggtttattgatttctccatcctgatctcactgtctcagtaataactgctaatctcatcgagtatcgtaattttccaggcactctgctaagtgctttatagtcattatatcatttaatcaccacaaatttataaagttgatgctgttattatctacattttctagatgcgaaatttcctcaaggtcatacaggtaacatgcggcagagccagagtccaaacaactgtgggagccacgtctgtgctcttaactgctattatatgcaacaattcagtg

SEQ ID NO: 37694 - DNA, 1389 bp, Homo sapiens
catacattttcatctcagcataaaattctaagacagtccccactgccttcaggcctgacatcaaaggctccactgcctggggctctctcgctttggccaacgctgactcccactttgccctgccctcacagggcctgtcctgcctcctccccaccagcagcccagtctccttcctgtttcctgtcctccactccttgctcccactcttccctcaaacctctgcttatgctaatctcaccttctaaaccaagaccactgcaaatgccgtatttctgctacagccattgtcacagggctgggcacacagattgtcttaataagtacctgtggatttgacatgtctggattttggcaacacaaatggaatgcaaaatactgaatagataagaaaacaaaaatgcctacttctgaaaaaatacctcttcctactttcacgccacattcacaaatatacacaagttcttccaactctcctaatcttggcaagtttaaactacagttttctgaaacaaaggtcacttgctcagctacagataaataaaaattcacaagcatctccaggaaaatcaatacaggtactaaaaaatctaagttgataataaatttcagttccccttgcacatagctcaggaatgtcactatttactggaatcactgtaatatcagatatttcagaagagtattgatttggccactgaagtgtgactaaagggataaataaactgctcctggggtcaatcgatccatttatcttcactggtattttataaaaagtcaaagtagcataaactttgataaataaatgttatcatgaaagaagtattgctgacataaggatttgaaggaaaaaagaacagacagttccgctacctgaacgccacacaattggcttcacattttagtagttttaatagtagctaccgacatagaaacattctttttctcctgccctacataatccatggggccaggtcaaagtctgagccacatggccaagaaacagaggggccacaagtcaagtcctaatgaaatagaaaggcaaaggaaataacatttgtttctgccttattagaaagtaactgctagggtctccaaggtagacacatgtctttggatattttgaaggcacgtctggaaatggcagaactatttagacttagaaaatcaggatggtgtgcactctgaagtggctttttagggctttattgttaaaccatgctgcaccaataaccacttaactgcactgcaatgatcccataagatttcaatgcaaggccatggagagctcacaacatcgtggctgtaataggatattaaggcttgagaagaattttaattcaaatgtaggaaacgtgggaaccctgtgaagaggctgtaacttaccatgag

SEQ ID NO: 37695 - DNA, 1956 bp, Homo sapiens
agggcctatttatttttagaattaaaaaaaatagcaaataaaaaatgtagtgaaaacatttttgatcatttctcacttatttgtttttaatctataaattgcggtatcttgtagagctccagccaaggccaattatggtggttaagtagaaatagacgtctaaacatgaaactgtcatcatttccaaaattcatctattcttgatcatacggtaacagcatgaaactaaataaaagtaacatctatgagcccgatggcttttctcttccattgagctcaaaacatttcacctatatgtcccttaattatcctcacaatgccccttggagaaagacactgatggtgaatattatgactaggttaactcttttaaagatcaagaaacttaggataagagtttgatcatcaaaacaatgtcataaagacacactgtgtaaaaggaacagcaatgtccaaagtaccttactcagctctgcccagagaacaggagctatcctggagccaagaagtggtggcacctcttaaaccctgatgtctgacaagcccagtagtgagaagtagttaacatgagccccagaggcaaaacaggaataaatgaaataaggcaagctatttcccagtcagacagagagaaccataaggagaattctggaataaagtctcagctgttataattttttacagcccccaactgacaaaggatagaaatcagtctctttccacagctcacacacaaagcagacctatgtaacctagaattgtggaatggaagatagagaagtgaataaaaaaataaaaaatgataagattctaaagttgcccagcgagggctactgatgtcactatttttatcaagtgctacccattcattagcctgctccaatctctccctaggctgccctactggtgagaaaggtgctggagccaggacagcctgccctctggctgagtcacaggttgattcagcagacccagccagccagggggggatgacctccttcccactgcactcatccacatgcagcctgatgaaatctgatgaaatgcagtttgcttggagcactcgctccaagcaaactgcatttcccatggaggagacttttaggcaagggtatatgaagccaattgtatcccttgactagaatcatcaaaatgttttattcttatttttaaaaaactatccaaactactgatatgtctccagggttgtggggagtctaagaaataagcaaattcaaggagaagagaatgaaccacctctcacctatcttttggaaaaagttatcatgttttgcatgtttttaaaatacagtccttttcaaataacaaaaacacaattcactttcgtccaaaagcattttctgaataccactgtgtcagatactagggagacagggtcgtgattgagccatcctgctgatgagaagacaacagtctggggcaaggagaatggggaaaaggaagaagggcaccaattcacaatcaaacaatgtgagcagcctgtggtcagggcactggcaggggtagcacaaggaatcagcattgtttcctgcaggagaccagctttgagcttgagaaaacggcaggttaaggagatggaaaagaagaagggcttagaggtacaaaatacatggattactagtaagtggcctttgggagtatattcagaggcggttatgttactctctccatacctccataccaccttgcttcctttttttttttttttttttagacggagtctcactctgttgcccaggctggagtgcagcagggtgatctcagctcactgcaacctccgcctcccaggttcaagtgattcttttgcctcagcctcccgagtagctgggactacaggcatgtgccaccacacccagccagctaatttttttttttttttttttttttgtatatttagtagagacagggtttcaggacgttagccaggatggtctc

SEQ ID NO: 37696 - DNA, 1037 bp, Homo sapiens
ttttctagatatcttaagactctcggtagcccatatttttatcatccctctccatgaggtagggcaagggtacttattatccctatttcacaagagaactatgtcctagaaaattaaaagacttgtctaagctctaaactggtaacaaggcagagacatgaatttgggtctccaaactctctgctaactaaataatggcccagaagacatacaaaagtcaacacaaacagagtgccagctgttatttacactgcctacaataaatgtttgttccagaaaaaatagttcaaacaagatgagaaatagtttaaacacaaaaggctgaagggttcaatataggagaaaaaatatgtttgcttttaatacagtggaggaactgttcaggaacagtttgttcttctgtaaaggctggccttgttgtactgccgaaggccgcaagatcacaagctacgtggaattgagacgccagctcgcttcggcacaaccaacttctctcttaatgctctaagttcctgtcttcttcatagctttgacctgaaccatgaatgatctttttgacaaacaaaatttaaatgtgtgttataaacagggagcaagtgtcctaattttgatacagggtgctaagaaatacagaaaacaaaggaaattaactgggagatccagggaggctaagaaacaatctgccactgggagaaacagccatagcttctgatgagctaggaagattttgtggttgatatcacagctgtttgttgaggctgtggtgggatttctttttcaagagggtgaagggagatttgaacttggcgcctgacacaattatcctaaagtaggaaagcctcagttggaagaggatgagtttctttaaatagcccaaaggctgtgatgcgtaaaaaaggacttgacttattctggatagctccagagggcaaaactagcaagtggccagcaggaacacacatactcagagtagagcagagcttgctaataattaggactgcctcatccatagcaaggaacactcagaggctcatctc

SEQ ID NO: 37697 - DNA, 1402 bp, Homo sapiens
gtgacctccaaatcaaggtgtttattagaatcaaatggggaaactacttaactctaaagataatcagatctataccccagaacttcaaaatcttaccctccagaggggggtccaggaatgtccattttttcccatgagttgctagcagtccaattttggaaaccaccaataaacatttttagcctatgaattcatttgtaaaataggaaacatgatagtttttgcctaaatgagtcatggagatatttaaataacacgtaaaatacctagtatgatgcctctacctagaaaacagtcatagtccctttaaaaaacattttctgcaatatatgatcaagcttaagagcattcactgattaaaaatgaggacagaatggcttacatagagttaatgtttagccatctcctattttcttgcctgttttttaatcctgtcttgttcttcaagcaacacaaaatcagaaagaaatttgatacgatataacttgaatcagtttaatcaaatgccttatctatgtgaataatgccttaaaattaatgtatcatcaacacgcatttaaaagttgaatgcagtaatagaaagcctatgattttttgctcttttataataatcagaagctccagatataaactcctcactcaaaaaagtttaaaattcatacatatctccccattctcaggtaaagataaaagatcccatgtctcttctcctctgtatcacgcagttacactcactcctttaaaatcctgcaaggtattgaagtggaagaatcatcctgtcctgacatttatatctctacaaatggcttcagttctttaattgtgaagttgcttctacacattagggtgagtgttaagatactcccagacagaaaggaagagggaaggtaattggagtaatttgtatcaagtgaaaaaagtgtctcctggatttctgtattcctagttgcaagttattagactgtttctgtttgggtggttttataaaaaaaaaaactgtaaaacgtggttgcgtaagcacatctaaaggttaaactccaagcagctaatctgcatgtgagaacaagtaactgtcaaacatttaaccttttgcagattaaaaccgtctgactaacagatgtgaaaccatcgttgctataattgttagaagtagaaatctgagcatttttagaagatacaacactttttggagcagtcatgtttatgctccaggtcaactttcctgttcatgactgagatgcaatcatagcctttcatttattttcacactgtgattctcctgaattattatacgatgttcatagtttattctacagacatgctcttagaaagttataagttgaattctaatcgtcagttatatttgcacaccgtttcatacatgataattttttttccatta

SEQ ID NO: 37698 - DNA, 1023 bp, Homo sapiens
cggcccgctgctgcagccgccgccgccgccgccgccgccgcggtgctctgcgcccgcccgcccgcctctttctcctccgggaggcgcgtgtgcgcgggcgaggccgaggcgcgcgcgcaccgtgagccccgcgccgcgcccgccccgcgcgcccctgtactccccgcgccgctcctcggggtcccgcggcgctcgcaggccgcgccgccctgccgcccctctctcgtggcttttacggcccgcccgcccctcagcagccctggggtgcccggggcggccctgcaagcgggagagagcggcgaggcggcggcgccgagtgcggggggatgcggagccgtgcccggccctgtcgcatccctcggccgcccgcccgcgcccggccccgcccggccttgcccgggctgcacgcacttctcccgcggcccagaatccacttgaccctgctgggcgctcccgcgggcggcggacccgggtgggtgcgggggaattccccggccgcccaggcgcggggagagtgagctgtgccgcccgcagcagcgccccaaacaaaccgtttaaggtctctggagcccgcaagttcagcgaaataaagcggcggcgcggaggaaacctcttccacccggacctgctctccgttgcggtttggcctccagtggtggtcccacccaccctctagctggccagccctggaaaccaacctcctttctttttatttctcaccgggaagggggacaaactggcctctgggtgtcgacttcaaacttgccgcccgtctccggtctggaaaggcaggtgatcagctagaagggtgataagagtatcatcgtggctcctaaagagtaataataatctccctcattgtaaagacagctcttccccctggcttacttttttagacatgctgagaagcgcatgtctccatcagggccctacctctgcttctccacagttggcctagaaccggaagcccctccaaggccccctgactctcctgacctcttggccacagctccggattctcac

SEQ ID NO: 37699 - DNA, 1376 bp, Homo sapiens
gctggagttgaaaaaaattatcaaagaaatacttgaagaaaaaatttccaaagctgaaggacaaaattcttcagacttaaaagggtttcctgagtgcacagaacaattagtgaaaagaaagcttgcctaggcacagctttgatgtgtcagagtaccaaggataaaaacaaacatctaaaggcttttatacccagccagatatcaatcaagtgtgaaggcagaataatggtattttcagaaagaaagatctcagaaagtttattttttatacatccttttttaaagggtattatagacatattccagaaaaacaagactgagataggaagttgtgggctccagcaaattgtggttccaatccagacccctgatagcagttagaagaaatttacaacatggcaattgcattgctgacatagagggcagccagtacaggtggagcagaaggggggagatgggggggtgtatcaggtcttcaggaaaagggacttaaaaaaatgacttggggaaaattaatcaagggcaactaatgcaagaaaacaacatcagctggaaactctgaaaatcaggtggatgaatgtataataaacctgaatgtataataaggtcataattcatatatgaagcaaactaaaatgtggcaaaattagagcataaagacagagagaaattccactgaatcatgattctgggaaccttgatcagcccaggggtcatgaccttaagacatattaaaaagaacacattcctaatacatgacttcatcagtcaatgacagaatcatagcaacttggttgcaatttcaacacaaaaacaaaaggtaaacatgtatctggaaatgggacatgaatggtggggatagaacgtggagaagaggagagggccatcaataactttatcttttaaagtgggaaataaagagacatattgttgaaagttgataaaatgagaaatggagatttagcataacaccttacattacaacaataaacacaagaagaacagagataaaaatgcaaatgtcagaccctggcaatgtccaagattctgggaggagaggggtggtattatggagctatatcctcaattttcatattatggagtctgtaaatatcatctattattgacagattaaaaaaaaatagaggtataagcatgttgtctatgtgaaggcaagaccagaagaatagagaatggaaaaatggaaacaagctcgcagagtggggcccatgcctgtctcatttgttcaacgttgtatccctagagcctagaatggttgggtgccgggaatacctgcttaatgaatgcatgaaaagaagttcaccctgggcaatggtactggaggtgaagagaagggccaggggctgttgctttcc

SEQ ID NO: 37700 - DNA, 1681 bp, Homo sapiens
ttcatgcctggttgattgattcatttattcgttgactgtacttattgcttgataatagagccaaagttagtttattagatgtaatttcatggactattgcaataggtgcaataaagtgcatgagcagcttggaggtcatccaggccacacctccatttggctaatgaggcctcttggacctcagcagggggaaatgccatctccaggtcacacacttggccgacagcagagccaggtctggacaccagcccacccggctcactctggcacctctcatcagtacagcctataatgagatgccagaaagaatcctctccttttaagagcagaaaaggtcccataagcctcaccatgacttgtctactgtggcttagcatgggagccatgcattctgaccaagcccactgcagccagcattcctagcctgaggctcatgggctgtcactaaaatccaaactggaggctgccagtaggcaggccttcagttaacagagtcaccctcaaccatgggctctctggagttctgaggccagccaatccaccaggctttctccaccactgaccatctgcaggcccctaaattctagaggctgtggtgattctgggagtctcaaggtccccatttccaccctgaagttctctgtgtctatttcactgtgagagtaagcaatggtactcctcattcattcaaaataaataaaatgttctaaaaagctagtgtcgcaagcgtagctgtggttcactgaggccttaatccatgcctaatctcttgcatacttcctctctggtcattgcaaccaccatgcaaggaagctataattatctcctcatttttcagatgaaaaacctgggccaaaagagacaaacaaccttgtgtaaagtcagggtaagggtgtggaagtgtgagttggcagctgaaccctgatccatggactctgagcaggtacctcccctctgcaaggatgaaaggacatttaaggccaacaggctgagtggaggtggctggacactgattattctgctccccaccactggggttggcctgcgttcccaggattgcggtggccccttggctcttcccctaccccatcccatccctgggcttctctctctcactctctgccagccccaggcgggctcctcgtggccccaggctctcttctgccagcagcaactcctgcactggcttcctgcctccctaaaaggacttagttccagctctgtttttaaatcccagaaaatgttctggcagggccagcccataaacgtccttcttttggctggagccacactagaggtttccccttgcagtccttggcacgttgcctgggggctgctgtgcaagggtgggccttggcggtagaggttttcctggcccccttcctaggaagcacttatgggacagtacctacagatggagacgaacagttggtcagggctcagacaagtttaacttccactgtgggatcaatattcaaataaaaacgttttagtgactctgataggactgatactggggttcccagtagccatgaagaggttacagagtcagacctggactccaatgccagtcctacccgccactggccatgggaccttgggcacattatctaacctggcgaggggtgaagtgcgtgtgacccccgtctcaggggttgatctagcctaaagctaatgaagc

SEQ ID NO: 37701 - DNA, 1774 bp, Homo sapiens
accttatatggcagagggaattggaggatgtgattcagttaaggactttgggatggggggattatcctgatgggcccaatgtgttcatatagggtcctgtctgggctgtggtcagagggacatgtggctttggaagaacggtcggagagaagcaacattgctggctctgatggaggaaggaagccgaggaatgccgccagcctctacaagctgcagagacaaggaaacagactctcccccacaacctccaaagagaaacgcatgctgccatcaccctgatcatagtctggcctgcagaaccaggagtgaaagataatacatatgtgttgttttaagccaccacgttcgtgaaatttcttaacagcagtagtaggaagctaatatacccgccaagtagagattgattaatttggttaataaacaacaactcctaggaaaaagaatgactcatatcctaatgcaagtcagtgtaaccaccatgctttctgaatctgagttccaggatactgcagaacaaaggcttatgcaaaaagggcaagccaggaaggacttaatggcaatttctggcagttaaagcatttttctgtgtttggaaaaaaaaagaattcaggcagggggtaaaagatagaagctccaagagacagaaaaaaaaagttaaaatggatgggaaaagacctttcacatcaccctaaaccagctgagagccaatccccctcccctactgtctttgacagctgagcatccatgtacaggtgggaggtatacactctcaggcacaatcttaaaccagcccagcctggctctcccatctaatgcagaggagaggcccacctgagcttagaaatgctccacaaacctaagctcattcattgcttaaagaaccagcttcaccaaaagtacttgtagggagcaccagagaaagcccatgacagctgggcagcagggtacttagaggacaaggaagtcacgctactaatgtcacaagaatgatgggatttttctcttcacttattcaacatctctataccaggtgcaaggcaatgctatgcgccaaacgtggaatgttcatgccaatacaataaagttactacttaaattttaagatgtgagtgaaagaagcaaaaggctacaaaagctgacagccaagcagaataaactgattgttgttagaaaagaaattatgttctgttagagagcctttgttgttttgcttcacaagtcatgtgctaccacagtaggtgctcctttgggctgttagtagatgaactggttcataagcaaccacattggggtaaccagcatcatactgccaagctctccaccagaatgatggctcagcacactacagcaggaagtaacagaattataaaggaaaaagggagggcatacctgaggctcaggttctctgtctggcattaccccaaaatgacttaaaatttgttctttcatgcgatcctggagagacgcgaaccaggaaacagactgttgatgcacagaatcgtggagagcggcaagttcttcatactctggaccctccacctgatcagggaaagaggcacagctgtgtgaaccattcacagtaatgcacgtaacacagtcagcgacctctgcacctccactaagtggatttgtggcagttagcattttaataattcatcagtttcacaaaaatggtacatgctcaatatagaaatctgcattttttgcatagttgaaatctatcaattgtatcctgatttttctcttaataccataatataagcacatttcctgt

SEQ ID NO: 37702 - DNA, 1343 bp, Homo sapiens
aaagatcccacagggagagagtaggcagaacccaggaagagacacaaaagtgtgtaggaagcattcagctattttttttttaaacaaattgccaatgaccttgtgtgggctggcaccagagtgcaggtctggagagctgcactcacaaagggagtttgcatcacacacaggatcctgtccacagataagagcctccttgatgagtcatgccctgcagtgaggcaggcttggaggagctgacgtttatctggaggcctctgctggtgctggttgctggggcagcaagtcctccaccttcaaaggcactccgctcctcctccctcctgccttcgcccacaaggtcttcacctcattccaattctgccagctctgccctccccaaccaaagtgccgtggaaagcagtccccggccactgccttcatctccttgcctccccctcactcctccatatcctaccgttccattaaaatgactccaaaagaagtcagagatgccctctgaattgctcaaatcacttgacaggctcctgtctgacctccctaaggcacggccctgcagactgttgctgagctaatgcttctgctctcctgaaccctctctaaccagcccggcccttcacagcccctacctctgcatgtccctcctgctccatgctgcccagggtggtattctaggctatgtctattctcattccaaagctctccccagctcttacccacactctgactgtaactatcacccgtaacctagtgatgttctcacgctaccacgtgccaagcaccacacacagcagtttataatatatacgaattcaagcccacaaaacacggaggctcagaggaattaacttctctaaggccacagggagatttagagccaaaatgagaactcatggcagtgtgattctaaagttctcatggtgagcagctttactacacgtcccccaaactaaagagcagcgatgattcaaactgccacctggatgcctctacttatatacttaataaaactctctcttcctggtatctaacaggatgatctcattcatagcatggtgaaactggaggcgccctgaagattcctcttcaagggaggactgaatgccccagcaaccagcagaggcctccagacaaatgtcagctcctccaagcctgccttgctgcagggcatgactcatcaaggagcctcttatctgtggacaggagcctgtgtgtgatgcaaactcccttcgtgagtgcagctctccagacctgcactctgatgccagcccacacaaggtcattagcaatttgtttaaaaaaagaaaaatagctgaattcttcctacacacttttatgtctct

SEQ ID NO: 37703 - DNA, 1180 bp, Homo sapiens
cgactcacccagctccagggcctggtcgcacctgagcagcgcggcctccggctgctgctggcgctgcaggctccgcgcctggcctgccagcctgcgcagccggcactcggccgggaagcacttctccagcaggccgctcagcaccacgttcacgcgccgcacctgcggccgcgcgggccctggctccacgcagcgcttgcagactgtgagcccgcagggcagcgtcaccggcttatgcagcagccgccggcagcgcgggcagccgagcaggtcgcggggcgcgcggggctccggggccggccctccctcgccgggcgcctcgggctcgccgcccgggttctccgcggacagcggccggtcgcgcaggcccacggcgcgcaccaggccgcccgccagctcttccagctcctccggccgcagcgccccgagccgcgcggcgccgcggaacgcgcccagggcttcggggaggcggccggcgcgggccagcgcgtcccccagcctcaggcacaggccgcggtccggctgcgccagcccggctagcatggagcgaaagagctcggctgccatctcgtagtcgcccgcgcggaaggcctcgtcgccctcctctaagcgctgggcgatcggctccgcgcggtcgcagccaggacactggggcggcggcggcggcgggaccggctcggggctcatcaccgcggggctgcgacgacgcgggtccggagcgaaggcgcggagcagggaggatgcgctgctgctgggaactggccggcgggagcgcggtctcagccctcgccagcagccacgcgcgtctgggggcggcgcgctgcgagcggctgagaccgcgggcgggggcgggcgcctggcttgggcagcgtcctcagcgcggtgtgggcggcgagccccgcagggctgcaatcgttccggggtgggggccgggacaggcaccgcgggcgcaatctgagcccctgcccacgcgcagcggcctctcagtcccgccggcttaggtaacccaggtcgctgcggtaacgcagtgaccgcgctccaggtccgcgtctcttgcgatgcttcccccactcgcctgagggctcctgcgcgactgcgcgcgcgtcctctgcctgccgcctccccgcagaggtgccggggccctgggagcaggtggccttggccgcgggctgctggcgcg

SEQ ID NO: 37704 - DNA, 1666 bp, Homo sapiens
tggtgcctggtacacagcaggctctcaatgtcttattaatgagttgccttttccaaggctgaagtgatcgtgggtgaattccagaagaccctgcatcatttttatttatttatttatttaagacggagtctcgctctgtaacccaggctggagtgcagtggagagatctcagctcactgcaagctccgcctcccccgttcaagcaattcttctgcctcagcctccagagtagctgggattacaggcaaccaccactacgcccggctaatttttttgtatttttagtagagacggggtttcaccatgttggccaggctgatctcgaactcctgacctcaagtgatccgcccgcctcggcctgggatcacaggcgtgtgccaccgcgcccggcctagaggcaattttctatttctgacttgttaggctagtcagagcgagacgtctttacaggtttgggccggcagctggaaaaggcacacggccccgggctcctcctccacccagccccacccctcctccgctgaagaccagccctaataaggcagccaccagaattagaaccaggtcaagtgcactccgagcaggacagtaggcagatcctatctggcgcatgcgaacgcttctgtgccagttccttgaagagcaggcgcagactcaaggctgttgcttccgcccttactccccgccgctcgtccctgggcggggcgaaggctgggctgggggaagaggcgtggcggcgctgtgcgcgtgcacaaaagagagctgaggggcgggggcgctgcggcacagctggtttgagcaactgaactggaaacaagatgcaggtgagctaggacgggtctcgggtctgggggctgcggcccgttcctttgtctcgttaggcccgggcgggcagtggacgcccgccctgggggaagctccggcgccgcaggcacgagggaggcccggcgcgtccaggccctgcgcaggcgcagtgcgggaggcgggcgtggtcccaccaggacccacggcctgggcgtccccgcctcggtgtgccgggtcccccaaacctcgtcctccgggactatgtcttctcgcggtctctacccacccgggcctgtgaaggtcttgccggatcccgcctaacaaaagttacctcctctcctgaactcccctaaggcacacctgggcagaggtgttaggaagcggagggtccggcctggggtcttccgcacgtaaagcagcgccacagccggtgttcctggctccactgagagccaggtgagggcttagttacaccctcttcccccgagccctgggatccgcttggggcgtgttccctatctgaccgctcgggttccagagctccccgcgagggtccctctgtttcgtccttttttttttttttattaaaataggtaaaataaattatttttctgtagctgcaatttactagcggaatttggttaaagcctaaggagaatgaatgaaaacaccatggaaatgggcactattgtgggtgaaaacctatgccaactaaattttgtcactgtccaaagatcccgcagtggtcagaaattctaatctctgcttagtggcagatggagaggagagggtgcgggttttgctggggagggaggcattaggggctggaggggagggcgtgtctgccaggagccagacactg

SEQ ID NO: 37705 - DNA, 505 bp, Homo sapiens
atttttttatttttttatttttagtagagatggggttttgccatgttggccaggctggtctggaactccttacctcaaatgatccacccatctcagcctcccaaatttctgggattacaggcgtgagccaccgcgcctggctgggaagagtatctttatagtgtagaaacctaacactatctcagctgggtgatcaaggtcaaaatcaacagtgatgagtcatactggtagtacagaccctgggtatgatgtaatgaaaatgacgctttacttctttggtcttcctccaaaaaaccaaaccacaattaagacaaaaacatctgacaagtccaaattgaagaacattctacagaatagctgactagaaaaactatcaacgtcatcaaaaacaaggaaaatctgagaaacttttatagccaagaggtgcctaagaagacctgactagtaaatggaatatggtgtcctggataaggtcctagaacagaaaaagtgcatcagtcagaaa

SEQ ID NO: 37706 - DNA, 1273 bp, Homo sapiens
caaaacgtattttctggaaaagagactgactacacaaagcaatgcacacttttctaactttagttcgaaatcctaaattcagagagttgacaacaacatgagccagggtgagctgacctttcccggttgctttgctgcaagcacaggattgtgagggtttggggtcacgagggtttgggtactgtcatatttttaacagggcccttcatggaattgagtctttccacacataagctcctgcactggcattcatttagtataggtgctaaaaggtctcagaagagcagcaaagcactttctctggaaggtcactggccccgtcactttaacattcccttgcagaaaaattataaatgagtcatcgaggacactgaatcacgtggaagagactttcaaataatttgcacattgaataaaaagacactgcctttacctcatccccaggatgaattcttggggcccatcactttaaagtgccttgatagaaattatcagaactcaattcattaggcaattgttaatttcattcaaatccgaaggtcagtggcacaatagggcttggcataggttcctatgcttctttcacgtggctcagatttcctcatcattcacagcagttagagaagcagctctgttgcaaggagggaacggggtgggggtgaggcggggggaactgccagctgtggcattgtgtggaccaggagatatttccaattaggcgagagtgggaggttgcctcatgagagataggaagatgactactcccttgcactacaaaagggaagagaatttgactctctagggagagtttgcagttgagaaatggctgcatttccactcagttgcctgaaaggactccttgcagcaggtcagcatacagaacttctcttccctgccgctgagctgaggctgagctgaagctgagcatggtgagatcacaggggacgctgcagttcccagagccccccggctgctgcctatctctgtacctttgcagagtctctccccctgtcctggatgggaccaacggcggattagacactgcagaagaaaagaggtgtgaacccaaaggtgaagacgtagcaaaaaaagaaacaagacaaaacaaaaaactatccaaaatgtagaatagaaagagaaaaaaaactttaaaaatgaacaaaatatcagtgacttgtgagacaaatcaggcagtctaatatattcacaattggaattccaaaaaaaggggaagatgtagaggggaaaatacaagaagaaataattttttcca

SEQ ID NO: 37707 - DNA, 1401 bp, Homo sapiens
taaaaaggtatctaaaatagtcaaactcttataagcagaaagtagaatggtggttgccaggagctgggggaagagggacataggaagttgtgacttgatgggtataaagtttcagttaggcaagatgagtaagttctagagatttgctgtacagcattctgcctgtggttcactatactgtagcatacactcaaaaatttattaagagggtagatctaatgttacatgatcttaccacaagtaattttttaaaaataaatcttccaatagccatttgctcaagggctatcttctgctgcacctagaccaggtaggtgtgtgttggctgtgcaaccctgagtttccctttccaccatactttttacacatttgtgtcatggactgtttagtcgtgggtctttccatctaaaatacaagccctttgaacccaggggctgcagccacaccgtacactattatctcctcagtgccgacagtgcctggcctggggcagacactcagcaaatatttgtggaataaatgaaactatgtcgttcttctgccattgtgtggggttagtcagtcttaactgagctattttgtggtctttataaaattccccattgaagactgtgcattccatcctgactgagtttctacagacttactgtatttctctgccaagttcactccaacagacaactgtgatcaaaactatgatgccagaattggtccaaactaagaaaaccctctcccccgctcatttctgtctgggcaggctactcatgacacttgacaagtcccagccttgatcaagaacagctggactgagcttcttcccatgtttcagtgtcagggaatggaggagggttcttaccagttctttcaggcgagattggcaattccttcctccgggaaccccagagccggctgttcttacctctagcctaacatcagatgattgtgttgttgaccttctgatcagatacagaagctgtatgatttctacaaagggagagtcaaaatcgccttttaacgactgaaacaggagactatggggactggggcactgctggtactgccagactctgtcccacgtggtgtgacttgatgggaagggtttttccatgaatggcccacacaggcatgcttattgaaaacatatgtaaaatatacccattacatcattcttccagcctgtgctttcctgggaaatcccagtgtagtaaagttaggaaatctaactgcttttccactcacacagcactttactattcacattggccaagtaggggagccgcacttggcttgactctctccctgtgtttctgcacataaaggagcagatgtaagagtccaaatggttgattcatccacagaccctaacaccttaaggtcacgggtgaatagagaagcaagaat

SEQ ID NO: 37708 - DNA, 1866 bp, Homo sapiens
caagccgacccaagcctgccctcatgaagcttgacgcacggatttcacattcaacgcctacccccgtcactggattccatccagatttgactgacttgagaccagtccctttgttcttggctgcaactgcaccgacccagacccatgcccctctgaaactggctgctctgcttcccagcccccaaaatgattgtcccccagatagctttgaacggaggggtctcccgggatgcagaacatttaatgctaaaagcagaatgtcccaggcaacccgggctgagttggtcaccttacctccaagtgagagatgacctcatcaggagggaaagtgaaagtggagaaaccagaagcagtttctcacccggactactgcaatagatccatgcaacttgaacaaccaccactttccctggcatacctgtgttcacacacaaatgtgattgaggggaattgcagaggccgcagtctagtaaaatgagcttttcactagactgacatccagagagacagccataacccaaccactggtgacctgatctcccctccagattcttcccttgtggctactctccctccacactcacccccacatttcaggcccagagcctgccagttcatgctgggccccagacagttgcctaaatggttccctctgcctttcctgccagcaactcacagatactcacttcatttctgcctctgcctcggcccctgtccctgcttccatcctgtgtctgctgtccctggcagtaggagcaatagttaagagcccaggaagtgtgggagtcagatacctggggtctggatattgcttctttccagtgggcaccctggcaagtcacactcttcaagcctcagtttcctcatctggaaaatgagaatatctacctaacggtaagatgatatacctgcatgaagagtgacacaggaaaaccctcaactgatggaaacactctagtccagtgcaaccatttgtttacaaggtttatgctttggtcttcatgttcctagtgcctggcctgagctatctgttgaatgaaggaggtttgctgaaaagatgaggatccagcttcttgtagaactggttagtgagaacatctgtattaatcaggattctccagagggacagaacaaataggatatatgtatatatgagaaggagtttattagggagaattggctcacatgattacaaggcaaagtcccacgaaaggccatctgcaagctggggaaagaggagccaatagtggcttagtctgagtaccaaagcgtcgaaaccagggaagctgacaatgcagccttcagtctgtggccaaatgcccaggagcccctggcaagccactggtgcaagccccagagtccaaaggacaaagaacctggaatctgatgtccaaaggcaagaggagcagaagcaagtgtccggcactggaagaagaaggaagctggaagattcagcaagcaaaaccatgccactttcttctgcttgctttgtgccagccatgctggcagccgattgggtggtgccaacccacattgagggagggtcttctgctcccagttcacccactcaaatgtcaatctcctctgacaaaaccctcccagacacacccagaaacaatacttcaccagccatctaggcaaccctcaatccaatcaagttgacacctaattattaaccatcacagcatcttttcattaatcttagggacaactgcaaaagtgacaagttgtgctttcccagcccagaggggtgagtgacaaagacattctcaagctcttcacgtctcagagtggagaatttggcacatgcgtaacaaaactcttcaacatggtcaatttgacaattgcacttctaggaatttgtgc

SEQ ID NO: 37709 - DNA, 3888 bp, Homo sapiens
aagttgtgtcagccactaaaattcaagggcaaagaatgtatgcccccaacaattttttttttttttgagacatagtctctctctgtcacccaggctggagtgcagtggtgtgatctcagctcactgcaacctctgcctcctgggtttaagcaattctgtgcttcagccttccaagtagctgggattacaggcatgtgccaccatgcccggctaagttttgtatctttagtagagatggggtttcaccatcttggccaggctggtcttgaactcctgacctcatgatccacccacctcagactcccaaagtgctggaattacaggcatgagccaccgtgccctgccagatgtatgccccttctgagaagctttaagagctggtgcgtcattcaccagcttccctttcctctacatgctctgacaaaatctttatcattctgaccctcactgctgccccacattgaacatatagcatgagtgagaaagcgacctgccatgtcgctgagatgtgggggttattaccatagtgtcatcttgcttgacctgaccaatatggaaacaaaaaacaaatatagagacagactaagatagtagtgtagctatttcacttcactatatgattattatacagtatgaaggtggcatatcatttcaaactattgcctgaatgagaaaactgaaaatgaatctatacatctcataaaagacaacaacaagaaaagtatacagaaacacagtttctcaattattctacgtttagaagagtggaaatttcagattcatgaatgtcttttctccattcattcaaaaagtatttattgtgcaatacctatgagtcaagtacagggttagatactcaaaatagaagacaaatagttcctgttctcaaaagcttgtcatcaaacactgcagatggtatgaaaccacgtcaaaggcaatgtgataaatggggaggaataatattcacccatttctctagcatttgccatgcaccaactctatgcaagccattttatacactttatctcatttcaacccaccacagccttattaattgggagttataatctcagtattagacctgaaggaactgaggctcagagaagctaagtaactaacttaaggttacccaggtggtaagtggcagaaccagcatgcaaacacagattggcatatctccaaagcctaagctcctttcaacagtcatgacatggtacagaaacatgggcatggtaccaaaggaactgagatggggcccactgctctttggggagtattagatcaaaacactctgttctcaaaccaactacaaatagtcttggtacaacagaaaagttttgctctttaggatcctcagtggtccccaactctataatgactacctgaaactaccatactcctctcccagttccaagtgtgtctatcagggaggggggatatgaagggcaggcactacctcaagagttaatctcccaccaagctgtctccagcagcagagatctgccttcagctcactgaaattccaaacgagaggatggtaagttcacctcattacccagggagggaaacgtggaggctctcaaccttcagtggcttcatagaaagacacttgggaagcttctggaagcagacttagagagctggaggccaagtcactgatgcatcctgagctgatgggtggaccttgttgcatatgggtaaactgcctggcttgctggtaagaggagcagccctgagactgagcacagaaggagggagtcctgcctgctgggagtcaggaattcaggaaccagtgacaggcatctcaggcttgaaccagggggatgctcgaaataaagttgtattcattgttccaactacgcacagagggtctttgctaggcttctggatcctctttctcagtccttcaggcattatctgctaatctttaggtaaagaattctaaatgagcattcatttcctcctacatgaagccacaatagcccatggatttctatttttcaagtccattggacacactagtgagttttaatgtccaagtcttacacagtccacaaaggacaaagcttccaagattcgtttaaggccagaacagggagaagtttgagttggagaagaacctgcttatacctagcttttaagcaactaactttccacattctttgcaatgaaatgtcagcctttctttcagatagttggtatatgggtagatttgcttagagatgctatcttatatacttctattttttgtcccttaagaagctgaaagaggaagaaagtctcttctactgaccctaggaatctctccagaaatattttggcagattcttttactcaaaggctgtccattgatttttaagacaaacaaagcaacaaacaaaaagcaaaacctagttttgttaacattcaacaatcctaaatcttcaatcccaggagtagcctccatttatttttcttgcactggtttatgatttttctattttcactgtgtcttatgaaaataaaacatgttagagttttaacaagacatcagtttccagtagataatattggcatgaagttaacctttacatttatttgtattttttcctggtatgttcaatatttcttatagcaccagatgggttgcatttatcacctattctagcctttgccctgactgattttttttatttcataatcagcaagctctgcaaaaacaaacaaaaaagaactgtcaagttataaaagttgttttattcaagactattttaatttagttaagtatttttctttccagttttctcagatgttctcatatgagatgataggaaaggactaaatgatgcacaactttacatttgtggaatacataccacgtgtaaggcactgctttcaattgcagtcatagaaaacttagctctgaataatagcatgaacaataaagaaggtttactacctcacatcacagaagtcccaaagtaggatcattcctagttggctaattcagtgactcagtgccatcaaagccaccatcccattttgccatcctggggctccgcttgcagtcacaatatagctgtcattctcaagatgataatgctcagtagaagaggctgactcttccactgggtctctttctatgaatgaggaaacctctccaagaatgtcccaagcagatgtttcctcatatcatatcagccacaattccctccaagcctcaactcaccaccgacaaaggaattggactagctaattcccttggagatgttcctggctgcacaaagctgagctaaaccagaaggaagagttaaaccagaaggaagggacatggatgcgagtgaacgttcagaagggattgctacatataattcatttcacttagtccccacaacaaccttatgaggtaaccactattatccccatttgatagaggggaaactgaagcctaggaattttaaatcctttgcatgattatccacacataaatataacaggaccaagtttcaagaattgtcttcctaatgaattcaaactcgattggagccatttcacattcttacttagaggttacagtgcttctctgttttaataattaagtcaaaattagaaagctgaaggcacagaaaccacagagcttaagaattgggaaggacctttgatgtctcacccaatacaacatttaaacaagtggttactgagcgtccaccttgtgaagcaccaaattggaatttgttgaacctgccaagacaagcaagatgtggtccctgtgcccagggctcaccaactagtaggcagaatgagaaagctatataagtaataatacaacatggaagaatatattaagtcctaagagaggtacccaaaagcactagggcagggagcagtgttcagaaaaaaaggaatgct

SEQ ID NO: 37710 - DNA, 1061 bp, Homo sapiens
ttaaaaattagctgactgtggtgtcatgagcctgtagtcccagctattcaggaggctgaggcaggaggatcgctggagcccaggagatgaaggctgcagtgagctatgatcacgccctgtactccagcctgggcaacagagcaagaccttgtgtcaaaaaaaaaaaaaaatcagtgatttgtgaaatccagaggtctggtgaccacttaattgggggcagagtccaaactccttcctctggcatgaggctctctacaattttgcctgcacctgccttgacctttccagccttctctctcaccattcccccaccctctgctcctgccaatggacagagtctcttggcttttcaccccatctttcccctaggccaggcctgtcctttcctggttgcctcagcctacagcaatctctccctctcaactgcctcctctcaatcaactcctttctccttggacagtgctttcattgggccagtttgccctttcctgcatttctgcctgtgttccaaaccctaccttctgggaggctggcattgcccagtctctacaacgccctcttcccacacagcctggcaaggtggatctacgagaaggtgctcccctccacctctctctgcagcctcccctcgagctgagctgatgatgtccaggttgtggttgtctcaccagcaatgagagccaggagaggaaatgagtttcaaggtttgaaaggccacattcacaatcattaagaggggaagtaagcaagaatcactcccctgtgttatccggttgcacaatcctagaacaaagaggccactgataggaattacaggaaagtcggtgcacagctaatgcagagagaattcggtttgcaaactccacctgtcaggatggaggcctcggaacatggttagatgattctagggcagtagaaatagttctctgacataattgtagttatgcaagctataataatgatacacttccttaaaaacttggattttagaatataaatagattgctttcaggggattagaaaagctcttcccacaaaggcttacctgcttccccagcaaa

SEQ ID NO: 37711 - DNA, 1015 bp, Homo sapiens
gctttctgcaacccaggacacttatgaatcttccccttttgtccatccttggatggctctcatttactcaaagtttagagattcccagcttgccaaaacttgagaacatctgtatggacccattatgacctggaacgctagcggtcactgcctgcaggccaggaatggtacctctgcgtgtgcatttcctgacctgtgctaccagctgcctctgagtctcatcttgtagtgtgagacgcatgtggtcctggcattataacaggaagagatctacttgagggcagtggctcccctcatgccccaaggaaaaaagtcattttccccactgtgcagaaattgagcgttctgtgtatttttggttgatatgcccaaatcaataatctgttgccattcttatcttccctgtttcaatgacatcactctcccctggctatgagccagacaacagagggtggcctccactgtcactcacgccctctctcagccggtcaccacgcactgttcatcctccttccccacgtctcttgctgcagccctcttctccagccctagcactgttatctttaactcaggtcatgcccacatctgagccattctttcaataaataataactgagtgcactgcacagctgatactgggctacatccccaggattacactggaacaaggcaggacagtctctgagaactgacttcgaaagaggacatttcaataccctgtgacaactgccctgacagcctgcgggaggcacttctcactggctccggaggtggaggaggacttcctggtggaggtgacagccaagctgagatcacagggatcattagttctctggcagagcgaggtttgggggagggcaggttgggagccaggtggggaagaatgttccaggccgatgaaactgccaaggcaaaggcccaggggcagcgcagagtctgacagagccaccagggctggagccacagcacggagcatgggtatgagaggaggccaggggagggcaggacaggaagg

SEQ ID NO: 37712 - DNA, 900 bp, Homo sapiens
tgctacacaaaagacttttcttcattctattttccacatgctctgaaatcagtgtcccttctgcattccataggttccctcttgatggctgtttggctaggatggggtcatttaaatgcctccctggagcactcagaatttgcgctgaccattgaaaaatgttcctgttccagtgagaaaggctccatccccggccactaccttaaccagcaggatgaccggaggtaacagctgagcaaagcccctgccttgggctgacctgcactggtcccatattcttgggccaagatgagcatgcctgacctgcacccaaactttccatttaatgagaggaacttgcatcctttcccaacctgaagcccagagctggtttgaagattgcatatgtttacaaaagaacactcccatccagtctgttgccaaagtccaaacagtgcccttggtgagatgccagtaggccaataacccatgtatcgacccactgacttcatttccttatatgaatgatcaggacctagtattgctcttttgccaatccaatcctttatcctggaattctatttcaagcacttggaagacagctgctttaagaatggagtaaagatattaataactgatgcactgatgggaggatgagagaaaacagagacaagaagtgtgtaacactgctttggtatcagttcattacccagcaagatctcatggggagtgaatgatgccgtgaatatctttgtgttggcattggatgtggcgatgtgctgggctgggtgggagaaagcccgggcttggcagtcatcagggtcagtttcaagtcctgctctgtcttgcatttgccaagggactgagggcaccttgagcctctaagtcagattccttatctgccaactggaaataattaaa

SEQ ID NO: 37713 - DNA, 3635 bp, Homo sapiens
gaaacctacttgcctggaggaaaaggacggggtagaaaaacaaagcaaaataaaatccatcaaacaaaagtttcttcttttggaaagggagggacttcaaaatcatgacaggccaaatgcctcctcctctttcttgaaaagccctccaagtcagaagcaagcctgagaataacagctgctcttaggatgctcaaagctccttgcagctgattatttttcaggaggagaattagacacaaataatacaagtgggaaataaagagaatgacctactttacagggggggtaaaaaggagctctgtgtgagcgttttgatctaattgacggtgtggggttgcatgcccaaataaggcgctgctggtcggatctgcgagggagagggcacgtctcaaactcgagggagaggacgagacagcgagaggaacagcgtccggggcgacccccagtccaccgcgggggcctggcgcgcttggggcaaaggccctaggagaccccttctggccacaaaatcgagtatgacagaaaagggccagcgggggcgctttccttccagggccacttgccggaatgtaagagggacggagagacgtccggaaaaggctgccacgctcggagcgctgcgccaggccaggcacctaggccaggggagcggagacctcgtgggagcgggcagggggacctttcccctctcccgggcttccacccaggcgcctccccgctgtgaacgccgccgcccaggtgaaggggaaaccggccacgtttccggacctcggcggggcacacggtctccggttttcaccggctctgtcttggagccccgaagggcatcagacagcagccccggcacccggggattattcctgtacctctgcctccctccgcttggcgtttgcgggaaccttggtaaaatcctccctgtttctcgcgcgcgcctctctctccagcttctttttcttggattctcgcctgtctcctcccacagaggaaaaaaaaaaaaaggtcacgtatgtttggaaaaatatgtaggtcagtggaacatttcctgcactggtgcaaaaggagaggagggcagcggaggaggggagggagaggcagagtggagctccaagtgcccgctcctggccgcagccccacaccccacgtgcccctgccggggaggggggcaattagccggttcctttccatccttgacccattttccggaccagctacgttcgccttaggacaggcactggttattcctccccagcagtcgctgctgtcctccgccgaccaccgctcgcccgcatcttccccgacccccgcctcccacctgcccccgggccgcacccccgccgctcattgagaaatcgcagtggtccccgcagagacgcgctttgtgccctgggtcgagacctgcgcgcaaccctgcccctggaggacagtgtggagggggtgacagtcgcgtgctcgtcccccttcatcccctgcgcgggacagcagggtggcggcccgcactgcgagggtctacactaggcgggggcggcagattccttgttccccccgagtgacaactttaatgggacctcggctggcagcctctagtccacttgcctctcctctgggccggctcacctggaagcacaacccccccctcccccagccccggcgcccaaccccgaccctgcgccccaggcccgaccccgccgcgcgtccctggcagcccagcagaggctgcggcggcctggggactcgcgggtgtctgcgccgcccagggaagccgggggtctagggggccgggggtccgtctgcctgcggcgcgcgcggggtgcttgtcccaggctgggtcggggccaggagagaccccgcaggcggaggcaggcgaggggaggaggaggagggtgggggtaggagggggaggtggagagggaggagggtggagggaggaggcaggggaggaggcagaggcggaggcggctctccccgccggctctgcgtgcggaagagtttgccgcgcgagcagccggcctctcgcaggagccgagggacccgcgcggctgcggcccaggagcggcggccgcggagcccggagacccgcagccgcggcggcggcggcggcggcggcagcagctagagcagcgcctcccgccgccgcccgggaggagctcgccgcgcccgctcgccgcctcgtctcccagcggcggcgggaggcgcgtctccccggcccagtccgcgcccggccccgcggggccgctccggcccgctccgaggtaaggggccgcgcctaggggcgcgggggacccagggtgggtagtacgtgcgcgcggggtcgcaggactcggtcacctgctcgccagcgtggaggacgcgcgggggcggaggggcgctcaggcgcgaggctgcgcggcaccggggaccccggacgcgggggcgcggagaggtgggttcccctccacagtcaggccgctgggggcttcgcgtcctgcaggaggtagcaatcgctgggccggtgggctccgggcgcgtctcgacgcagaagacagaggactgggcatccgagcctcggaatttgggggtcctcggggtgtccgacagggtggagaaggatcgtgccccagggcaacagctttggggattgcccgtggttgtcttcgagacccatcgcgctaccctccgaaacgtcgggcgtcctggacccccggagagtgcggcgtgcgcgccctgggcccgcggtctctcggagtccctgggtcggaattggttccgggccggattgggtgcggaatcggtgcccccaacccccgtgtgcgcagacagcgtgcagcctggctcctcacgtcgctgccgcccccccaccccaactccggagctccccaggttggatgtatgcgtatggttttgttgggagatgtgcccctttcccagccgaggagggacgcacctttgacctttctgaagagctgggcaggtcggtaaccagggaagggacaggcaccacccggctaaattcagaaccagtcccgctcctctgcttgccactccttaattgctcaaggtaagaaagtttgtttcagccctgtgattcataaataattagtaactagttttgttgattaagcaagatggaaaccttgaatatacgcacgcacttccacaaagtctaaacactcccgagcttgtgtccgggaggctttagtacggaaagttagaagccctggagttcaacaggtgttcaggagggtcccggagaggagtttcgtctttacgcgttgctttggcatccaccccaacttcattaaagtggttagcctgttttcctacaggtaaaacattgatcacttattaaattaacttaatcagcagagacgagctaaaccgtcttgatcatttagaacccaaaccttattttccttaatagaaaggtttttcctgtttgaacttcccaggtaattagttctaaagtagttcccagcaagacatctctgccagcatctctctctcactgtagcttggtccccatcagtgaattgaccaactaattatggcttgcattaaacacagagctgccctccttgggaggcactgttcacattcaagcgcacacactagctccatcttcctgccactaagatgtccttaaaggaaaaagttagcca

SEQ ID NO: 37714 - DNA, 1499 bp, Homo sapiens
gaccagtagaagtattggtatctctcagcagtctacttaaatatttagttaaaaataaagtgtgcaaagtaaagacgttcagtaattatcttccatctcacagagagatgtggagtatggcttagaagaattgtaaatgcgctgcttttagccgttttcttcttggaaatcgatgcctctatttatttgctgatctgtcccactgtgcgtaaatgtagaatcggttttattctcactgcttcccagaggggctcctgtggaggtgaaagaaggaaatacgttctagaggaaatatgttattaataaaacgttacccccaaagagttaaccacgccaaaaataaccaagtgaggctttactaattagtggtctgatgagagagtgttcagatgatgactaaagaattgatctttatgtagaaaacaacaattgtttttaagctcatttggttctcttaaaacagtttgggccctttaaaaaaatttctggctgtttaataatgcaaatgatgaaaatcgttaaagataacacatataacctgatgtgtgccatgtttaagttgaattcaccctatttttttgaacaatctttcttaactcttggtaatctttatagctcactcaacactgcaacttattagattaaaaactgaaagttaattttttcagaataaaataataaggcatgcgtatactttttaatttaaccatctttatatgttcattttttcagagtcttgcttttgaatcttaagaacccaaagggctaagtcttctttcttaatttttaaaacaagcatgtgttttgttctttacatgaatcgtcggttctcccagtgtgatcacgacactgtcccatgctgattccatgcacggtgcaactctttcccaagagaggtcagatttcgaggtgttgaaaatagcccagtgactcagtattcttggctgctttatgccaacggtttaattggctgcatcatagcaagcatctaattgagtttcacatttaaatagtggatagggtacttggtgcattatttgcttacagaagtgtctgattagcatgttcctgatcctcgttctatttgtagcaaagatgggaggtcagggactgtcacatttcatattccccacagcatctcatctcgatggggccttgttcagaatagatgctcagtaaataggtgtgggaaatgagctgaattgttggtggtcactatccaaaggtgagaaatttctgaatgctaatggggtacttaactatgagtaattctattttaaatctcaaggtgatgatgattaatagtatctcagggcactaaataaacatgtattaaatatgagcgtatgtttaaagggggagtttttaatgcagtctttaaggcacaactgcttctcacttgaattctttaactgagattaaggagtccttggcattttaagcaaagtcatttcttaggtaaagttcccccagagaccacttgaacttttgcaagtctt

SEQ ID NO: 37715 - DNA, 814 bp, Homo sapiens
tgtgtgagttaggtgtccaaagtggtcagctatctaacctctctgtacaaaatctccttatgttttcctcgtgccatgtgtctaagcacatatctctatgaagcaacggcatctctttgcccattttgtacttctttgggtggtatcattcggatgtgcttccctgaggcgatgtctgtgttttctaacagctcagactttggcagctcttgcatctattgcagcctgtttatatgagacacctataaaaacattcagcctgcaccgtgggtgtgccagcagcaccctatgacctgattttaaatcacagtgtgtgagtggccatcgtcttatgggccagggcatttttaaatggtgtaacgaggacagcgcatggcccatagcagaaagctttgacgccctgatatggtcactgtgaccaagtggccttggcaagttgcataaaccccatgactcagtttcttcgtctgtgaaagggagatattgatactcaggatgagaatcaagaggagagaatgcttgttagagtttcataaaaatgaaaagtagtgctattgatttattttgcgctgtgaccagttcactcaaactcttgcacacccagctgggtaaatgccagcctcaaggtgttttcttcttgaatgaagtacttggttttttcagacaaggtacattctagcaagtaaaaccccaacatatcccagtgttctcttgaaagctaacatgaagtgggggaagtgaaatacttcaactctagaagccaaacactcagaatgtcttggcagttgcttggggctgcacagtgtgcttttga

SEQ ID NO: 37716 - DNA, 1009 bp, Homo sapiens
aagctgttcctgagaggagtaggaaatgctgggatcggccaggtgtggtggctcatgcctgtaatcccagcactttgggagtctgaggcaggcagatcatgaggtcaagagattgagaccatcctggccaacatggagaaaccccatctctattaaaaatacaaaaattagctgggtgtggtggtgcatgcctgtagtcccagctactcgggaggctgaggcaggaggatcgcttgaacccgggaggcggaggttgcagtgagctgagatcgcaccactgcactccagcctggtgacagagtgagactctgtctcaaaaaaaaaaaaaatgctggcatctgttccctggtgtccccacttttggtcagcctcacctgggaatttcatacattttctgatcaaagtccaaagtctctgctttgcttgagctttaatcattggctataaagcctcccctgcccccaacattgcacacacattaaaattagattacagccaaacagcaatatagttttggggattgagggggcaggtaagaagcacatttttagataaatagggaatcagaacctccattatgggaagatgttttgatagtctcaggtaaaagtctgcttagaaaaattttcactgcaagttttcagtatgttttgagatagtttgtcctatatactgatatttgttcattgttgaaatggctctgacccttgttttctgttatttaacacttatgttaagcagaagaaacataaaatgctttccacacttcagtgttcactttaacattttcttgattaagaaaaatttccatttatcttaaggaagtagatgacatttataaagagatctaaaggatctctttataaaggaaaatggatgaggtttagaaaggactctggcatgaaggaataattccttttcagagtgtcctttatctcacccatcaatcagttgttcagatggtttggcaaatgagaagatggtgtcctgataagccattccagaacta

SEQ ID NO: 37717 - DNA, 1586 bp, Homo sapiens
taagcccatgtgctctatccatacaatacagtggaatattactcagccttgaaaaggaaggaaattctgacgcatgctacaacatggatgaaccttatgggcgttatgctaagtgacataagccagtcacagaaggacaaatgctgcatgattccacctacctgagtcacttagagttgtcagattcctagatacaaaaagcagaatggtggttgccaaacgctggggaaagcaggcaatggggagttagtgtttagtgggtgcagtttctgtctgatggttgcacaatagtgcaaatggacttaatgccattgaactgtacatttaaagacagttaaaatggtaaatttttaattatatgtattttaccacaatttttaaaaataaaatttttaaaaattaaaagcttacacacacacacacacacacacacacacacacacacacacacacagcatgtagggatcacacagatgtgagcatgatgccccagtgttggcatgagacagtcgctttccttagctggttcctacacagcgcggctcctggacgcgcagcttgtcgaggcttgaaaggcgcgggcagggctgcctccccttagctttgtagaccgaaggtcgtttactttggcatttttaacaaagatttaaagtttctggaatttgccagcctgcttggtcccgaggcccagattaagcagcatgcacttttttccttaaacgcagaacaatggcagacggcatgaaagctttcccagggttatttttcccttgaagtaacaaaaggggagacggatgaggaaaaaacacccacatggaatcaaataccgcagaaagcaaacttcaagccacgtgatattagcacagaagggaaatgggaggatgggttaaaaccgtgtgaagtgctcagagttctgaagtgagggctcttaagctatttttagcctcaaaaatgctataaatcctgttatcccattacactccagtggatcgaattatttgcttttctctacctttaccactctaatttttttttgtttgagtaaatgagagcaggccttctcagaggcagctgacatcagacagagacttcctttgcggcctctctggttctgttcctctcttccccgtagctggtatttgtagtgacacctgggagccacagatttgcttagcaacctttctccagggtgaacagggtattcacaactcctgaaccaaggcgtgtggctggtatcattttgtggggccagaacgcattgcgtggagaaattcagtgatgacctggtccccacgcctgctgctcagggccccatcaccctcgtgactgtcagtggtgctgcttcccacgtctcctaagagggcttcaggagaacgtagaacgaggtatctgtctcttcctttcggacctggcctttccatttggccatatgtcagaatttccagctgccctaggggcccaggaatctgtattttagttgctttccaaataattctgctgcccagctgtatttggagactatagccttaaatcagtgattccccgtcagtggtgactcatgaagagcttagatgtgggcctggtgt

SEQ ID NO: 37718 - DNA, 2015 bp, Homo sapiens
cgctccagcctgggagacagagcgagactccgtctcaaaacaaacaaacaaacaaaaaacgatggggtccccgaaaacacactttataaagactgatttcctgctggcaggagagagagctgctgtacatcacaaagcaaggcggcccactagagtggtatggtcagcgacctctgccttgcctgggtgaagtgtctctctctctgtctctgtctctctctcacacgcacacatgcacgcacacacatgccatgcactttctctgtggaagacttcaaagtgtttggtggctgttctgagacctgttcctcctcggctgggctaggggaggggcccactccttttacctgtgtttctttttagaggagaaactgacacaaagtcagatagtcttggggatggaagttgctctcatctgtaagaaaaggaaactgacctaaccagcaggtaatcacttgaaatcacttgtgtcccgtgctggaaacagctccacagcagtgtctatgatggattggaacctacacagctagaggaagaatttgcatccagaaaccacaggagcagatgacccacaagtgtagctattttacttctttcatgttaaattccaaataaaaggatgattatctttgaactgaccccagtccaaagtacaaatgcctggctgagatccaccaaggccagatgttgtcatcagtgactgggtttatgccaggctatcggtgaactgggtcagagatggtgcaggcaaggttgctgggtcagggcaggttcacagcccagtcattcctaaccaagaacatcagcacctgactggagggtgggaatgaggttcctgacctgctgactcatttgcagagtggtgtgtcagagccacacacggtagcagcataaacctgaacttcaggtaaccacacgccatgggatgctgcagatttatgtgcccactgcttgcagctgagaggaccagcatgaatggctctaatttgtcaccatggcacagtcacagatggagaatgctctgtcataaccagcgctcccagtctccataggttcttagcacccttccccatccatgtttacctgtacagccacctgtgcaggtcattcttgcccagaatagtacatgagctaaacagccatcttcaggtggttataaaacctcatatttatatgaggtttcatagtttacaaaagttacttcttattccacctaatgaagaaaccacagtccagaaaagtttggtgcctcccccgaggccacctacctggtcagtgatggatcagcaccacagttcccatcttctcattacacctccctactggttaggccccagcccacacagagaagtgtttctgtttcacccctggagagggccctgaagcatcttgtgagtttgtggaaagagaagaggagcagctcttgcttccgtggggagcacagccagactcctgtcttcatgtcctgtcccttaaatgccctccaaaaccgggggcaggtgctcgagagaacttgaccctgattccggattatggggttttctaaactcagtactgtggctgagatctgtggggcattttgcaagctgcttgcttttgtgtgaaacccctatatttgtcagtattttaagtttctgtgaggctgttcttgaattcagttcctttctctttgcctaaatgcaagccacaccctcatctcctcccgttgaccatataagaggtctcaagggcactgaggaacttagcagaaagcaaacagtaccttcagaagattaaaaaaaaattattgcatttgtttttctacaaccaagataagagacagtagataaaggaatgtgtatgtcttgtacagctcactagccccaccatctctgatacggaccagttcttcctgccccttgaataagtatcccttgtcttatcatagtttacatcctgctgtgatgccatgtgacatacatgctctcgcacacacattattaagacttcactccttgtgatcaaggctgagaaag

SEQ ID NO: 37719 - DNA, 2551 bp, Homo sapiens
agggttttggaaatacgtccttttgtgtccaagggctgtttattgatactgttacctatagatacttacacctgctccaagggaggtgaatcagaatccagcagcacactctgtcctgaccacacattggccaggagcctcctggtgaaggatttgctcccctgagaaccatgaccccgggcccaaggtgcctggaaaagcagcaatgttttatgggcctggcctctggggcccctgttctctctcagagagttgacttctggaacaagtctgtcttcagtgaactggggaggagtgagccagctttctcagccctggatcaccttcaaatacgtggattgttgatgaagggcctgtggcgtgtcattgaagatggaggcccctcgagtagcactgcttccggacttttcaggagggctttttgcatcacgtgttccttgttcgttgttaattagagcattcctgagagccacgattccctactcaagttcctgaggatctcagggtcctcagaggtgcttgggtggcttgggggaggcccctcctctctaaccaagcagcttccctttgatctctcctataagtgtgcagcacagggtgtcacttatttaaaatagactttattttttggagcatttttaggctcacagacaaactgagtgaaagacacagagcgttcccatatccccctgagccctccctagacacactcagcctcccccattatcagcatcccccaccagagtggtgcattagttatagctgataagcttacactgatacattgttaccattcagagttaacatcaaggcacactcttgtgttgtacattctccaagtctagacaaatgtgttgacacacatccaccagtatggtgtcatacagagtggattcactgccctaaaaatcctctgttcatccctcctaacccctagcaaccactgatctttgtgctgtctctgtagttttgcattttccagaatgtcatatacttgctatcatacagtgtgtagctttttcagactggcttctccaacttagtaatatgtgtttaactttcctccatgtcattttaaaaagtgttcgtctgctcttagcagcttgacagccatggtgcagtacctgtcatacctctgccctgggtctgtacagccctggctgttgtaggcagggtgtgtcttgcctcccccaacagggcgatgagctctttggagcaggggccaggacatatgcactggtggcacacgggatacctggccaccccgtgggccctggaaccaggctgggtgttctggattgaaggggacttggtttgagtcttaggaagggctctccgagcacagccatctcagtcagcagtgtgtcctttgctctctgaaagtgaaagctctatgagatccgaatgagcagcatccggcctcagagctaatctgtcagattttgcgtctgagtcagaacttactggttattaatgctgtctgtctttgtggccaagagtctagcaaaacattttctatcctcctgccttggaaatgtggccagcgtgaccttcctgaaagagttttttgataagatagatgatcacaatagaatgtgctctaatagaaagtgcttttgtttcatcacaaagcctttgtgacgtggaatgttccagtaacctgctcgttttgtgtttacagagcttctcgaaacaagtctgagaagaagcgtcgggaccagttcaatgttctcatcaaagagctcagttccatgctccctggcaacacgcggaaaatggacaaaaccaccgtgttggaaaaggtcatcggatttttgcagaaacacaatggtaaaggtcacccttctctctgttttttttccaccctgccccgtccatgtggtgatgacttcaccaatctgggctgcctggttggttttgtctccccagccaggcccagccttaccggtcgagggcttcccattgtaaagacactccaccctctatcagcccgtctctggctgggtggggagagggcacacacctcccaattgcattataagccagacgagagaatccaaaacaacctcacaggtagcacccagccgaagcagcgtggcattcacagtgacaacatcttgatcaaaaatccctggaacaagtgtcttttattcaatgctgaacagatgcagtggctgaatactcacttcctgtgggatcagactatgtgggccttttcatccctctctgccactgccctcgaactctttggtcttttgcgctacatcatgaaaaaatacattgaaaagaatttattttcttaatgtcacattcattctgtttttattgagatataatgtttataccataaaattcaccattttaaagtgtagagtgcagtggtcttcagtatattcacaaggtggtgtaaccatcaccactctctaatttcatcatgccaaaaaagaaaccctgtatccattagccatcatttcccattcttccccctccctccagatcctggcaaccacgaatctgttttctgtctccatcaattcccctattctaggca

SEQ ID NO: 37720 - DNA, 1149 bp, Homo sapiens
cttatggatcctatgaagtacatagttacccagttcacagatgatgaaactgaggcacagagagattgaataatttacccaaggttccacagccagacagtgaagagctgggatttgaactcaggcactttggctccagagcttggtgcttaaccactcctcagaatcctatacgggacacagtaaagctgaatgttctcagagtgtggggctcagaaagggagaatgaggagctgagaggtggtggtcgctcctcgaggaagaggcggctcttgaggtggaggtcgggacacagggtagtcagggggcaggaggctgtgggccccagcagcaacgcccctcttggtgtcaggccaagcacaggctggcctgctggggtcccctcccatgccccttgtgtgactggggattggagagccattgtaagggggatgagagcagccagaattccttcccacttctcaggctgtggggcttcaagtctctctctgtttccttcacactgccaacatctcagatgtaacagaagctcatgtgatagattttcgtacagcaatttctgatgaaatagcctagaactttctttaccaaattggcagagaaaaaagagaataaaatagctgaaagtgaaagtgattttaagatgagaactggcaggcgcggtggctcacgcctgtaatctctgcactttgggagactgagctgggtggatcacttgaggtcaggagtccaagactagcctaggtaactcagcaacacccgtctctacaaaaaatccaaaaattggtcaggtgtggtggcgcatgcctgtagtcttagctacttgagaggctgaggtgggagaatcgcttgagcctgggaggaggaggttgcagtgagccaagatcacgccactgcacctcagccagggtgacagagtgagacctggctcaaaaaaaaaataacaataataatgagaattgttcagcagtggcagcaccagcacattttggtgtctagaattgacacaggcaaggaacatgagcaagacagacgtgcatacaatggaggccaagggctcacgggagcctctggaatgaaaaccttgcgggagagatccaaggggcatgagtcacgtgccttggacagaatggggaaagagtacggctg

SEQ ID NO: 37721 - DNA, 523 bp, Homo sapiens
aaggtctttgctttacggggtcctaatatgcaggcttccagatcctgaaagataacttcatgcaagaaggcaatcctttctctgagcctttttgctcctcctccagacttggatgtagatgtgtgtctgacaaatccagaaagcagtatttcaaaagttgctggtgtggttccaaataggtcaccctcggcaaacattccactctgggctttccagaaaccacacaccagagtataaaagtttccctgccctcgttttacctactcgcctctaaccgcacaaccagatttgaaatactggcagaagtggaggcttttcagcttacaacactcgattttgtatgttccgtgggatttctggaggttgcctcattttatggctttggggtggtttgaattttttccttgctgagcttaattgagatgcctcagtaaaagggaacaaagcgcatgcacgccagacctcactgggaatggagacgcgagtgtggacggcttcgtggaaggagtgtctcatctactcc

SEQ ID NO: 37722 - DNA, 799 bp, Homo sapiens
atggacagcatatttattgtcctaggattttctagctggaagtcattaaaaaagggcagagtgtgccttgctactaatttgatttagctttgcttaaatcttacacttgttcagaatttggataaactcagaaaacgcgtgtaatatttctttaaacccacatgcgtcatgggaagtttaatccctaaacttttgattcattaaagtttgctcattaaaaggctattttgcaaccctgtcctatttccagaaaaaccatgacctttctgtttgtaaaactataaagtcttggctcatgtgaaatgactgaaacgcgaacccaagtacactaagtttatgatcttttcaactaactcagtttactgtctctaattcaactaaaattcattacattaattttaaaatgttgtttgtgcatgcgacatggggaactagccaactgttctaagccatgacattttacactcttgtctaaattatctggtaaaatttgttttggtacaagactgctttggtttctctctttacttagtgtaggtacagcctgaaggtctccaagtctgccattaatgtcccagataaataactaatttggatcctctagagatacctgttagcagctttttgggcagacatgcattaatttcacactatgcatacaaacagctttatttttctggcaaaaaaagctcactggaaacacaaaacaactctcgtaggatttttccctaaccacacttaggcacatctatgatattgattcctttttaaaattacaattatcttttttatatttcgt

SEQ ID NO: 37723 - DNA, 2254 bp, Homo sapiens
gaaatttccttaaattcaaggtaccatcgtcatgaaatttctgaactttaaagagaagatcctaaaatctttcagagagaaaaaaatgacgcatcacttctcaccacactgaaaaactgaagacaatgaagcctgccttcaaaatgctggggagaaattcttttcaatctagaattccatacaagccagaatttaaatttgagggttgaataaatactcaggtatttgagggctcataaactttttagctagtgtactcatcttaagaaaccactaaaaatggtgtgctcctgtgaaagaagggagttcgacaagaaaaaggaagacatgggtccatagatccaactgtctccgaatctctagactggtgacacgcagttcccagttctctggggacctcctcagatctccctgtcgtgtcatctcacatctgtcatctctcaggtcatatccaacacactgggccacccacgcacagggacgacgcgacagccctgtggctccaccgcacaggacagccacgactggcaatcctgtgccggccctgctcgacgcaagcacctccagcgccgggttgcgtcttagtgaccctgggaccgccagccaggcaccgcgcccgacgcaggctcagtcagtgttggtcggatgcatgaatgaatgggaaaaacgaagtctctctctccctggccctgctcccatacatctgtaggcctaggtcttggttttatccgaagacttagagaagggacgcaagttccttcgcggagccagaaggaatccgtcgagaagcgggacctcaagctcgcggcccaaaagcgcggccccgccacgacgcctgctagctggccccacttcggcgcgcgccgcttacatcatagctcgcctctccccttccctagccacacccccttgcctggcgacccggaagttgtacttgcaactgcggctttccttctcccacaatccttcgcgctcttcctttccaacttggacgctgcagagtgagtatgggtggcggagtctgggctcctggaatccagccccatcctcctttgggattgtgctaactgggaccgcaaaatctctcccgagccagcccggggctccggttgtggggagatgggaatacaccctgcttttaaaggctcccagagcctgaggaagaaagtgaccaggcttaggggagccggagcggcagggatttccgggtcggaggcatctgaggggcgcaggggcgcgggtgcgtgggccactgggtgaccgacttagcctggccagactctcagcacctggaagcgccccgagagtgacagcgtgaggctgggagggaggacttggcttgagcttgttaaactctgctctgagcctccttgtcgcctgcatttagatggctcccgcaaagaagggtggcgagaagaaaaagggccgttctgccatcaacgaagtggtaacccgagaatacaccatcaacattcacaagcgcatccatggagtgtgagtatccctctagccgccctgggtctcgaactcacgcgtctggttgttaccgagagatgtgccgaatcacctccaccccaatcttttcctcttgtggccttccctgtttcattcattggcaatttaacaaatcctgtgggctctaccctccgaatacattcacagtctgaccagctgcattggtctttctgaccgcccccattattctttcttagccgaatgcggacagcagcagctccctactcctgttcccttccctacccaaacatgcgtggtctattctcagatcctccatcggccttctatcttaggttagaaatcaagagttcttgccatgatcccacattggctgacccgcttaatcataccgggcatgcttttgtttcaaagtagctactttgttgaatttttaccctttttttccctatgcctgaatgttttttccacaaataaatgcttcgttgccttcagactttgagtccaatatcaccctggccatctgttttgttttgttttgtttgagacggagtcttgctctgtctccagcctggaatgcagtggcgcgctctcggctcactgcaacctccgcctcccgagtagctgggattaccggaccccgccaccacacctggcccaccttggccgtcttatagaaacttgcagtccccttccctaatgctttattttccctggtttgtctttctctgtagtactagataccatctgatgtactcaataggttgcttacataagctgt

SEQ ID NO: 37724 - DNA, 1722 bp, Homo sapiens
aagaaagtgagaatgtgtcatccattgaagacgcaggatgataaaaagcctacaaattaactcagtaccacagcaatgttctcactgctgcttctgctgactttccaaagccaagacagaggagagctgctattatggcctgaattttgtctccccaaaattcatgttgaagcccctgctcccagtgggagtgtgtttggagatagcacttttaaggaggtatacggttaaataaggtcattaaagcagggctctagtttggcctgactggtgtccttataagaagagacaccggggaagtgcacccatggagaaaaggccatgtgaggacacagagagaaggctgctgtctgcaatccaaggagagaggagacctcaccagaaaccaaccctgctggcaccttgatcctggacttcccaggctccagaactgtgagaaatcaatgcttgttatttaagccactcagtgtgtggagggggatggaggtgaggtagaggtggggagcagctctagcaaactaatgcagctgtctaaaaccaaaatttatagcaatattgtggaccatcatggaagtacaattagtgaaactacgcctgtcttattaagacctccaatttttcaaaaaaagactttttcgttttctaagaaaatgaaagtccagtgaatcttaaacttcacccacataagaagtcaaaagtcagagttataaatgcctctgcaaaactaaaattcagtattagaaacctcaggtaagaccacataacgaacaacactgatgacttaggagtaaccaaatccatgttctgagaacaaccagaggtggtcaacagaggacatcttctggatgcctgacatgtgtcaggaattttgttccatataccatacacataatattacttatctccataaaatacataaaaaacaaggtaactgccagtattttaattttctaggtgagaagagcaaagtgaaaaaaataaccaacccgaaagccaattcatctgactcgggcctggctctgcccatgacatcgtcatggatggaagctcccagtggctgagtcacactgaaacgcacacacaatatttattctcttaggtttttcccagaggtgttttcaggaaataaaacaagcatctcattgtctatgcccacagctcctgcatggacactgccacaaagaacttgatccaagcttgttttcaaaagcagctgcttctctctgcacagtaaatatccaactgaattaagtgccttctccagccacctaagtcctaatcaacaatgaaatgggcattctgtgtgtatagttcagatctgttcctctgaaatgacaagacatttctctacaggccaaacactaaccatctactgtctaaatgcctgggctaaaagccatacagactacaaaggagctagttaaaagttaactgtcatggcaatgtcattcccaaatctcactcaacactcaccctgtgcagggtaactcaggatcaaagaattcaagcaaaaattacaaatgaaggagggaaagggttggaacaaaaagcctttgattttcagagagctgacattcttcaagtggatactgtaacatctaatctgtaagtcgaaagcagtatctttacaagaacatgaaaaagttcaatgatcatcccatcatcatgatttacaagattttcagtcgggtatatttctcactatagagtttaagaaaataa

SEQ ID NO: 37725 - DNA, 782 bp, Homo sapiens
cttaaaaaaatcgcaaaaaaatttctttttttcttttttcttgacatggagtctgactctgttgtccaggctggagtgtaatggcatgatctcggctcactacaacctccctcctgggctcaagcgattctcctgcctcagcttcctgagtagctgagattacaggcacccacaaccacccctggctaatttctgtacttttagtagagatggggtttccccatgttggccaagttggtcttgaactcctgacctcaggtgatccgcccgcctcagcctcccaaagtgctgggattacaggagtgagccaccgcgcccggctgaatttcatcatgttttaagaaagtttactaatttgtattgggctgcattcaaagccctcctgggccgcacgcaaccagcaggccacaggttggacaagcttgctctagagcatagcctcaaactatcacccagccaaagtgtcactcaagtccagaaacaagggcaaacactggcaaatgggaaaaaacattcagaaaataggacactgacattatggagggaaaaaaacaggagtccagccaaataagagataaaatactctggattggggccggatgcagtggctcacacctgtaatcccagcactctgggaggccaaggcaggcagatcacctgaggtcaggagtttcagaccagcctgaccaataggtaaaaaaaaaaccctgtctctactaaaaatacaaaatattagccgagcgtggtggcgcatgcttgcaatcccagctacttgggaggct

SEQ ID NO: 37726 - DNA, 526 bp, Homo sapiens
ctgtggataaagggttgcaggtgattattttttccttctttcttatccactttttcatttctggaagacgagcatttattactcgtgtttaaaaaaaaaaaagatgttttggttttgttttttaataaaagggtcttctcaagaagtggtgactcctggcccaagaggaacctgagtggttagacagagcaccaggtaatgcctgtgataggaacagaaaccccagaaggagaagatgagcaggtggtttccaccttctcttagcccccagctgtccagtgactcattctctcagtgcaaaggtggaacatggggtcaagactgccctaggtcagacacagctctcagaatctgcccacatgatcacaataggagaagactgccctgagtcagacacagccctcagaaactgcccacaccattatgtgtatgcatccaggagcacattggtaagtcagaaacaagattaagaagaaaatggctcgattcgttatcgacaatatacgagcaccatgaaacacaccaa

SEQ ID NO: 37727 - DNA, 630 bp, Homo sapiens
gagggaaataggggacagccctaagtaattttggaaataagtggagtctgtggaaaggacggcaaagaaccatacacaagtacaggactccatgggccacaggttaacaactctgaaactactacacatgcacagatggtcctcgactaacaatggttccacttaacggttttttggctttacagtggtatgaaagcaacacacattcggtagaaaccatcctttgaattttgaactttcaccttttcccaggctagtggtgcaaggcacagcactctctcgtgatgctgggcagcagctgtgagctgcaggtcccagtcagccacgtgatcacaaagataaacaaccggtactgtgccctacagtgcactgtattcaatacattacatgagatattcacactttgttatagaatatgctttgtgttagaagactttgcctaactgtaggctaatgtaagtgttctgagaacgtttaaggtgggtgaggctaagctataatgtttggagggtcaggtgtattcaatgcatttttgacgatgatattttcaacttaggatgagtttattgggatgtaaccccatcgtaagctaaggagcatcagtatattgtaaatgaaccattaagaaaa

SEQ ID NO: 37728 - DNA, 850 bp, Homo sapiens
taccatagcacaataaaacccgtttttaagaaacagtaacacccatccctcttccccgccccactcccacctacattaaagaaagtatgccttccctaacagctttgggcccagaagtacatctgagcagctcaatgatggaaaacgttattactggagtaatagaaggacttctcactatacacaagccgttaaacagtgatggctccttcacggtacaccacaagccactgtggggaaaccagctgcactagatagctgtcttcatgctagggctgtttgctttggctgctgtcactgtttttgagggttagagagaaaagcaaataaagaaccagaacaggccaggcgcggtgtctcacatctgtaatcccagcactttcggaggcgggtggatcacctgaggtcagaaattcaagaccagcctggccaatatggtgaaaccccatctctacaaaaaatacaaaaaaaattagccgggcagggtggcacacacctgtaatcctggctacttgggaagctgaggctggagaatcacttgaacttgaacccgggaggtggaggttgcagtgagccgagattgcgccactgcactccagcctgggcaacaagggcaaaactccatcgcaaaaaaaaaaaaaaaaaagaaccagaacaaagagaaaaacttttattcacgaaaagtcacaaataaccgaaaaagaccacatgaagtcctttctaatgactagtaaaaagaaaagaaaaatgttggggaaatttgcattggcaacatgagaaatctacctattcaaagtaaaattcataatccaaattatccaacttttgaatattgtttttacaaagcatt

SEQ ID NO: 37729 - DNA, 814 bp, Homo sapiens
gacagccctgtatgctactgttacagacacaattctacctccaccttgcaaaccacactcttgtttaatggccctgtacataataaaaggcaggaaatggagtttggaggcactcctggatcagagaaaaacatataaataagacaacgcaagagtgcctcctttgcaaaatggaaatcaatatgagaggcaaaggggtcagtgaaggaagacaactccataggctcaagttcaaaataaaaaaacggttgctctgcggcggattccggctcctcacgcaggaagagctccccagggagcctgtaaaactgcaaacaaatcttgaaaaggaatgagtctgcctgtttcatcaggctcaccaagctacatgcatttcaagacagcaactcttgtgcaattcctaaaacaagcaactatctattgaacacccactacgtgctcaggacactctagttgattaatcttcccctaggggaaggatgaatcatttgcaaactgcagccagtgaggccacagtgggttccattcatcttgaaaatgtgcaggtatattaaaaacagtcaggcttagcacaaaagtgtttggcacgactgtttccaacaccctttacaacctttgctgtaaagctcatatttacttgatttttatgtcaacatttctatctttgataacagaggcataaaattatatctagtttgctacaactaaatgtcagatatttacaaactacagaagctttctcaagtgcacatataagggggtgcaagggtaagggctgggatcctttatcggttcgcaacacctggcataaata

SEQ ID NO: 37730 - DNA, 963 bp, Homo sapiens
taggctggtctcgaactcctggtctcaagtgatctgccgcctcagcctcccaaagtgctgagattacaggtgtgcaccaccatgcccagccgagaagtgaaatttaatgttatttaagatgaggtcatactggaggtggtaggcccttaatccaatgtgattggtgtcatcacgagcagacggccactgaagacacagacacacagggagagcactgtgtgatgactgaggcagggattgagccatgcagctgtgaggaaccccaaagcatgccagccaacccccagaaccccaggcaaggcaaggaagaactcccctacaggtttcagagggagcatggtggacaagctgactttggacttctggacaacagaactgtggttttgttttcagccacctagttggggatcagcccttagaaactgagacaatgcccaactcaggccctggctcttttccacgcacagagtgagagagctttaaatatacaaagagatggctctccaaagcctcccacaatagactgaccatctcacccagccaatctttctggacccaaagtggatttcgtaaccaatttctatttactagtcattaacgttgctatttactttacctattcccctgacctgtcaataatctaagtccagtaaagggcagattcagcggggaggcactcatatgttcaaggcctatgacagttggttaggaggcagaactttttttttttttttttttttttgagacagagtctcgctctgtcgcccaggctggagtgcagtggcgccatctcggttcactgcaagctctgcctcccgggttcacgccattctcctgcctcagcctcctgagtagctgggactacaggcgcccgccaccatgcctggctaattttttttgtatttctagtagagatggggtttcactctgtcaggcaggatggtctcgatctcctgatcttgt

SEQ ID NO: 37731 - DNA, 3112 bp, Homo sapiens
agctacttgggaggctgaggtgggagggtcacttaagcctggaggcagaggttgcacagagctgtgacgacaccactacactccagcctggatgacagactgagaccctgtctctgcccccccaaaaaaaagactccacgaaagactctcagatttgataaatgaattcagtaaagtttcaggctacaaagtcgtcatacaaaaatcatagcatttctacacaccaataacaatctagctgagaatgaaatcaagaaggcctcagaatttttaaggctcctcaagcagttcccatatggagaaacatgggcaatgcatgtttgccagtagctattccacataaaccttcaactaagtccccctggccctccatgtctccccaacatgaagccccctccagccaacaggggaacagtatcagtgagatacaaaccaccctacttacggatggctccacactttacctggtacccacccccttctgactcaggagcctgtgcctcctcttccaccctaagtgtcccatctctactcctttgcttcccctcccaccaggttcagaagaaatgagaacccctctgactcctttccttctagatgtggttgcattaactccctggatttccttctagagcaggggttctcaactttggctgcagtgcagagccggcctgggccccactccagagtctgatgtcattggtttggggtgctgcctgggcacgggcattgtcacaggatcctccatgactcactgtgcagccaagaccaggaccactgttctaggatcttctcttgttccctcttccctaaggctcttgactctgccactatgtctgcccttaagctgcaatttcatttctgtagttactttcaccttgaaaattacagagaagcagaaggcacctgctgcccctttcttctttatccattgcatctagcctccatccagacagttcttctacagcaggtccttgaaatgacaccaatcaaatattccagccttagctctcttatctgcaacatgaagataatagtctctcctgctgatgaaggtgatgaatttgaagatgctccctccacagaacaggcaaaataacccaagtgagccaggagcccaagagagctagatctccctcatgccttcactccatgtccatccccacagtgcagagagggtccctgactccaccaccaccaacaccgaggtgggggtggcaacaaggacgctccatcatccaaaagccagctcctcagaccaggacagagagcagcttgaagacccccttcacatcttgcccacaacacactggagagtcatcctgatccttctgcctctttggccgctgctcccaactcaaaccatctctcatgtgcccggccttcccggtgcccacccttcctggtgcccaaaacatcttaggctgagctgtgggttgctccactggttctcaatcctgcctgagctctggaatcccctggggagcttttgaaatcccaatgttagagatgctagtggtctgtggtccggcctgggctactgacagttctccaggctctcacctgtgtggccaagggtatgaaccactgtgtctatcctattatttgcacaacgaagcagggacctttgttatctgatgcatctgccagctaaaatctgcctaggaaaacataaagtacaggcaggaaaaagccagcctacgtttaggaagaaactacctgtcagtgtcattcatcaaaaagctaaatgcaaaaggatacaaggcccatgcaaagatgtcgatctcaggttcaacctcgtggcagaaacactgggtaggacacaaagtcccaggaagctctgaacagagccaagtgccccatgggcagtgactcatgtctgaccttaacaagagctggctcacaaccacgggctagggacataaggccattagaaagtactcagagggcacagcacatgtacacatgcacactcccacgcccagaagcatgcctgagtgggacaatgacacctgaaagctgagagctgatccctacactacagctggatgtgtagcaatcattacagggtatctttacgttcatttttttaaaaactccttagccctattaaattcagctgcctagaaatactgaactcacaagtagcatgataacgttgaagagcctaacctaacagatcctatgaacgggcaaacctccctcttttctaagaaaatatattaaagtatctcatatcactaaggcgctcttttgaggaaaagaaaaaaataagagaaaaagaattccaaaggactttgttgacaaaaatataaagtaatattctattccatcctttataaggttgttatcagctgtgcctgtttgaacgtgtcattccagtccctcccatcattaactaacacatatcagacatatgacacgtgccagggactgcgacaagctccacccactcatcacctctgtttaagccttgccacactagaggcggacacagtcctatccccggggctcagggaggctctgtagctgctacaaggtcacacagcaaagagtgggagagggactggcactcacatcccagattcagtgtctggtgacagcccatttcctgatttaaagatggtgccttctagagctgtgtcccaggacggtgaaaggagcgagagagctctctgaggtctcatttgtaagggcgctagtcccatcttaagtgctccaccttcaagaaaaggccccagctgctaataccatcctgctggtgtttctgtttcaacatatggatttgggagggacacaaacatttagaccatagcacaatgctattattccagtaagtgaaaagacacaggactgatatacagagttcaattatataaacgaaatgcggccaggcacagtggctcacgcctgtaatcccagcactttgggaggccaaggcaggcggatcacctgaggtcaagagttcgagaccagcctggccaatatggtgaaaccctgtctctactaaaaatacaaaaatcagccaggcatggcggcaggcgcttatagtcccagctacttggaaggctggggcaagagaactgcttgaacccggtaggcagaggttgca

SEQ ID NO: 37732 - DNA, 3508 bp, Homo sapiens
cagccaacagggataattggacttgctccttcccaatgtggatgccttttatttctttctcttgcccgattgctctggctaggacttccagcagtattcagcggttgtacatagtgcaaattagcactgtggctaatttgcttggcgaccgttctagcagtattcagagtaggccacaaccacaaaaatattgtggagccactgccccaagatgcaacttctcaagcacgctccaaaccagtgtgcacggctaagtcatgtacctgatctcacctgcccccgtgacaatctgtggaagctgtgttcttgggctgctttaccctgtgattgagtctcaccactactccaaagacagaacatgcttcccacacactggaacaaatcaccttaaggaccagtatactgtcacagatataggtctaccttacaaaaagagaggagtcagttgttcgctttgttttgttggggctatacttacagctacagtcttatgataaaggaacagccacatggagaaaacacataaaggaaggtcctgcagagcccctgacagggagcttccatggcctctccctgtgggtcagggggcatccccctcctggcacatcagcatactcaccaaccaggaagctacaccaaacctcggtgtttagagtaatgaaactcaccagagttttattatgtaggcaggagtgattaaaacatcggccatggacttggtgcttggactcaatctccagcccctgttgtcctgtccctggattcattacttcgatagacagctggttgtttagattcagcaagaggctcctggagtaagaactgaagccataaaccctctgtcaaccagtgagcacttccctcccactgccactggatctccgacaccacacaaacacaagatcagaggccaccagaaacagcaggagagaggaggtggaggatgcattacaatctccaacagaaaaagaattcaaaccttctctctttctgtacacacatgtataaaagaattgtcatgattacatagggcatctaagcagtgggtgactaagacaagctcatttcctatctcaaggctctataataaatgcttcaaatttcctaaaaataatttctggagagcgctataagggttgcttgcaggctaaccaagatgaaaactaccacatttctagtctccaaatccaaaaatactaacactaaaaaacaactcttccaatttaaggaaaaaaacctgctgttaatacagtacactccgctggctgaggagatgtggcaaggaatctaagtaaaccctcggctgaaatgatgaggtcagttagggttatcccccaagagaagagaacttctgcacatggcagcagagcccaccataagccaaccctgaactcagggaccagatcaaatgtgactttttccccaacttgcttagggacatggtccctgggttggtacacagcccaggtctatcagctgccagaagtacttgcagttcattacttaggaagctgtggaaaaaatactacaatcagagagtgatgaagaggctgggtggccaggaatcctctttcgaagcatctggagacgtgatagggcttcctacaacaacaggacagaaggccaagtacccaccaagtgagtcagagcccttaccttcccatgtgccttagaaataagctcttcaataaccaaactatcccacggataaacaatctaagatcaccaaggttcgtgacatttgtgtgtgaatccatttcctctgagcaaatgatatttttatgcctgtttgaaaaacaagcagcctcccatgacaaatgcattcatcatccaaacaatcaagcagcctccggccactcctccggccaacatcacttccagccaacaagagcaatctggcaaagcagcacctacagagcccagggggcacccggggccagggttcagattctgacaacacaatcccacattcctgaacctgctattcataaccactcccttctaagagtacacaagaaaaatagtttaaaaaaaaaatcacattttccaggtctggtgcaggcagatatgaataaaatacttacagatttatgaaacacttgcaaagtcaggaatctgagaaaattatacacacagacattcactcacacacagacacacacaggcctccttccagaaattttatttccacaaagcacagtatagtgtaatctattagaatgtcacttattttaaaaatccttatttctgttccaaagaaagtcctgggtcagccccgtgcccttactatcaatgatcctctgaaaaactaagccacaaaccacaagcattcaagatcagaaataacgcatgttaggcaatgtttcctgtctttttacacttaacaatagtgtgaaatagcttgcagagatgaggtatagacgcacctttatggtgcagcaatacaatgtagagcccagagacttaaggatatctaaatgtattgtttaaaaaccattacctttccttaatgccagagtgaggcagggtaaccaatatccacgcattaaattcagaaacattcccgaacttcatttgagttcttagctcttcctccatccaccagacattttaattattagcattaccagagagtaacacacttgaactccattctccttccccttgagtccctattaggttataatgctgtcttagtccatttgtgttgctataaaggaatacctgaggctgagtcacttataaggaaaagagctttatttggctcacaggtctgcaggctgtacaagaagcatggcaccagtatctgtgtctgatgaagcctcaggaagcttccactcgtggtggaaggtgaagggagctggcatatacagagagcacatggtaggagagaaaggcaagagagagaggagatggtgccaggctcttttcaacaaccagttcttgcaagaattcactctcatgagtatggcaccaagacattcataaacgatccactcccacaacccaaacagctcccaccaggccgtacctccaatactaggtgggcatcaaattccaacatgaaacttggtggggccacacaaaccatatccgaaccatagcaaatgtcttgaaggtaagaattctctaccacaagcttctctgctgggtacatatgtcctgcccataagcaaatcttgggtgagcactggtgactaaccagcatcacagaaagaaaagacagataccagggccctgttaccaacagcctggcaaatagatgaccacactggatctcaatttacaaaatgggggtaaccaggtggcctagataaatcttgatagatatacagagagaggtaaagtagtgaaagccctatgaaaaatgtaattcaatatgaaaacgtatggtattattactacaatgctaataagcaataaatgtttctcaaaaataggaagactggaagaaggaagcattacaagctaagctggctgttcttccttggagaaaatgaagattggt

SEQ ID NO: 37733 - DNA, 708 bp, Homo sapiens
atctgaacagcagaaaacagaattgtagctcaactaataaaaaaaaaaaaatgccaccaccaacctcacctaacagcaatcccccatgtaatataccaaatgtaggcatgatcactgctggcctcacctgactgtgaagccacctcaaatgttctacgtggaggcgcagttggcgttatggagtaggtcacgtgaatacatcacattcagcgatatgcactgtccaaacaaagagcagggaacaacaattcaaaccaactgcccaccatcagggagcacaggccctggcctgagttcatggaagggctggaattccccaggtctctaggggtcctcacttcccaggccctcctgataacatgagcagattgcaaaaagacaggtagcttgctgatttctgcagtcgtttttccctcaagcaatgtttgttcttcatgttgattttggaacctgattttgtttggatgtttgtctcatacaggtctcaggttgaaatttggttttttggtttttgtgtttttgagaaggatcttactgtcaccctggcttggttcactgcaacctctgcctcagggctcaagtgatcctccaacctcagcctcccaagtagctgggactacaggcaggcaccaccacgcctggctaattttggtatttttttgtagagaaagggtttcaccatgttgcctaggctggtctcctggactc

SEQ ID NO: 37734 - DNA, 3728 bp, Homo sapiens
tctctactaaatgaaacatttatagaccaggaaccctgctaaatgcaccataaataaagatacactgccctcaaagaaagggagggacgacaaattcctgcctcttcgcctcttcccagggcaccacccacctccatttcctgagagcctgggcactaagcaccagggtgcgtcacggggcccaacaaggccactgtggcccctgcctcctgcacaactccctcccccaaagctcaaaacagctcctggagcaggcccacgtgctgcccaagttgcccaagttgagtccttgttgccactcaacaggaccactggttaccaaagcaccgcctccgtccagaatcctaactacactctgccccttccatggggaaccctcagctgcctacagctccctccatgcagcaacctgccaactcccacccactcacccggtctcagtgtaagtctgcactcctctaacaaacccaaccgccagctttctcagaagctaaagtccagcaaaatccagttcctttgcacttggttctgcggtttccaggcgtgttagtacatctcctaccagactcaacctcaaaaaggccttccctagactggtctgagagcagaaagagccgccaaccactaacccggggacctaacctaggtcctttgacctctctctggcctctgtcttctcctcagtagaacaggaacaagacaggagatctaagctctcttttattccgattccaaaattggaaagaaaaatataggccccctagatacaaatgaaaaagtctaattgttccttcactgacctttaaacaggtgtcctagctactgcaagttggcgtcaatttcaaagagctttggaacaaaacttttagaaaaaaaatgctttgttttatcatcaactttacgagcctgggttttttttcctatcattccttgtaagacactgaaagagaggaaaaaactgatctgttcaatttctctactgagatcacgagcttgggattcgcccaccctcagtttcccctccgggcgtggagacagttcccgctcaccgcggcctccaagagctgcgccccgcgcgcatcgccgcgcgcccccagccacgacaccacctggagcctccggcgcctccagatggccgagtccgggctggctcggcgcaccccgctgtcacctggccccacacagcagcctcgctgctccagggcggccccgagccctccggccccgctccacccggcgtttctccttcgattcccaagtcgagtccggcctccagctcaccgggccaggcggcgaagacacctgcctcgcccggaaaacgcacgcgcccgggagccccctctaccaccacctcgacgggagcccgcgggagaaacgcagaaaaaaggaaaacaagcccgcggcagggccgtccgggccccgcgtctcccaagaaatcgcctctggcgacgcagcccgggactgggggccgcgggcccggcggggtgcgaggccccgggcccggccgccgcgcccgccccggcgagccccttaccggtgaggcggccgcccccctcgccgtgcccgcggcgccgctgcaggatgaagtagcagctgctcttctgggtcacccagagcttcagcgcgttcttcagcagcacctcctcgggcttgagccacatcgcggcggtccggccgcgcccgccggccccagctcacatctccccggccgccggtcgctgtgagccgagcccgctcgagaggcgacggcggcgcgcggggaccacagcccggccggtgcccagcgctctgagagcccgcggagcgcagcaggcgcagctagccccgcgcacccagcgcggccctcacgtggccccgccccgcacccgcccctggccccgccccgcacccgcccctggcccctctccagccgccggccccgcccccgaccgcccctaccccgcggctcccgcggcgcctcccgggtttccgcgtccaaggcgctccggcgcgcagttccggagtggagggaggaagtccaatcctgcgccaggctccctccctcccgcctctccgcgctctcagggggaactcgggagagctgccgtccctgacctcgacctgagacgtggaggagggacagggaaaaagccttcttctcgcagctgcaggttgccccaccgagggcatttttccgcaccgagggggcggggggcagaatgcacgccagaaaacctaagtgcgctgggtttaaaatagcaacaacaacaaaaattacaaataaccaaaaaacagcataagaattaaaaacagttatattccaatgtttttaatacttggttcacattttggatgctctccccagggatccgacggcgctgcggaggcggcagcgatgtttgggatcctaaagaaagcatcagaccagactcaggtctggacgtccctcaagtggcccggaggtaccgatattagtgtcaccgccgtcagtgccctgcccagaaataaaacctttgttctgagagaaattgaaaagctggaaaatatggagtaggcgatgtgaagagaaactacagggaatgtagaggtcgggttttaaatgcgtatttcctcaaggatgttgtggaagcagagacaaggtggctggcctggagcaggctggaggacctccaaggatctccacagggaggcagttacatttaacaccctacctagcaaaagaagaaaagaacaaccccatgaaaacatccctggggttttaacaaaggaatccctgacaaaacgtgactgataactaggacagaactgaaaagtggaagtaaagtcaatcccgaccccccaggacgcctgggaactcagggaagcgcctccagaagggaacagctcagaaaccctgaccagacctggcggacaagaaccgtgtgggcgggggacaggaacgcccacccagaggccgggagagcatggtccaggactggcagccactaacagcctctgaatgaaactgaggaaggaagtcaatggtaatcgggaccattagggtgcaccagggcatatagaacagtcggggacggtaagaaaacattccttccagagacattcactggcacctcccgcgcagacacactgccaggcccgggaatcgcagagatgaactgggagacttgtctgccctggagaactcacaggtaggaaaatgaggcagaaaagagccgtaggcttcctaacaggagcccacgcaggggggcagtgagcagagagcaatgcgcagaccgcgtggtcagttcttggggggagggaattgagaaagtcccacagaacagctgttgctagatcagtacttgaatatgagtttgacaggaggtcaagtaggggaggtcatgtctggtaaatggatgagcacagatgaccttgtggtttagagcagcctctggtggctgacagccccaaatggaatcctgcaactgctgctaattagctgtgtgatcttgaccttgggcaagataccaatctcaatgagcctcagtttactcaactataaaattaggataatcgtagtgcctcccttgtaggaactatcaagagcatactgtagtaagtacttagaacacaaagtaagtactcagtgaacatcagccattattattaaatgttcaaaaacttctgaaagggttcacacacgctcacccatgttttaaacattattcagctctgatctgccaaatattaaatatgaaagaagcacggag

SEQ ID NO: 37735 - DNA, 639 bp, Homo sapiens
tacaggcatgagccaccgcgcctggccttagtgcccttttaaaaggagcctcagagagatccctggccccttccacgctgtgaggacagagggagaagatgggcatccatgaatcaggaagcaggccctcagcaaacgtggactctgctggcaccttgaccaccggctttccagtttccagaactgtgagaaataaatatcagttgtttattagctacctagtctaagctatgttgttatagtagtctgaacagactaaaatgccaggcattcactcattgcagcaggttgggcttaacatttcattgtcagagctattttgcaagtctgtaggaacaatgattaacttgtagaattttgtctcatgggaatgcaaactagtttctgtccagtggaacagataatcccacaggttatagtttttggccctgttggacattaatcagttccattcctgaaccagcaatgtataaaattgccaatctataactagtttcttaaatgcttatactatcttattaattaccacattttacttgtgcccttataattaatgagttaactaaatctttgacatattttcagtttatatttgcataagattcatgattttacctttctgaaaattataccttaaca

SEQ ID NO: 37736 - DNA, 2778 bp, Homo sapiens
aacatttgcattttgggtggaacacaattcagcccataacagaaggtgttcactgctagaaaagaaggaaaagtgagagagtcaaaagagttcagatctaggaggataggtgactggcctggttggtgcaggccactgacatgttgagcccacccaatggcaacacctacctgggagctccatcttcagggttgaccagcagtttaagtgaaatcagctaattaggaaccttgcttttattgttagtgatattaatcagctaaactcatgagtgaaaactgaattctgaagctatctcatccacgtagtacaaagatctctgaatatagacatggacattccttctagtatcagcagttaaaaacttctggccaaagatgctactgtcttagctgcatttgtccagtgtcataagcagtcccatgctcagcacaggacatattggtagctttagtacctggagccagctgagaaaattggccaaccctctaggcaaccataatccagagccaagcctgagacagcctgaaaacttgtcagggtccttgaccaatggagtggactggactcagtaccatcttttcttgaaaaaggcaatggttttcaacagagttgggtgttattcttcttagccccagaagtccaccggggcctagaaaggggacattgaaaataaggatttagggtttgtggttcagctgatagaagttgctgcaacatgcttcactggaaatcagctatgttggtggattccagtgagcaaaggttacaagtcaggaaaaatgagctggctgttaaggtatttagctgtagtatcagcaaccagacatgcttagcattgtttggacccacactccgaactgatgtggctccagtccctttaagtggctggcttttataccatattacatatatctcacaaagccctctcacggcatgggagaaaatattcatagtacctatatctgaaagaggagttatccctagaatatataaagaattcctacaaatcagtaagaaagcaaatacaaaaatgggcaagagacttcagtgggaacaaaaagaataccaaatgtccaataacatgaaaaagtgctcaacttcattagttattagagaagtaaaaattaaaagcacaatgctataccactacacaccaaccagaatgcttaaaaagtattaatagttagtggctatgtgaatcaatccatattcttatgcactgcccggagtggggtggagtataagtttgtacaaccatttgggaaagtctttgccagtacttactcaagctgaacatgcaagtatcctatgacctagcaattctactcccagcaagaaaaatgcttatgtctacaaaaaagagctttacttgaatattcatagctcctctattcattagagccccacattgaaaattatctaaatacctgtcagtaataacatgggtagagaaattcttgtagactcactcacacaatggactactgaatctgttgtgccacaaactgggtggctttaaaaaaaaatgtactctcccacacttctagaggctagaagtttgaaattaaggtgtagtcagtgtcgtgctctaggcctctagggcaagaaccttccttgccttttccagcttcttgtaacccaggtgttccctggcttgtggcagcatcacttcagtctcagcctccaacatcatgtggagtgtgtaacttttggatatgagctgtctgtttagttgcttcctcctcctccttctttctttccttccttccttttttctttctttctttggcttaagcaagagaaatgtattgtctcacagttctggaggctgggagtccaagatcaaggtgttggtagggttggtttctcctgaggcctctctccttggcttgcagatggctgccttctcactgtgtcctcacatggtcttccttctgtgcatgcatgaccctgatgtctctctgtctgttctaatctgctcttcttataaggacaccagtcagataagaatagggcccacctccaccaatggcctcattttaactgaaatacctctttgggtatttaagctgaagtccttatcttcaaaaacagtcacattctgtggtatagggggtgagggttccaattataaatgttggcgggggacataattcagtccatgactctccattctctgaatccccaaaattaatgtccttctcacatggaaaatacatttacccccatcccaatgccccaaaaatcttaacctattccagcatcaatttcaagttcaaagtctcacctaaatatcatctaaatcaggtatgagtgagactcgaggttcaattgtcttttttactttcattttgagcttcccaggatccttgcagccaattgaagggacaatgaaacatttccttgcctcataccaaagttattgcttaaatatcaagctacctttgaaaggggaatcccttgttagtaacggccaggaaagagaatgttagaagaaaagcatgagaatttctacaaaacggtgaaagcagaacaacgaagcaaacatcaggcaagattatagcttaggtactgaagtggttacgttgtttgggatatataccctggggttcgttttcacgtgccaggaaaatttaggacacaaacaccacaccgagtttaggagcggaggcttaataggtagaagaaagaaagagaaacagcttcctctgtagaggaaggggtctcggagtggaaaagatctgctggtagtgaatgcactgagttttattgtcc

SEQ ID NO: 37737 - DNA, 2302 bp, Homo sapiens
ttttaaaaagatgaaaaaaattttttttacataaaatatctttctccccaaaaacacataaaataaaataaaaatatgttttaaaaaagaattgaggtggctcttaactagataattagaatcgctggtggtaatcactggcgaaatacgcgtacgtttctgtaggtttagggaccgggcaagtctgggaaatgccacctggtggttctcagcccagactacacctcagactcacctgaagaggtggggtttattaatatctcaatcagcatctctgggggtggaactaggtatttgtaacgtctccccgtgggtttctaatgcacagctaagtgcccaggataagtgccctagggcaatctaagtaaaacgtggcacagcaaacaattttgtaaatgaatattaactggagacatgttctcgaaatcatgttaagagaaaaaaccatgtacaaaaaagctcatagtgcagtatgattccatttctgcaatgagtgtaagactagaaattaaccgtggttatgtgaaatgtgtggtatatttgcatttactaaattaaaaaaaatgtttctgagacagagcgcccgggctgcaatgcagtggtgatcacagctcactgcagcctgggactcccgggctcaagcgaccctcccgcctaggactctcaaagtgctgggattacaggcacgcgccaccacgcccggcctgcatttacaatactttttacgacgaatacttacggatgttatattaagaaaatagttaacatctgaggtgcattcttccaaataataacgtagacagcacttactgggaccgtctggcaccaggaaccgtcctggggaccgccaaagggcggcttaacctcgcagctgcgcagacgcatgcagtccccgggctctcctgccgcgggacctcggcagacctaaccctgaacgccaccagcccgacctcgccccgcccctcccctcccttcccgggccccgcccccgcttcctgccaattcgccccgcctaccccgcgtctccgcatcctcttcctggcttcgctccatcagcctcgctttcgctgggcgctgtccctctccgcggcggtctggtttccccgacgtgttttgtttgcgacgctgtcgtgtaacagcgcgctttacggccgcggggacggagcgagccggcgccagggcccctcgggccgggaagaggggaaggggagcgaggttgatgcccggcggaggggcgagcgcggcgtctggccggcttctcaccgccgcggagcaaagagggtcccgggaagcggcagggtcggcgtccaggagcggcttcgggggctccggcggcggcagaggcggagcaagcggccccgggtccgggagcggaggcccggggggccccgcgggcaggatgagcttgaccccgaaggagctctcgagcctgctgagcatcatatcggaggaggcgggcggcggcagcaccttcgagggcctgtccaccgccttccaccactacttcagcaaggccgaccacttccgcctgggctcggtgctcgtcatgctgctccagcagcccgacctgctgcctagcgcggcgcagcgcctcacggcgctctacctgctctgggagatgtaccgcaccgagccgctggccgccaaccccttcgccgccagcttcgcgcacctgctcaaccccgcgccgcccgcccgcggcggccaggaacccgaccgccctccgctctcaggtacctcctgaagccagctgtgccgtgtggatagcgttagattccgcagctttccacctgcgctgctgggaactcacctgaaagggaaattaactatccctgtgaaatgatcatcctctttttccgcctctctctgcgttcccacgcccctcactcctccccgccttaactctaaagaatggagaggtggtagcttaattgcaagttcgtgacaccgaaaatgatttctctatacaccccatcacatcatacagctcagtgtaggtcttgacatgtttagtgtctcaaatacggttcgttcttcgaaaacccgtctgtggtgtgtgaagttaaaaccaatgataagactggatctgtccccggtttttagtctcaaaggagtacgtggaagtcagtattaagaagctgaagaagttggtgggcggaaatacacatgaaacaccttaaagactttgcagccgcctttcttagcctgttagggatgggggcagaggatagaaagtctcaaattgatgatctcgcgtttggaaacacatgacttactggacattatgtaaagtgcatacgtg

SEQ ID NO: 37738 - DNA, 473 bp, Homo sapiens
acaccccttgtactccagtctgggcaacaagaacgaaactctgtctcaaaaaaataaaaaaaacagtacttaagaaataatttttacaaaaacataaaaggaacatgttggttttattgggaaatttgttacagaaataaagcacaggagaaaataagggaaaagtcaaaagcccagtaaggagaccacgaaatgtgcacatgcacctgtgtttgagggtcaggtccaaactccagctcagccaccagcatgacctagtactgctcatctgtgcagcttcctggacactgtttttaaatcagaaagacctgccctaaaccagtctggagtaaaaactcttttctctactttaataactttctacatgacatgatcaacttatactgatccaacccaattcattcagtacccatcataccaatcacatgtaaatgtttgtaggtttaaaccagctacctttagtcaggaaactt

SEQ ID NO: 37739 - DNA, 3295 bp, Homo sapiens
ggtgtataagaacccagcatcagagaatcaatggcacactaaccttttttctttgacagaactactaaagcagggaacactgttgatagtatgtatgtggagtgctatgtcaaatctgacaggacctttcatgacattcttgtgcaaacgcagcctgggtaccgtgacaatagatttgtaatcactggaataaccgcactgaacgtagtgcctagcccagtgccaccacatggacatctgctctcattcccatgccctcctttctgctgcgactgaggaactgtccttggaccgcctgtgaccaagcctccagtgttctggactcagccttcttgccttctggaagactctcgcagatcactcccacacaatttcaaacacaccctaccaactctgtcccaccaacccatactcccacagtttctgcccattcctctgcatctccctcagtcttcaatcttcttgaaagagttgtcctaacagtccttacttcttctcaacagtctctcaactgactacctttcccatcacttcacaaaataggcaaatccaaggttatttttctgtcctcacttcactgttaggacctgaacttgcattcaggaagccaaaacagagcaaaaaacagaagtataggaaaaagaatgtctgacttagtagcagtggaaactgaaaacaaaaaccaaaactaaccacattaagctgagaatgagtcaactagttgtgtgatgcataaagtgatgttatcttacataacagagtatgttcactctctgtgtactggtcgttattttacccggaacttagtttcaaggacattttgcaaaataagacttaaactatgactactgcctgaagatacaacctgctgccctagggaatggtatgtgtaggaagggttgcctggcaaatagcaaggtcttttttgtcttttttccttgaggtcttgctctgtcgcccaggctggagtgcagtggcacaatcacagctcactacagtctcgatctcctgggctcaagtgattctcccatctcagctcctgagtgcctgagactacgggcgggcgccaccacgtccacgcgattttaagaaatttttgcagatatggggtctatgttggccaggctggtctcacactcctggcctcaaacgatcctcccacctcggcctcccaaagtgctgggattacaggcgtgagccactgtgcccggccccaaggtcttttcttgaatgaatacagtaattttaaaattttgatcgtaactcaagactcaggaaatctgactggcagtacagccagtgttataaccctaaatttagcaagtcagaaagcacaggtcaaggcttactgactcagtcagatgcaggttttctgactcagtttagaatattcagacatgattcaagaaagtgaagaaaccagagtgccaacgagccatcactttatgttggtgaagggacaaccgatcgtggggcgcgctgggggaagagtttggattcctactcacccctccgactttgggaagcggtgaatggaaaagaggcccatgattaggaatcatgagatttcctcacctgttagaaccacaagcctccttctgtggattttaacgtctttagtactcccttcacctcatcgatcaaaggcgaagatcacatcttgtccgcagacttacctccctcccaacagcgatcggggagccgcaccgagcaaacgagggcttccctgaaagttccaacagccagaggcctgagagccgtgccaggcccgcttcgcggcctgcggttcagggccaaccctgaagaccccagcctcggctgccgcgaagtccccctcccgtcctcgcgccccggcctgctcacccgcgtgagacatgggcaaggtgatgttcccgtagcgctcctcattgtagaggacgacggccgaggcgttcctccgcgccgccaccagcaccttgtccttgaaggtgcagcccccacgagccaccagggcgacccagggcgcggcccctcggccgccgggctcgggcacgaagaagcgcgtgtcgggcgcgcagccctcgaggtctccgccgggcgcccacgggacgcccaccaggccatgcgcgccctccttgggcgagctgtcgccgaagcggccactctccgagacgctccacaccgtcaggttggtctgcgggtccacgtactcgatgtttaccacggccgagaaccactcgagagcccggccccgggccccgggcacgcacagggccagggcgagcaacgccagagccaacacgccgcgagccccgacgctggcttcgcgccgccgccacgccatggcagcaccgctgagctgactagggggagtcagggtcacgcgcgagtgcggtgcagtcgaagagcagagagaagcggacacccaccgccgccctggaagactgaggcggggtcggggccgctgcgcacgcgcacctggcggagtggacgaagggcgtgatcggccctggctccgcccccgtccgaccggccgcgttgtgcgcaggcgtaagctccgcggagcctcggaccgcgatccgtcccgggatctcaggcgcctgtgggccgaggcggggcgcgcagcctgtaccacagcttgcgccacggcggaccctgtggccaggggccaagtttgcgcaataggacgtctagcacccccaaagtgaagggaagtaactccagagaaacgggaagcttccctgaaagcaggtgtgggaccgcagttctgtaaaatcgctgaacagatgtttgtggagagtttattgtgcaaggcacatggcagaggccttgtctaagtcgtttcaaagttaattagccaagcctggtggcgcccaactagagttcccactcgggaggtcgaggtgggaggaccacctgagccccggaggtcgaggctgcagtgagccgagatcaccactccacttcagcctgggcgactaagcgaaaccctgtcaattaagaaaaaaaaaaaatccaaatacattttgtgaaaaaaaaaaaaaaaaatccaaagctacgcacacattatccaactgccttttgctactaatattatgatgctaattgattccttacagcttaagtatatttacaacagccctttttgttatagtattttatgcataatctataattttgaaataggcataagcatacaacataagtgctcatttaagtagtctgatgcctactactgatgacatacaatgtaagtgctcatttaggcgtcagactacctaaatgagcacttacgtttcatgtcaataaaaaaggg

SEQ ID NO: 37740 - DNA, 1088 bp, Homo sapiens
gaaaaactcactattggaagttatcacagaaaaatgttggctaaatccgggaaactgtggcaaaatgtgatgtgcattcaattcaaactcacttctgtttattcatagttactccagatttagttagggaattatctccttaaaaaagaagtgtaaaaaatacaaactccttaaaatgaactctagttttccatgtttgctgattgttctttcctgtgacagacgctcatttgttctaagtctctatgaattgctgtcctcccaatttcaaaatgatactaccgagcctgcctgttacctaagtggaataggaaggccaaataatactcttaataagaataatagtaaaggtctgtggccaagagtcctttctatgccacacatggaaagaaagggctgccttcggatgtgagccctgtgtggctgccttgatcctggcagttccaagagattcattctgtttctgaccatgtgtctgtggtcatttgcccaatattctaagccaaatcgcagagactgaccagtggcagccagtcagcatacagtaactggacaagcagaaggtttgaaagtggactttgtcacccagtagttgcctcagccttcagtgtcacccagtagttgcctcagccttcagtgtccacacacataccccgggctttgaacctcaaagacctaagtttccattctgactctgagacacctgagagtttttgtgatcagaaaacaagcacatgacctgcctactaccgtggcttgcacacagaagctcttattattatcatttttatgtctaccatcaaaatctggaatggaagcaagaaagatgctgatgttggcagagtggctacacagagcacctgctgtaggtgagcctgacttccaaccacctggggctccaaggagagaccgattggggactggcagaactgccggcaggtgacattggttaagggttttatactctgccaccaaaatgtcctttggtgatacacctggaaataaagcctgtctacatttgaagtgaatcagatcactagattccttgcttagcttcgtaataacactattttcctggtcttgccatc

SEQ ID NO: 37741 - DNA, 3227 bp, Homo sapiens
tccttctacttcagcctcccaagaaactaggaccacaggcaaatgccaccacacttggctaattttttttaaattattttttgtagagacagggtctcactatgttgcccaagctggcctcaaactcctgggctaaagtgatccaccctcctcagcctctcaacatgctgggattacaggcgtgagccacttcacccagtatcaggctgtcctttgacccacttccttataagggaaagtcacgcagcaatggatagcgaccactcacatccccgtttttcctatacataggatctctggtgttagagtcagaggcttttgtttaagaattcctgaagatgttttccgatcccaaatttcagtggaacaactgacaccaaccagtctgaagacccccacagagaagcaaaatcatcatgagaatacagcttcttcctctccctgtcccatgacttcaccttgcacttttctaccaatcaactctctccacacttcagcccactctgaaacccttaaaaacactaactcctcagggacatagatttgagggtttctcccatctcctcattcatcagccctataattaaacctctttctctgctatgacccaatgtcttggggtattgacttgctgcacacatgaggcaatggacctgtgatggttacaaacttattgtatgaggtcactaacatttgggggatgcttgttattgcagcagcacctagcctctcctgactagctcagaggacctgaggcagacatgaggaggctgaggaggacatcaagaaactgaagagttaaggaaaagagaaacaggaaatgtggattagggggtcagtgtggaccctggagctggggtagttgcctgtggctgggctgtctacactctgtgcagcaggctggcttcctctgaggctccagaagggggaagtaagcacaggccatgaagtgatgccttccatgtgcgaaggatgattttgtagcatgtgctgactgtgggtcaccactgactggggaagaggtggaggaaaagggttggggagaacgtgtatcatgcaccgagcagtatgatcccagaacgttctaatgctcctcaagaacaaatgagtcgggcatcaacgaaggaggccaacctcagacttcctgtgtggggagcagtgctgagctggcagtgagttatccgtttatcccttgtgcacggtggctaatgtacttactctgcagccactcctacaatagaagacttcctctaggatgttggtcatttgttactcatacattcattctgcaaatatttgagctcctaggcactgagcctaccacagtgagtagacaggtttcatggactttatggtctgcatatggccaaataattaatagcaattttcaatatggattgctaagtactctgacagaggtaagtataggttgcctgggagaagagcatagaaactagtccagaggtctacaaagaatgaggctgtgagtaactgaattgggagttaagtacatgcttctgcatagcaaaagccccccacaattacaggtaaataaatgctacccttcccagcaagggccaggaagtgcaggaaaatatcaagttgcctgaggatctgaatgcaatagaaaaagttctgaaagtcaaaggtcttgcaatagaacattcaagaggtgaagccttatgattcatcaacttgggttcactcagtggtcaaaccaaaaaaaaaaaaaaaaaaaaaagacaactgagggaacccaggtgtctggaatgaattaactctttttttcctccttttttttttcttttctttctttttttttttttaaatgatgaaggctgccagaaactcaagggacctgaggatattagagaattagaatttcacaatgataatgggactgtgtccatctatagttaactcttcccactccacagagtcccagcacatcattcttatcccactccctccactgaccaaatctcatcctttaagacccagtttaaaatccacctcctggaattaattataccaagccaactctaaacagtggtcacctgtcgggaatggaagtgcataggggaatgagggaactattcattttttacttttatcaatttttataagtatgtgtcattttgtttaaataaagccaaaattaagcttatgaggaaaaagaaaattccacctcctccacggatacttctctgcttctctgttgtacagtggccccacgctcatctcattgccatctaccatttactggtttttcacaactaagtcctttcctctactttggactcagccccagctagagccacctgtagaatgcacacagcgttgctcgtatacaggggactaaatgcatggttggcgaaggaataaaagcctgtatcgttggcacctcagcttacggaagttgtggggagttttctgtgctagaaagtcgtgcctttcactgagcccccagctttaagcagtttcataagtagatgttaacaactgtgttccagtccctgctggttcccacacacccacgccagaaagaggctggccagatcatctccccaggaaacgtggaatgatagtacacgggagctgctgggagctggggaaactgcaactcttcctcctgtgaggaaacaggaccctaagtcggcgtcctgtgtctagagagcttgccccaaatgtgctcacctggaaaaatggctcccctccctcccctccctcccctccctcccctccctgggcgcagggcatttttcccacgtggatccactagatggcctgcaacgaacacggtgactttgaggaggcctgtgttggaaaaggaaatacttccttgcttatctgtttgtttgctttgtcattcaccatttgtcctcataaatcctttcaagtgtaactgatattaaaaaccaataacttgcacattcaagaacaggaaaagggctgtgtcagaattgaatctgtgggtcttcaggcagagatttctgatagttggcaaaataatcagaaattgttttgccaaattgatttctgagtgttagcattttgttcattacaacataaacaactctgcatagaaagaaatgaataaataattctaggggcttaataagtatcttttaaactacttcgaataaagagaaatgacaagacctagtactggtaagtatgagatagagcaggctcatatgcacatcactggtgccctacacatcact

SEQ ID NO: 37742 - DNA, 776 bp, Homo sapiens
ttagtaggtcccaggaaggaggtgtgataaaacccaaaggatagaagttaactcttcctagagatagcactgaaagcactaacctagtgctattaagtgctgaaatgctttctgtttagacttcaaagaggctcaaggacagagcagctgtgccctggcagcatctcctttgataaccagacccctcaccccagtgcgccaagggcaagccaacaacctgtgtgcagagggaagggagaatatcactgataaaatgccttccggacaacagagactgtggacaaatatgaaagatcaatacctaggttctatctgatacgggatcaaagcagccagacagtttacacacaagcaaatataatgaatcaatgcatagccgcaatttcagaaatgtaaatatacatttttatgatagcctgaaggacctataaagctagcaaacaagaatgtaaatatccagcttagtcaaattctaagtcggtttgatcattcaggacaacagtgtggcaatatgcataataaagaactgtcaatgtgattcgtgacctctagcccaacaccctactttgggtaggtattttctcctgtttacactgcagaaaaaaattatttatttacaattgtaaaagatagggattctttcagatgctcaagaatggggaattggttatataaatacagacccccagtaaagtgttaccggcaaggattctgtaacggtctgcagcaacctcaatttttgcctcctcagaagaaataatccaaccgaggggcat

SEQ ID NO: 37743 - DNA, 934 bp, Homo sapiens
aactacaatgcaataccactccaccaacaactggagcactggaaccctcacacactactgcagggagtgtaagttccaataataaaattacagcactttgggaggctgaggtgagagggttgcctgaggtcaggagtttgagaccagcctggtccacatggcgaaacctcatgtatactaaaaatacaaaaactagcctggtgtggtggcccacgcctgtaatcccaactactcgggtggctgaggcatgaaaatcacttgaacctgggaggcagaggttgcagtgagctgagatcgtgccactgcactccagcccgggtgacagtgtgagactccgtctcaaaaaaataaataaaataaaatacaataaagttggaaaactagttggtcctatctcccatattatatgacccagcaattccaatcctgggtggaattccccacaaaaatacatgcacgtgggcaccaggagacattcacaggaatttccagagcagcattactcaaagtaacctcaaactggaagcaatccaagtatctgacaattgcaaaagcaataaataaatcatggtctattgccaggcacagtggctcacgcctgtaatcccaggattttgggaggccaaggtgggaggatcacttgagctcaggagttcaagaccagccttgccaacatagggagacctcatctctagtaaaattcaaagaaattagctgggcattgtggcacatgcctgtagtcccagtcctgaggcagcaggatctcttgagcccagaaagccaaggctgcagtgagccctgattgtcacactgtactccagcctgggcgacagagagagaccttgtctcaaaaaaaaaaaaaaaaaaaatatatatatatatatatatatatatatatatatatgcacatatatataataattcaagattcccg

SEQ ID NO: 37744 - DNA, 1596 bp, Homo sapiens
aaatgaactacaactttgtgcaacaacctgggtgaatttcacaaacataatattaagtcaaagaagctagataaacataaacacacaatatgtgctgtttaattccattaattccatttacatgaagttcagagaatgggaaaaactaaattgtagggtttaatggtgcgtgtttaagtggcaaaattatgaagaaaggtaaggaaattcttaccaaaaccttcaggatagtgtttactttagagaaaagacaaagtaatggtggttaggaaggggcatgagaaggacttcaggggggttgacatcattctagtttttgacccaagaaatgttcacgtgaaggctaaccttgcgatggttaattgaactctatagtttttgtagatgtctgtaatatttcattttttaaaggcttaaaagacaaatgattgacaggcagcattgagcacccagtagaaggtagacagcattaaatttcagtaaatcctggcaactaaatgtaaggaattctcttgcagtgtgcaagggcttgagagtgtgagaccagaaggaggctatggcagtggcccaggactagaatggtctgtgagctcactggaaggcctggcttgaagacagcacatatttgacattgcagactgtgaggcagacatttaggcaaacataaactcagagtcaaatcccctaggtgattagaagatagctttaaagaccaaagatcacagtgaaggtgaagagtgagttcatagatgtgagagtctggaaaaaataaaaacacataagggaagcttcgatgaacactggaataaaatgtattgtattgatacgaagtgtacaaaagaaagaatcttttagcctggtatttattcattcattcaaacacttcttgagcatcagaaactgttctgggtgtagtagagaagacaagaaggtatgaaacacagttcttctctttagttttaactacaatgaaacataccctcatgaacgtttaagtaataattcaagattcccattggccaagggataaagcccaaactcacctcctcccctaatatagaaactccactccagtttggcctcttgttggtgccgtctccccgtgggtctctgctcttccccagagcttttcattttcactgctcctgtatataggaggcatagttctatgcactttatatctcttcattcctacaacaacctcaggaactggtattattatcgccactgtccaagtgagggaactgaggcccagagaggctaaataacttgttcaagtttacacagcttgtcagttctggggccaagattccaaccctgggagtctgtctctagcacctgttctcttaacaatccaattgggctacagccatttgtgctccaatccccaacaagctcaagcccttttgtctctctgtggcttgggatttactgtttgtgggtttcttctccaaaaaccagcttgaaggctgctgccttctctgtgcagctttctgtgctacctcctcaaggtcagtgtcctccctcttcttccatgccctctctttcatgggcctcctctaacatgttcctgaatgtccttgagggcaggaagtt

SEQ ID NO: 37745 - DNA, 821 bp, Homo sapiens
cctcccaagtagctgggaccacaggtgcttgccacagcacctggctaattattttgtattttttgtagagatggagtttttgccatgttgcccaggctggtctggaattcctgggctcaaacaatcctacctcctcgacttcccagagttgggattacaggtgtgagccacttcacacggtgctcctggctcatttaacaaaggtacattgggcagcacaggccggggctgggctctctttcttagggagtttctccagctagaatgactcagggatatcctactctaacaaaatctttcccttgattctgccttcccctcaagctactatcctatctcatcccggcaacttcttgaaagaaaggaatcaccaccccagaccattgtgtgtgtctctctctgacctaacacacctggctccctgtaccccactgcaccaatgacatcatcctccgaaaggtcaccagcaacttcctgatttcaaaacccagcagctttctgtcagccccgagtcctcactgacctctcacctagcgatttacactggcagccacccgtcaccgggggtatgcactttgcttctgtgactctaccacctgcttctcccaccacctctctgatgcttctgtgctgtctctgaggactcttccacctattcttgttcttcttaaggaagacggttgtgtcagtctttcagggctgctaatacaaggtaacatgactgggggtttaaacaacaggaatccactttctcgaagctctggaggctggaattctgagatcaaggtgttggcggagctggtcccttctttttttttgag

SEQ ID NO: 37746 - DNA, 690 bp, Homo sapiens
gaatctgggtggcagattttgaatgaaattgtcttaccttttaaaagtgtattttaataatttttttttttttaccgttaaggtgtatctctcagggacctgtgcacaagctctgtgctgagttgtaagctaagagacaaatctgcacgtggcctgttggcctcctgatctggcacctgcctctataccttgcacaatccgcaccctggcagctgccgggaggaacaatatgccaccaaaggcccttcacctgcggtctgcaggcatgtgagcgcctttgccagcaggaacttggtcaggagtgtaccacttcccctttgttgggaattccaggctgacgtggggatgtgatttgagggtgtgaccaacctggaggaaaacagggagttgggccgcgttatcctgactcaccgtcttgtgtttgcgccacactgcctgtgaggttggaacaggggacaatggctcacaggggtctttccaccctgccagccaatgcctccttctctgcctagcttgtcctcaccccgaaagtgcctgcttctgacctcttcttggtccacccgggctggcccgtgattggcattctagaaatgctgctcgagggaccgggcctccatgctctgcctacttcactctgactccacattccctgtcacatctctgcttagacagaaaccccttaacagctcc

SEQ ID NO: 37747 - DNA, 866 bp, Homo sapiens
agcagaacttgtgtggtggaagaagggagggccagacagtgagctcagcagtcctattactagctcctcagacctcccctggaatattcaggaggacctgatccatctctagggaaccttggggcactgaggaacacagtttgtacaacagaacacatattctatttttcatccactctacatagaatggcagggcagaaagggacattcttagaggtctgattctttctaaacaattaatagttctgaaaaatagctttgaaattttttctagataactggttctctcttctgagtgcctgacttgttctcagttcctggaaatttcaaaatgagtggtgacatttatcagtggcatatgttgaggccatgtccagatcattccatctttaattcctcttgctgtctactgacatccggcttcctctgcattttcacttatctgtgtaactaaagagctaagctatgattctaaagatgatgcttgtgtgacaactctccacaagtactatttcaaatctgaatatatatattcttacaacccaggcagcaaatagtgataagttccaatgcaataaaagatgcaatgctgtgagaataagtaacccttcttttttgtgaccctgagttgcatttccaggagttgtagactttgtacccatccagacacactttgttttcttttcttttttttttttttgagacagagtttcgcttttgtcacccaggctggagtgcaatggcgcgatctcagctcattgcaacctcgacttactgggttcaagcaattctcctgcctcagcctcccgagtagctgggattacgggcgcccgccaccatgcccggctaatttttgtctttttagt

SEQ ID NO: 37748 - DNA, 4291 bp, Homo sapiens
agccggaggccactgttgtcaacgagtgatccctgtaacagcgacgttagctacactgagaacttacacatgcacattctcaggcccattgcagacctcctgaaacgagaactcgggaggcagggccaggcaattggcactttgcctgaagcactcacgttttgagaacacctgtcaggtaacagggaaccactgaaagtttttggacggtggaggaatgcgatataaatgactgttgattcactggcattaaagtgcctaactaccgactggcttccgaggttgccggaagaaacctgttggttgatccttagtgatctccaggttacaaaatgcgggttggtactaagggccccaaacacagtgctcacctaccgagcgcagccaggagcgcagcgccagacaattacaggagctgttttggatatggccgggcagcccagcgatgctcagcgaatcccacaactacaaccacaaccgtaccacacatttagcctgcaaaagcagagaaaggaaaagaaaaccgtgcagggaagccggaaacgagggacttaagggtctcctctctagggtgtgggagagtgggggatggggcgaatggggcgaggagggggcgaggatcgagggaggcccctcctccgctcggcaacaccgggttcgggtccctctagagccgggacgcggccggcgggacacacccttgccctgggagacgcgagggtccatggcctcttagtgtcggtccagctcagtttcgtgtcatttgttgttagcgcgaggtaggggcgtttccccaccccagctcctccccggggaaatcccagcccgcttcctccccgctcctgcagttttcgggagcgccgtgcggggtcgagcgcggaggccgcaccctgggcgccgggcgtcgtgtcgggaccgctgcccgcgctgcccgccggcgcggccattgttcgagccccacccctgatgaatattcacgccgcgcgggcgcctcggcccgcgccctacccggcagggctcggggtgtgagtgcgtttccgccggtttttcctgcctgaggaggaaagggggagctgttttctctctcctcagaatatatttttggtgtcccgtttctcctcctccagcgccgccgccgccccctccctccccacctcgctccccgcctccgcctccgcctcccgggttatctttgtctcgctgcctcgcgctcactcgctcaactcggcgccgccgcggccccacgctccgggcccgtcctcgaggcgcgcggcgcggggcgcgggcgccggggcctgaggcggcgggcgacgcccgggggcctgacggccggccccgcgccatggtgtgagcgccgccgcccgtgcacgctccgtccgccctccgcgcggcccggccggcagagagccccgagcggcccgagagcgcagccgagcccgccgccgccgcccgcggccccgcgaggagagtaccgggccggctcggctgccgcgcgaggagcgcggtcggcggcctggtctgcggctgagatacacagagcgacagagacatttattgttatttgttttttggtggcaaaaagggaaaatggcgaacgactcccctgcaaaaagtctggtggacatcgacctctcctccctgcgggtgagtgggcccgcgagcgggcgcgcggggagcgggcagccggcagccggcagccggggccgcgcccaggtcggccgggcgctcgggcgccgccgtgggcagagccgcggggcgcggcggcccctttgtcttcctgtgcgggctggtgcggggcgggcgctaccctctaccgcccccacgccccgagcccgccgcgcgacccccgggcgctgggggaccgcgcggggcgaagcccacctcttttgtcaccgccttttctctccaactgccttgcttgatttattcatttttttggcttcttttaaatgataacccctcccctccttcctctccaggatcctgctgggatttttgagctggtggaagtggttggaaatggcacctatggacaagtctataaggtcggtgtgggcgccttctttgtttcccgtggcatgtggaaacttcttattgggggacgaggagagggtgataaacatgctgctgactggaggccacgccgcttggccaaagttgggagaggggtttctttcgccttgcagtccctctgtttttgcacaccgagtttatattcagactggccttaaaagacctcatttcctggctttgagataaggaaataagctacactcttaggcatgcactttacttcgataaaatggaaaagcattttttaaaaataagacaacctgaattttttctttttttccccaaatccggccttctgagtttgtgtgtaaattgaaatacagtggaggcgggccttgcctctgacgatcctaaaccactgctttggccatcgtgaaaattgtcatcatgtttcagcctccactcagtgcttgccagttgctcaaggtggggagtttggcgttacctgggaatactttataactgtggttgtcatcctttctattgatggatacgtattttggggaagcagggaggagtgtgtgtttgggcaacagcagcaggaagaattacagtgtggggattataaaatctgaattccaggaataacctgtttgacagctgtgtaattgaaacagaaatgacagagagcgaagagaatatagaggatgccctggtttacacccacccaggtctttctcttttttcaaaattttaacacccaccctccaccccagcgataaatgaaactagcaaatctggagactgagtctgcgctgagtagctgacacctgatgtgactaacagtgttcattttatacattgtacagtctagagattatgaaagatgtgtagggaatggaggcgcaggccttgaaaattcagaacggaatgttaaatttttcctgtcttaatttgtttctcaatactgaacgttttctaaaagtttaatctgcactgggggagtgttctgttagagtcggtacaaggttagggaagcagggctctgtggttcaccatgaagaattgtcattgtctcattaaaaatgggtggagttgggggggttggaagccgactgtagaccttttcttaggctagattaagtgtggatcttattgtctcttttctgcgttgtgagtagagtttatctatcacttgaacgcctctccttagcctagacttctagcctgggtagtgtactgtactggactgtggtccgaacttgggtcagtattcttaggtgatctcaagtgtattagcttgtgttttgttggttaactgttcgggccggggccagatttttgaatttgaaagagagccccgttaactcagcttgcccggctcaactgaatttggaaggctttggaaaattttggaaaagattgtgttgcaactcactgagtggttggtaactggctaaaagacattctccccggtctgttgtttgtttaagcaccagtcattttttttctaacccagttttttctcgccaaattaaatggtgattgtagtcttccaagtgaattagccagagcttgtttttgacctggctacacagtagttggattgtttgtgtcttacttggtcagcatggatgttaagggcagagaagtaagctagaaggcgatatagtctttaaaccttaagagaaaggaaagaatgaaaccccagtttgtctttattggttttaagaggtgggagctgtttatggtaagagtttagtcaggttcattgttatttcccctcattgccattttggttccattccccgcaaccttcccgagcttttgaactaggtttgctgagcgctagctacgtttggtaggtatttgggatactggcatgacacagctctctgactacaaagtcggtacagttgagaatttctctaattatgcaaacctagggaattaaatctgtgcaaaagttgcctacagtccagaacaaaatagtgcctgagattttgctcataagcagttacatttttatattattatggaaaatttcaaacataaagactagagagctcagtttatcagcagatgactaatcttttctcatctgtattcttcttttcctcctttattttaatgtaaaccccaaatgctatttcagctgtaaatactttagaatgtttcttttttacacaatcacattgttgttatcacacttagaaaaatgtcatatattcactattaacgttttcttgattgtctcatacatcagtaaaatgtgttt

SEQ ID NO: 37749 - DNA, 812 bp, Homo sapiens
cttgggaaaatggactcagaagtcctcagcatctaagactcttagaacagaatattgcagaggctaggagtcaaaggggctaggcccagttaactaacgttttgacttgttcatgagcagggtgttgttcagaagacaatgaaaatgcaccagactgaaattgtactacctcgcctctcactggttagaacttaacatttatttgtccagcacgaaagccctttattttcccttgattaagaggcttaatatgcaaatgtacagtgtagtgactgagtttcagtggtggtatgaatgagaccactgttaccataccatggcaaggaggatttaggccagaaaagcaggaaggttctggtgctagggcagaaagggggtgtagaaagtatgtgggggctttcttacaggggcaaatggtcacctacagtaaacttctgactaatcattttcaccaatgctagccctatttatcttcatctctgtactagacagctggaagttgtcagagggccaaaggtctttatttcttggacagtgtttgagcagaagttttcttctgttcaatgcccaatcagggtaccaagtaggggccacctgctttatttttttattagggtttcctggtaagatcatatgaaaaaatctgtaggttttggagtaaacacctcccagaatactctaagtcactcttcttagtcatttgttgggtggccaaggtcaaggcaaaaaggtgggctggggcctgcccatgggaggccgtctttgtcaaaccaaggaattcaggcttcaatctgaagcctcaggatgaagaa

SEQ ID NO: 37750 - DNA, 3350 bp, Homo sapiens
aatggaagtagatagaagggtataaatgagttctggctgacaggtcaaattgtgatggggacgcagaagtctcagaatggctttgaatggttgctgacagatactctcaggatgaatgatgtgagtgatacttttccacagggaagaagtctgtttcctacagccttctatttactgatggtgttttccctgttaaactttccagatgcctactagttacaggtgttttattccaccagaagcaaattcacatcaaatattttgaatgttaaaaattgcagagctgctggagctgctgctgcagtcagaattgcttcccacttgtttttacacagtcccctgtgataacctccatcctaactggcccctacatctgatctgctccctaactttcagctgtccaaatcagttcgatctgtccaacagttcccttccttcagtggttgcccattgctgacagtataaagaccaagctctttaatgcgactctaggcccacctaatgcgtggccctccttatttccttgttgctgccacactggcctctgccatcccctgcttcttgcccatctcctgcctgccaggcacttctgtatgcctctctctgccttacccagctgggtcctggtcatgaatacaggcatttttagcactgtgtctcttgctgtcatagcacttggcacagttgtgtttttacatttgtttgtgccatctttggttagtaatggagagggatcacttgcttattgcagcagtgcctggcatgtagctgatccttatgtgttttgagtataataactcgttctattgctgaccctctgtcattcaaaaatgttatattcagtatatttttttctgattgtcctgtacaagtaagcccctttgcagtgtgccctttaggaccctgttctaactttgtaacacccctcactgcttgtgagtaattgttgattcttcctgccagaatgtaagttctgggttgcagagttagtgctcctgacacttggtacctggtggatacttaataacggtttgttgactgaaagaacagtttagacagttgtctattaaatttaaagcagttaaagccctggcagcacaagtgttcatcaatctccttcctccctcattccttcctttctctctttgacaactcatttgtactatcacagtattacatacttgctctgttatgagctgtccatgtacaggaaaaaggggctattgggcaatcggagttttgattatgaaaagttagtcattatgacaaaaccatgaaacacagatgataaaccttctagtaaaatttaatcttttgaaattatttgtcacctgggagagctgccattctgacacttagtgctttttaaaatcagtcaggtgtgtatgtacttctgttggtcagagatggtgagtgggtgtgtggtttctgggagacctgaaaatggggccagagctgtgggttttctgcagctctaacaagctgccacccttattttggtgatgaggcttgtgcccactttttaattttttgattaaattgtgctgattacatggttccaaagaacttagggaatgcacagtattgctccagattacttgtcagttaggatttacctattgtgagatatatatatatatatatatatatatatatatatattttttttttttttttttttttttttgctgttagtcattgttgtctcatttgatggatcagagtgtgagattgggaaatgttacgtattaatatcaggaaaagagacaggcctggagtaggtctggaggtagggctgcttagtgttttattaaccatgctgatgaatgcacacattcaagataatctgttccctttccattctctgccactccttttgaattgctcaaggctgggattctatgtctggaacaggtgactcagatgaaataaagtttgaaaaggaaaaaaaccctgtcaatttctggttactcattatcattcagggtccagattctgccttttctctctactctctcccccctctttctccctcacttaggctcctgtcacctttaactttctcaccacactttttaaaagttggccaggaatgaatggaaatggtgaggaatgccatgaattaatatttattgatcctctgttctgtggcaggctctggaagtattttgagattcggagaggttacctaacatgctagcatcatatggcttgtaggtggcagggctgtgcttgaatccaagattgactcaggacctatttctggaccatgttgcctccagtgctttctcatcctggttggacagggagaaactgtcttaaaagtcacccgctacatccccaagaagagaaagccccttgtacttttttttcttctctgaagtcacaaaaatacattcctaggtaaagactgggatatttccaacaccaaagagtaccatatatgatttctgtcttagtccattgaacaaaagaagttaggtaaacagcttctgatcagaaactgacttggattcttaatgaacattagggccaacctgaggggtaaaacagttttaggcaggatatgttgagaaagaaaggccttcagtcaatactagaagtaacttacatgcagatttttaaaaaaagcagtaggatgcctttttaaatttttttaatatggggcagttgaagtcagtttgggttgaacagaattgatagttactgcctttgggagtcgatttgtagagtgaaagaaatcgacttgtagagtgaaagaaatagaatagtgatctgcagaaggttttttttggcccagtgattttttaaagacatcttgcacctgtcttattctctcactattctcctatgctttggattgctgtaaggaccttgactcaggtgttgcttccttgaagatctgatgaccactcttttcttttcttgccctctgcttgctttctgggttcctgtccttgtgcttatgcagtttaagggaagtacagtggtggaaagatcactgtctgcctggctgccaccatattgttggtgaccttgggaaagagactgaacccaagaacccatttttgtagtttcaaattagggttgattgtaatagtcctatttcatgaggtggttgtgaggattaaatgaaacagcattcataaagtgacacatatataatggtgcagtgaatacagttactgctggccgtcattattccttggtacctctggtaaggcattcgttttattctttttagcatggttgtctactgttacacataatatctagaaggtagaatctgtgacttacgaatagtacagggcatggtaggcaggataggaggcgaacctgcttagtccaca

SEQ ID NO: 37751 - DNA, 429 bp, Homo sapiens
gagtaccaagagtgaaacacaatagcttgatgactggtgattgatgatttggaaatctgattgctggcggtcctgtgctgtggtctatggtgggtcagcagggtttctctgtgggcctctgaagtctccctcagcctggcaaggccaggcctctagtaagccctattgtccctgtgctgtgtgattgttctgccagggttcaaaagtctgttggctcagtgtgtgttgaaaggacattgcccaaataaacatttttgtccttggactcaacttgggcatggcccctgatggagaatactggaggcccagatttgtactcaacgtctcagccacctgaaaatcattcagaaataaattccttggttcttatttcctggaagggccaattgtctccccaggtgtcccccattttaaaccctacctatgtct

SEQ ID NO: 37752 - DNA, 1417 bp, Homo sapiens
agaattcttagatgattttctggtttaaatttaaaatggatctaatttggagacctagtaagtgataatgaagactgatgctgtcacatggtctggcctcatcacaaaaataattgattagtttttagttccttatactctgttcccttagtaagggaaactcatgttttttataaagcagatgctgagtgaattcacagttctcagcttttatgccactttctgactaagtcttgaggatacacacttgtggtcttgagttcaggcatagagggaagcatagaccattttctgttgctccttatggctttatttatgttaagatttgtttgaaaaaagaaaaaaaaagatcctactctataaatgtctgaggaggctttttcatagacccgtggattttcttgatttgtagggatcttaggtgttaccctatcagatactcagaagacccttccatccccaacattttactaacacattcccaatgcagcatactaaattaccctcttgaaaagaaggaaagccaggacagtgcatgtgacattttccctcatcatttggtttctgtcagcgagaaatatgctttagtaatttggaaataaactcactgcagggggtgaataacaggtttgaaggttggttagttgccaaggagatgaactttgtacgcttatgtggaaagtatgagaggatcacttaatactatatcctctgaaattctactctttctccttgggttcaacaaaatcatcatttggttttaggttgtgttggcagtcacaactataggagctatcattaatttaggaaacagggttccagggttgtgcttgaccactgaccatgtgccacacaatgttccttgtgccccatttattgtacacagaagccctatgaagtgggcactactatgatctcacttatatagataggagcctgaggcataccaagcggtgtcttacccaggtacagttactcagtgtcatagttgtaatacagtgtcattttcatagagttgctttgtccaagttgtaacttgagttcctacacagactctcctcagatttaaagtttcaaagttcacaactctttaagtcatgagacacaagagggacaggcttttggaaaatatggggatgttctttctgttttacatctgttgcagaaggaccgtttctcacaaagttgttaagtagatcatgctcagcatatctggatgctctttgctactggcctgagaaatgaccagcagggcattgcaaagagtgggtagagagtaacaagactgacagtaattaaacccagtactcctcatctgggtgaaaggagaatgatatcaagtatgtctggtatctagtgatataaatgggttataggattttagattccaggtgaggcattataatacaactgtaag

SEQ ID NO: 37753 - DNA, 546 bp, Homo sapiens
tagcatatagtaggcatttagtaaacactgtcgaatgaacagtgcctccccttctttttatgtaaaaaacccaaaactcaagttaagttacatatgcttggttgatgatgatgatgatgtgtgtgtgtgtgtgtgtatgtatgtgtgtgtgtgtttgtgtgtgtgtctgtctgtgtctgtgtctgtctgtgtgcacaggccatgaaactatttgatgattaaacagtttggattgtcttttaattgtatagtgacatgccctttgagatgtggtaaaatgaagcaatacagttggaaagaaggttttagataacctgtgtccattcctttgaaacacttaaaatggtgaagtcttttaaaaggatcactttagcacccctgcccttttttttgcctcctgaatttagttccaataactgctttccagtttacattctcttcataggactggggtataaattctagcctaatttgtccatatgataaagcctaattctagcctaacctgtccatatgataaagctttctggaattgcttgttttatt

SEQ ID NO: 37754 - DNA, 820 bp, Homo sapiens
caacatacacaggatcttaaacatttatatgacagtggaatcatttttagaataaaagctctgattgtttaattagagaaacggacccccccttcactaccattagcataataccctgacagaaggaaagacatttttggtgagacatttttatctcctagttattctgacttttttgctaaccttacagaaaagagagttgacttctgtgggtttgatctaaaatgggattagggagccagctagttgatgggctgggtttttagcatccaaacttgccacattgtagtgcactgttaatccataaatggcctcagcgttgcgggaagccaggctctctctgctccaagggcagaaaatccccttagaaagctgccttctggtgaatgaacagcccgtctgttctattgttccacgttagcctgcaacatctgtgccacaggtcagactctctcccttgatttttaactctgtgcactaacagggaacccagattatattttggctgtaatcctgctcccaagcttgcagatcgttttgcaatttgttttaattgcaaaacaattgtcccgttgaaccttgggcattatatgtagttcagtatgtgctagaggttttaggtgatgtttagaactatgaaaatgatttcatggtggggtgaaagaattttatttctcactcctctccctggtattctaaggtgctgattggtctccaagtctgagtgcaaattctgcctagatggaaacccgcctctgaaacaggactgccactgtctttgtcagttatctgatggttatcatgatgtccttggggctct

SEQ ID NO: 37755 - DNA, 803 bp, Homo sapiens
tgattttgggattgtcacatcatgtagtctaggcttatttggccccactatcgaggccagagtcttctgagtcctgtgaatgacgagtttttccaatctagccaacggcaggaggcactgcttcccaaccctttgagcactgggtagtattccgaggaatcctttgggatcaggctctttcccttacctcaggtggtttccgcacggggacgtgttgatagtgtgctactgagtcttctagggggaattgcttgctctctgtgcagctgtctcctttctggtattctgtcctgcgactgcagctgcagcggctgtggcctccccagactcagttctgtctcctcaactcagagactcctctgggcgccgtttgggtttcctttccctttgctgcagcttggagtctttctcagggcagtaagctggagtctgcatgtgtttcccaactctcagggtcactgcccttatggcctgaagtctcttctaagcgctttcgtatattttggctaattttagttgttcaggtgggaggataaatcatctgtccttgatactttattttggccaggagccaaagttcccttcattcttttttattgaagacacattttgtcaaatatgtaagcacgagctctggtgcctgtgagtgcatggatgaatccagcatgaagtacagaaacactgttgcttatcacaccctcctttagagctgtactccttgttgccattcctttcttggacctgtttttaaggttttagacaacactctattcaatgtgtattgtattctttctccccttgtg

SEQ ID NO: 37756 - DNA, 999 bp, Homo sapiens
atttaaaagaagcccaagttgtttgacgtctctaagccaacttgagtgtggtacgtgaatgaacatctttttgagacgtagcaaatctttttcacctcactgggcatctgaaacacaagcttcctttgcctacatgtcatctagaatgggagtttttccttgtgacaaaagtttaaattaactaaaaacaagcaaatgcctcagggagagttcctgtgtcatgcagtaagtagtgtgtgttcattataggggttactaagagtcggctttggtaaagagaaagcagcatgataaactggaggtaaggtctcatgagaaaggaatgcagccacccccagacagataagctgtgttctcaaagacagttggggttaaacaatttctgtggtggcaaaacctttcctcatttctcactagatgttggatttagacatcttgatcattatgatcagacccttcgaatggggagggtcctgagcaggtaggcctcagccaatagagaagtgctttttggagcctgcacactgttaccctgtggaccacaaggcttagcagcaggccagcgtgttcttttcagcccacttccatgttcacattccacatggcagtatcttcatattgaacatgggaactgagagctttctataaccaatactgtatgacaacctttgcctgctcttttattctgtgaccatgcatgatacagagttaagggaaaaatgtttcctagttcagaaacactgatgcatttgctcgaggataggtccttcactgagtatttggacttggcatctctgctaaggaaggataattgtggcctaatttctggtgtgggattagctgaacacacatacactcccaggtacttcatggaagaaaaatgtacttatttttcagaataatcatataacattgtttcagagctgctagacacaccttaattccctgtagaagcagtgatcctgtagcagtatagacaggaaaacaggcattgttcca

SEQ ID NO: 37757 - DNA, 2347 bp, Homo sapiens
aattctaaaatcggttttattctgtttttccctgttctattgtgaaatagtaattcccatgttaacagtgctgtaggacgcatttcatttcagcataagtgtgtatgtttgtgtagatgcgtgttgtgtattgtttgttcattgactatgtgttaggacctttgtggtttggagaggacatgatttttccagctgtccctgtgttgagggcagaaaacaaatgagtgtactgacttgatctttcgagttaagatttaattctgttttgttcaaaaaagaaaatgagttgaaagtcaggttcctttgctccgtcacagttgggttaaggccacaagccttgctagggtaggtattgctgtagcatgtaccatggagggtcagacatagacacaagagacgtagatcccaggtcagaaccagatatgtttgtcagtagccttctgactaagtccgccccacccctctgcccacacccccccagttggcttttttggctcagttttctttgtaaagtaaggttttctaaggatttttatatgctgtaatttcaatattctcccagagatattggttaactaaaacttctgttcagcccatattgatggctatttttgtttcaaggtgtgcaccatgacacaaggggatggtcagcagtagacactcttaaaagggaatctgaatttcaggataaaatgtctcctcgtagtccttcttagtctattcctcttctagagcttttttccctgtccaaaaaaaggaagcctctttggcttgtaaaatgttttatgcttttcaaggttatttcatatcaatctcatgtctgaaccttacaaaaattcctgagggttgggagaggagattttggatgctcatttctcaaatgaggagactgagaaaaggggagctttagagcatgctagggatcatagagccagtcctcagtggaacagggactgaggcctcctggtatccctgtcctttataatacgcatgcagctttgaagtagggttttacccctctctataacatatttgggatgtgtttacttgttttcattgttataatgactaatcattctcttctcattgaaaagaaaaaccaccccatcctcacttcctgctgtctttctctccccttgtccttgtctgtctctgtctgtcacacacacacaagctcatcatggagcctgggtctgttcatttgaggagagttgcccaagtctggaatgtagtcattccaggtgcctttggaattgttagtgaaagcatgaatcatgtttgttgtattttattattaagcaggttttggttttaggtttcaaaaattggtgatctgtgcttgttacaaataatgactaataagcagatgtttactaatcagaaccctctgatactttttaattaaaatcttgatttctctggggtttaccaaccttaagaggaatggcatactgttttaaaattctgtatttgtttacaacagctgtgttctaacagaagtactcttagatcccttcgtgtatattatgggaatgcatatcatcatttgttagactccttaggtcttactggccaatttgaagttcttggagaaatctttagcaatagattttcttcaggtatttaccactaagtgaattgtcactaaaggtgattggagcaaatggttcttggtgctccattcaggtggttctgatgcttttctttgggataatttgattgctgggtgatttctgtgtgacaggagtatatcaggcgacagctagaagaggagcagcggcacttggaagtccttcagcagcagctgctccaggagcaggccatgttactggtaaagccccgcctctgtttcattctgtagcatcagggctccttcatccgtccccaaagttgagcaagctgtggtggtcaccagaccattttggttttgctgtgggcagccaggctgaaatagtgatgcccattttgtggtcctattgctagcacattgcaacatggtctttatttatttatatctctttaataagttaattgttcttgtttggtagaccaacaaggttttgaacagaacttggcactcagtgaacacactagaatgctgagggcagtaggttgaaagcacatgtcacaggatttttacctagtatctataccactaaaactcacatttaattgaattatctcttactctgtccaatgataattatggttagcaacagctgtgagatttttccacaggtaatgtgctatttaaaatcccagccattttgctttcttacaaaacacagagggaaaatatatggtcactttttttaaaagccgaacaaatccagagaagaggcgagct

SEQ ID NO: 37758 - DNA, 1333 bp, Homo sapiens
gagatccgatctgtggaaactggtcacttggatggtgtgttcatgcacaaaagggctcaaagactaaaattcttgtgtgaacgcaatgacaaggtaatagttcccttatggattctttttagttgctctatcttttaataatggcttgttttccatggagtttgatgattaatttccttggagttttgataaaaataatcaaggaactttttaaacgttgctttttagtcatgtttgtgaggattggggaatgttttgctttttgctatgaggggatagagatatttttctctgtagaaattaacatatttgggttttgctttgtatatgtatttttaactctattagatgaccagtctaggctataattagagatagggaagataaaagctgccagttcagttggctggaattcttttgtgagtggaaggaaccgccgtgccatttgggtacatcaaaaggttcctctgacctaatgtgtgtcaagaagatgccccttgttagtctgtgagtggtgaaattgcttcctaggtttgcatgacagaaatgttgcacagtaaaaatcatcttatgcagacataacatacctcctgcaccagagaccccatggcatgacaccccctttgcttttcaaaactggccatatcactccagggacgattcctgtggcaccttcctcccaggaagtcccttttaaactggctttggagttgagcagatagatggccaggggcgttgacccatccctgtttgccaagggagaaggcatcgagggtggaactgatttttactaagcctaccctttctttcttctgcccagtcagacaaaggcatgtctgactacctaaggcaagacaccacgacctttgaaacttggccctgaagaacgtttccaccttttgcgtcacattgacagactagcagtcagcccagttctcagatttaaacatttagtcatttaatgcaagaaagaagaagctacacatatgtccttggcagctggtcctgcttgcccgatacatcccaaacacaaagtcacttcacctctacccactgtcttctgcaaccctacaactcagtttcaagtggagttttgcctacagattatctcccaaatctgtgaccttgaaaatctctacagctcagacctaatccaggattttgtcagcttgttggcttatactttcctaagtatgtttaccatagctgcaactatagcattctttgaatttcaggcatttaaatatttttatcatgcatgtcatgtcctttaagatttattaataaatggcacaaaaattctatttatgggttatatgaagtaattaataca

SEQ ID NO: 37759 - DNA, 2304 bp, Homo sapiens
ccctccctgtcattgcaaggactgaaagcatcctgcttctggctgatgaagttggaagggagagggacttttaaaaaagtcagtttgtaggctgggcgtggtggctcatgcctataatcccagcactttgggaggccgaggcaggtggatcacctgaggtcaggagttcgagaccagcctggcaaacatggtgaacccctgtctctactaaaaatacaaaaatcagccgggcatggtggcggacacctgtaataccagctactctcctcctgaggctgaggcaggagaattgtttgaacccaggaggtggaggttgaagtgagccgagattgtgccactgccctccagcctgacagagtgagactttgtctcaaaacaaacaaaaacaaacacgtcagtttgtaaaagcagacgccgtgacatgaccactggccttgtatatctggaggttatgcatatccacctgggtgctcccaagggtcctggcaccttcatatctgggagggcaggaattgctggctgtgctgcggtaggtggggacctggagaagctaaatgagtgccccaggacacatagtagcagaagtagcaggtctgggcagttcacagtccctgaacttctgcctcctctcctgccatgtgcctattggctcagcctctgcacttagagtcttctgaaagacagccggtgttttctttggaagtctcgggctctggacccttctctccatgtcctggtgggacctgtgagcttacctcagaatctaaggaatttaggggcctctgggccaacagtcatgcagtggcttggcctaaagcaacatttcccagggtcccctgccacaacctctccctgggagctgggaattgagcgcagccagctggactctggttagtgggtttcataacgtgtttctgttttgcatagcgtaaacagcatgctgtttctcaaccaggcagagaagttctggcattgcttctctgcaagcaaatgactcttaggcaacccctgtgttgaaacacggagcagcttctagaacaaacctggggttctggcttttgtcctggactcagcccttcacacacagacagtgctgcccctcctggtgttgaaggctgaaaggagtcagcgtggagaaaacacgggctgtgccatttgctggtgctgggccttggtcaaatccactcacaccctctgggcctcagtttccaaacctttaacacgggactcaaagcatatgacatgatgaatgttagaaaatggaatgaaataatgtcggagaagcacctatctcagtgcctgcttcctttccaattccccaccctagtgggtccccaggttcctaccccatgggaccccctgtggggttgaggacagtaactcattggcagtttagcaatagccaagcagaattagccaaggtctctgcggggttggggagggaggagacgggagtcagggactgggatgggggtggggattgcatcacacaaaccaaagtcccttgtgaggcagttgagattaatctacaggaggaggagaagaatcatccacaccactcttcgccacccggctgggagcaattccagaaggcagggtctgcttgggcagttgagaggccttggggtgagctgccaaaagctgggtctgggagtcagaggcagcattgcttctggttgtgtggcttggccagagccctcatatccaccagggatgtggcagaaagcagggtcaccccaggagtttctaaggagggcctctttcccaaggtgggggtgggttaggggatgacagggctgctggggcagccacagacagcaactgcaggagctcttccacccctgcggagggcgaggagggcacagggcgcttcccagccttgcgagaacagagcaatgaagagggctgcggtgatagcattacgtgtgcagaaacactctccttgcctcctctcacctcccggtcttctgcaggggcctcctgaaagctgaatggaggggtgcagagtgaggggtcagcctgcttgcccggagcagggcagtatgtgagtgtgtgtgtatgtgtgcgcacatggacgtgcatatgtgtatgcatgcacgtgtgtgtgtgtgtgtgtgtgtgtgtgtgtgatggaaagcaccaagctcattgccaagctgcactgagcctcacctataaaaaataaaagacaccccttgccctgcattcctcacagggtggtcctgtctgcacatgagtggagctttgcaaacctgccagttaaggcgtctctgccagggatggggtggggagcctaggggtaga

SEQ ID NO: 37760 - DNA, 644 bp, Homo sapiens
ggggatcacttgagcccaggagttggaggccagcctgggcaacacagcaagaccccatttctataaataattaaaaaaaaaattagctgggtgttgtggtgcatgcctgtattcttaactactccagaggctgaggtgggaggatggcttgagtccagaagttcaaggttacagtgaactacgattgagccacactgcattccagctgggtaacagagggagactctgtctctaaaaaaaaaaattaaaaaaaaagtagggtgggtggttgagggttgtgcagtgtgagtgagggtggccagaaaaaccatttccgtgacagttacaaaggctgtgtgtggatggtgacgctgaggttttatcttcaagtgagttgtgcatatgaggtttgtttgattctaaagcatttattttctaaatgcaaacttttagaataaagtctagttcctgttgctctattttggcataggtttttaatgtttcatatacttagaacttcaaaatggtggtggttggggtctgtcttcttacctgctggaggccctgccaggtgctagccagaagcagtcattattgcttaggcagtcgttgtgggaggctgggtgtggctctcgcggagccagaatgaaggatagcaactcatt

SEQ ID NO: 37761 - DNA, 4873 bp, Homo sapiens
gttgcatgtactgtcccatcctagagaaagaggagtttgaacaaaatttaaactgttctttgtgattcaaggaaatcattaggagcatcaattgttttgtgctttaatgtcctgatatactcagtagggcacagtaacatggaagggactgctggtgtctgcgcttaaaatcccgaaatggctgtgtgctttggttctcgcacctgccttaatggttttcctgtctcctctgttactgggcaatcagctgccgcttttttcagtgtgtgttttcttctcctagccttctccctctttccaatttgccatctggaatctgcttttgattgagcattctgttcacctgttgttgcatgaaaaactatcccaaaacttagtggcttaaaaatgacaactattttatgataactcctagtttctgtatgtcacgaatttgagggctcaactaggtgattcttctgctccatgtgtctgattgagttcaaacagtggtgctcagctggtgaatggactcatctggagggtccacgatggcttcacttacatggctggtgcctttgcagggttcctgggaggctgagcatagctaggattgtcaaccaatgccctacatgtggcctccctagcaaggtggtctcagggcagttggactgtcttcgtggtggctgactttccaaggaagccaggcagaagcaagcaccccttggaaaccaggtggaggctgcatggatttttctgatctagctcaagagttcacacagcatcacttctgctgcattgtattggttacaccaagttacaggccagcccacattcaagggaggtgagttagactccacctcttggtggcagagtggcacagtcacattctagaagaccatgtgggatgggagatactgttgtggtcacctctggaaaatacattctgctactcttaaaaactagtgacgctcatacaaatcaacagaaagagcttctgaaggaagactttaaagctgcttctgtgagtgaaatatgctacatgcctttgtaccaggatctgattggctgtctttcccctactcagatcttcctgtccttgtttcttctgtctttgtcttattttagatgggcaggttttctggatgactgattactcaaatattttaggtgtttcccacactcagattataagacagaaagcaaaatttgttttaagggtgtatgtctgttaacaaccaaccgctgctctaatgccagagcttccagttactaattaactttatccagcaggtagcccagcagagctggaagtccagttcccaggagacctcagaagtcccgagttgtggctctgccgttggtggccatggggacttcggcaagagagttgactgagttcagtggttgtctgctatgactcgatgctttagaaactgaagctgtatctaggactgaggaggcctaagctcaaatccagattgacttagagttccagggttttagacctgcaagagacctgggaggtctcaccagcccaacctctgtattttagaggtgaagaaactgtgactcagagattgagcaaatgactatgtgtttgcctaagatcacatagttagttaatggtagagtgaagacaggaacccagttccaacctccagctccatatgctgtcactgagataaaaaccttagaattcctggcagccttgaagatgtatacgtgtgtatgcatctgtatgtatttagaattgtgtgtttatatgttaagcacgcaacatttatattgtgtattttataaagtaaatatttatagaacacttatatgttctataatatggatctatgaatttaggcttatggattccattaggtaaagttgtacatatttttagtatagtaactggtgttagctaagttgccaactacaataccgacgagttctcaggctgggctgtggaatggtcgcttagcaggaattcggcagaatgcagatggtggaagggctgatttctcatcacgtcttccaactgtgtccttgagcaagctccttatctccctgagtaccgggctctgcttctgtaaaacactgatgagagctactgcttgttgaacactttctttttgcagcactgctgagctcattacatatggtgtgacatctactcctcctgtagtgcacaccagggtatgcccatttcacagatgaggagactgagcctcacacaggtaatgtaacctgcccaccaccctgctgctggcaggaaggaaggcaggattcccacttctctgtccaggtacactgtgctcttctgtatacactttctaactctcaaagttattggaaggtgtagacagacttctttggagcttccccacagggtcgaatatgactaataaatgaagttaagagggaggaaattttgggatccaaaatggcagacatttctaattatggatacttcccaagactggcagtgtgcatctcgtgatggggtaagcttgtcttctatagaggatgctgggtttcagaagactgtttgggtgggcagatagacttaatggcttctggaggcccctctagctccaggtgttgatgcttttacagagcagagaacgagtgccaaaaccaaggattgtgtaggcttgggtttacatcctatttgtcattccttagctctgtgaccttggacaagtgacttaatgtacccaagtctatttccattgctccgtgtttataatggggatgctgagctctaccagactcatgagttttgtcctctggagttgttcagggtagtgcattcctcttacacaaataccaggctgggagaatttgaagcctgtgggtttgccctgcagatgcctagggcctcacaggtagagcttcctcatcagtcattttggaggaggatggtaactgttccaggctagaggagtggtcttgctgggtgtcagtcagggcagggtctaatgcaggaggcaggtgaagcaagtgtttgttgatggtccagcctgctgggggcttggaatgacccagactcacagggaatggaatgttgatacaggatttgaatgagcgaaaacatgagttgagttggttgactgaacttgaccaacttctgtcccaagaaccactgactaagagacacttcagtggtggttttagcgagaagggatgtttgctggcagacagtataaagagagcgcctatgccttggtggaaccatctgtatcagtttctgccgatttgctcctctgagattcagcccaatgtggcctaatgccctattctgccaaagatgggtctccctgcaacgtggcctccaggaagtgatctgtctcaccagaccccaccagggatgggaggctagtgtccaggacatcgccagctatcattctgacacagctatgcagaccaggaacagtctcagcctgctgcttggaagctcattccttgtctagcttttttctttcctatagaacaaaagcagtttctggacaactcatctaggtttttgttttgagccagcacatttttcaataaaagctgactgaaacctggtcatgtatttctctgtatctgagtctagaaagtcttccctcttaaaattctgttatttcctagggcttagttaaaaaatacattctatattgtttcacctttgaatttataaaaaatttccaggttaattttgatgtaaatatttatttcctcatgggtttcaaagaatttatacgacatgcgtaaaacatgttcgggctcctaggaattcattttacacactagaagtgactcagtgataggtgtaaagcctgatagctatgtgacttcattaacattcagcacctgccaccgtgtttttgttctttgaatgactgtgccacctgactcagagatgagacagttgcctaaaaacttctgggaacaaggtaatgatagaaatagagaagagtttcatcttctaggtgaattcagtccagatatattcaaatatattatcaaaaaaaattgttactccttctacatgctggaaaattcctttctggagctatcgtttacttactagtttctcaatctgttaaaaaaatgtattcctgcatgtattctgaagtattcagaggtgaagtttgatgatgtctgcaactttcaggtgttccaggagaaaatatgtctatgtctatgtctgtgtctgtgtgtctgtgtctgtgtctgtgtctgtgtctgtgtctgtgtgtctgtgtctgcgggtgtgtctgtgtctgtgtctgtgtgtatgtctaagtctaggtctaggtctgtgtctgtgtctatgtctatgtctatgtctgtgactttgtcccctatctgtgtctgtgtctatgtctctgtctgtgtctgtgtctgtgtctgtgtctgtgtccgtgtctgtgtctgtgtctatgtgtaggtctaggtctaggtctgtgtctatgtctatgtgtatgtctaatctaggtctcagtttatgtctgcgtctgtgtctgtgtctatgtctgtataaatgtctatgtctgtgtctgtgttggtgtctgtgtctatgtctatgtctaagtctaggtctaggtctgtgtctaagtctatgtctaggtctatgtctatgtctatgcctatgcctatgtctatgtctatgtctatatctatatctatatctatatctatatctatatctatatctgtatctatatctatgtctatgtctgtgtctttgtccctgtctgtgtctgtgtctatgtctgtgtctaggtctaggtctgtgtctgtgtctgtgtctctgcctgggtctatgtctaggtctatgtctacatgtatatctctgtctgtgtctgtgtctgtgcctatgtctgtgtctgtgtttgtgtctgtgtctgtg

SEQ ID NO: 37762 - DNA, 2448 bp, Homo sapiens
gccttgggtcactaatcagctgtcttcgcatggcctctagaagagggtggattgttctttatcctgaagatgagaaacttcatcctctaagagctggggattgggagctacccagggttcagggcagctttagggtcaaagtcattatatgaccggaaataggtacaaggctacagccaaatcaacccagtgttcatttaaggacatttaaaaagaagaagaggaaaacccacattatcatttttgattaaattgatttcatatcaatgtttaattgttgagcaggagggagagctgccttgaatgtagtctctgttgacagcctgtagctaatggcaggcaagccaaagtgattcccagcatctcagtgatggctcgtggacaatcttacagcaataacataaatacaaattgctccaggtctccatgttttgctggggaggcagccacaaacacagtgtaaactggaaagccaatgatgtgttccagcctcaggacagggaatggcacccaactttcctccaactgtgcgctgtgcaccaccagcctcacactcacctgagccactggtcacaaacacagatctcaggacttactccagatccaccctgtcaaatattcctagggagaggctgcagcctgtgacacaaaaagctcctttcacagtgaagtttgagaatgagggcacacatgtgaagggtggcgtttcagatcatttccagatgagcaggctgggagagatggtggttgtacacatttacccacaaaaatcagaatgttccctctcggggtcagattagtgagcccaaggaacctgtggtttgtctggccctgatgctgggaacctttaaaattttccataacatgagccttgtccctgcatgtggctggccgtgactgatccagggaacacaggctgtaagtctttcaccaggactgagaggtgtattcaaacagctgcccagaatattacagctgaacttatttctaatctttgtggggttttaaaatgtgagaatcctctggagcaacaggctgaggtcatgtcgattcctggatgactaaacagactgtgatagataatagcttaaaaatgcaggattctagtctcatcaacaatgtgtctgataacactctgttctcacatttgctttttaactttttattcagagtctcttcctgtatttccataacacagagacgccaaggagcagaacataaaatagctggacccaagcaatcgtgttggcccctgcagctccattattcaaaatttattttcctttgctacttcctttgatcctcatgacacccatgctcattagaaaagggcagattgttcctggctctgtcacagttggccaactgtgacataaacagacagcatcttaaacgcacagtgtcccactgttggaacaaagttaaaccctcagcacttgcccacttaccctacgatgtttctaacagattttgccctatcacgctcgtttctctaatgccacagacatcactctcaaatatcctccatgttggtgtgagggatgtgctttctgaaaatcaatgcacatttatcaagaaaaacaaactccaatttctttcttatcttgtacacctgcattgccctgtcctcttgtacagtgagagactgttcagctcctgatgtgactctgttcttcccacagcctcctccacgttctcctggggcattgtgctggccccactttcactggccttcttggttttggggggaatatggatgcacagacggtgcaaacacagaactggaaaagcagatggtctgactgtgctatggcctcatcatcaagactttcaatcctatcccaagtgaaataaatggaatgaaataattcaaacacaaactccgtacgtcttctcttatggaagtggctgtgtctttttgagggactctgttctttgcctcagttgtctaccaaaggtgccacatttatagtggctttgtagtaaaggactaaagtcttacattctgttttttttttccctaaaaatcagtgacaacagtagatgtgcctgtgagtgggtgtgagtagctgtctgctacttgtgacctatttaacagaatgaggtgctcttaggcctgcatgagagtggaaaacatctacatgagttttgacattcattcaacaaaaacatattatgagtctattttgactagactctatgggagatgttgtacatacagtgatggttaagacatagtttgcctttcaggaagctggttgttcattttgagactgaaaagaataatttagtgctaaagcagaagaatcagcaagaattggtgaacttttttggaaagggctatccaaaaaatagcaattaaaaatacacacattggaatgtattagtgaactgagaattagacccaacttcataacaacatgtctgaaaatagaaggaagggcatta

SEQ ID NO: 37763 - DNA, 1121 bp, Homo sapiens
cttgggcaaatcctttaatctcaaagtacatcaattttctcatctgaaaaatggggataatcacttagtccaaattaacttagctatttagctatattttatatttccatttttcctatttttctatttcaactatagtaactgtttaataatcaaaaacataggaggaatagacagaaataaaaattgttgtacttggactacgtgttgacaaaccacagcctgtgggccaaatgcagcctgccctctgtttctgtggattaagagtattaggaaacagccttgcctgtttgtttgcagactgtctttggccacttttgctctttgaagatagagttgagtagttgagatggcaaaacctagaatatttactatttggtcgtttacaggaaaagtttgccaatgcctggtttaggtgaaggcggttttgagcagttaacttttgaccctcgcttttctattttcctgttatcatctcctctttccttcttctgttttctaagcattcagggagggagaagtacggaggggccggcagaggcctttgaacaccttattagattttaaccggaaaggagaggagagtgaggtttgagaaggaggattcggtgaggacgttgcacagggttctttgactgcttctgccttttctttatcttcaggcttggggccacgcgcttgcatctctcttccttcctcgaacttctccagtgctctctggagtcccccgctttagattctggctgtttcagcaatgacccagaaaaggagctgactgcagccggaggagaaccaccatcggctttcagactctgccttgacctcacaggttacgcatttcctcccctccactatttcagaagtgtggggtcacacaggtagaaaagatgcgagacaatcggggaattttgagtgctggatttatgctaatattaaggaataagtgtgatatttgcattgctgcattcaaaaaaggttattatctaagaggcaaactaaatatttatttatttatttatttatttatttttttgagatggagtcttgctctgtcgtccaggctggagtgcagtggcgcgatctcagctcgccgcaagctccgcctcccgggttcacgccat

SEQ ID NO: 37764 - DNA, 1968 bp, Homo sapiens
tgaaaatttttgaggcagctgacctaaattttgaatgtgatctcatagtcagggttcttaaattagtgaaaacgaatatgcttcctacaggaaattatttaaaaagatgacacatgaggatttagtccagaagccactggattgaaaagatacctcagtgtgtccaacctgggcagaaaagtcctgccaaagaaacatttataaggttgcttttaaattggatttgataaaataaaagttacaataaaaaaataagctgggtttgagttaatagtagtaaaggcatgggtatatgttgttatttatttgagttatcagtgctggtatttttttaattgcatgaagtgagtttccaagagcagaattcccacccatactgggccatggaaagaggcgagtttaacttaagacagctcagtttgcattcatcgtttgggagccagttaaatggaaggtgaggtggcagttgttagtgccgcgtttgtcagtgggtggccgaggatggtgtcttgtccaactctgcggaactccggctgctgctctgttaacccagcaaggtcttctggtggtggctgcagactctgcactctcccctgtgccgggactctgggtcttgcttctgagggtttgctgcagtcaagggagagatattttcaatgcctcttggcaggggaaattatttcctgaattgagtccaagcaaaaaaggatcttctgtaatttggtgaagtatcgagtgccaggacacaccctgactggcaacatcactaaatgccctttgtgactgctggggctcagggttttattgtgtaagctcatttaggccaattttacgtgggcagcacatgtactgccagctggaacccttgttctgcagacagccatgactgtggaacatgtccagcacccatgaaaggcctggtagatgaataaatgtgcagaatgggtgtgggcctcagcagtgtctgaccaatacaaacagagctgcttgtgtttgggtcaacttttataagtggagatgatctggggctagaaccacaatgatcacatgtactgggtgatttgtggaagagaagtttatatactaaaactacatcactcttgaatatttctgaaaggacacataaaagaatgtgaagtgtggctctctctggggaggagaacaagggttctgggatgagcagaactacttttcactgaatttgctttaccaaatgcgtatgttcattttctgtttagataactagactgggtttctctagctatattaaagatcaccatgtgatcttagatgtacatcacttaacattgctgaatttcctgtttcttgtttgcaaaacaaaggatttgagctagagacttttaaatatctttctagctcttcatatggattcattttaagacaaaaatactgcaggaagtttttgtatctaaaaaccattttccatctaagttagttaagttgattatgacacctacagagggcatttcagcccctaatgcctgttccactgagggctaagacgatggtttatcttgacagcagcaagcccacagatgtcaaaggtcactcatacatccctccctgactcttaacatgggggaaggggagacagtgcatcacttccggtagatccaatagctgcaacagatcttcctctgtgtgtgtggatgagtgggactatttcaatctttttaagtcaagcccaaaactgggacttgggccaacagctgaaggaagccagcagcctgttggatcaggatgcacgaacacttcccaaatgcctcttcaaatggccttgttttcagaagccgtcctcttgttggacattgacaccagccggtgctttgaaagctgctgttgatggctggttggctggtatccttcaggaaacacttccaggatggaaatattcatgttttaccaaagccaaggagcttaaataaatagattgtgatttcttctctc

SEQ ID NO: 37765 - DNA, 1260 bp, Homo sapiens
tatgataacttctaacatgctccgtagtggactgaggatgcatgagaatcctggtccaccagcaacagcaggatagaacatggagccatggtttctgagctcgttattaacaaaacatcttagtgagggcggagcagtaattagattctccagaaaacattggacttcagtttcctggaagtgcttttatagctttgtaataccacagaagtaaacatttttctcttctgcaattgaagggctgagtgagtccactgagcgttctcttctttgggagtgtttcctttggataacattcaaaacagcaaaatcctattacccattccagagtggaaagccccattttgactgtgtttggccaaagattaacttcaaattaatacctaatgagcaggcaacttctctcaacatatttattaaagtcatatttcaagatttctaatgtatatggttttcacttaggaccttttttctgaatcatggtcaaaatatatagacgaataaaaatgtaaaactttttacacataatcccacttatttatgactaagcacttatattagtaaatttttttttatttgcaagtgacagcttatctcaaagtagcataagagagggagagagagaggaaagaaagaacctattggctcataaaatgcttgagtaagactcagaaacagatgataacagcttcaggcatggctagatccaagggccattagggtgttttatctcagtgtttcttggacaggcatattagccattggtagctcaaggcataccttatatttgcacagcagcccacatgaggaaagatcacctcccctgacatttctggctgaaagagcccagggaacagtctgacttgttcagcttgtgtcccgtgctcctccctgggcctgtcactgtgtccatgaggatgatgtcatctatctgatgagaccagcctggccaacatgatgaaaccccgcctctactaaaaatacaaaaattagctgggtgtggtggtgggcgcctgaagtcccagttacttggaaggcagaggcgtgagaattgcttgaacctgagaggtggaggttgcagttagccgagattgtgccactgccctccagcctgggcgacagagctagactctgtctcaaataaaacaaaacaaaataaaataaaataaaataataaataaataaataaataaataaactaaataatctgcttgatgaggcctgagagacacgtcctcacgtccctaaccattctacaac

SEQ ID NO: 37766 - DNA, 1924 bp, Homo sapiens
tgtgcttgatttttctgggagtgcagtgttgcatggcaaagacaggtagagacatctacaatgttaagtaagacgcaggcttccaaacccaaggccggccactctagctgggattcttggaggggtatggctcctcttcccttctctttttgggatagagagagagctccgtctcttcctgagtttttaagtccctggctatttcatccagagcccaaagtagaaagtcaggttaatgtgaaaagcttgatatgtattcttgataaaaactcaaagcctttgcagagtcttgcattggttgaaatcaggggctggcgcctccaaatgaaaggcagccaccattcgtgttgactgacgctcaaagccatgccatttctgacgagtctatgtccaatgccaagtctgtggtgtttttttttttttttttttcccttttcagaaatgaaggagtggaatcactggggatacctcccgcaataggaaagccccttgagaactgaaacaagtcatctgtttctcaggaggagctgaccaagagccccctcctttcgtgtgaatttaaattccccttttcatgagacttttcttaaagacaaggaaaaaaagctatcaggggaaaatgaataatatgacatcgaaagtattgaaaggcttgaaatgatcccacatgtgtcatctgactttgagaggtgaaggggctcccgtctgtacgtagagaggctggcgtgctgcctggattacttgtctgatgtcacatgctaatgggatcccagctagaatgctggcaactctgactgtaacaacctcagacacctttgcgcacagcttcagtttcaaattaattttcacatcctccttaggaaactgggccctccgtaatcaacagaactctgcatcgcacatcctaacattgaaactcacctgagcacaaggatcctacagttctcctagacagacctcaagaacccgcacagaccctcggggcacactcccctgtgtgttttggaacaaatagtcactctctgtgttttcaaatgtcctttggccttttgtcaaatccacactgacctcttttcaaatgcgtgtggtcagtgttatttttcaaaggccctttgaagtttgctttgttgccttccctccctgtgggtcacagagcaattactggaagatttgtgggaggccgcttttggctttgtgtacatgtgaacgcctgtttataaatcaggtgagttaagaactgtgatgtgggggtccccagcttccagctagcagcagcttcccaattccttctgcgtgaggatcaccagaaaataaccaaagccaaaatttcattctgagtctgtggggttttctacaacaggtcccgtgtcttctttcttggccccatccttccctgtggcttccctctccttggagttaaatactggctggatgtcaggctggggaccctcagtgcaccccactggcccaagtggggcaccgggagcgtgttccaggcctgccaaggtggcagtgtgtgcatcccctctctcagggttcttctagctgtaatttcaagattgggagcttttcctgacagcgcagagtccacttgccctacatttaattgacttcacaaactttcagttccctgtctgtaaatggggttagtatgtaaatgggactgctgcaaggatacatgagagaatacctatgggattagagggacccttgtcctcaccactccatcaggcaaggagggaagcccccgtcagattaattggataactggagctgcctgcagtcataaaacgaaatcatgtttgtatagggacctctacgatccagacacatcacttcattgcatcctcatgcccatcctgtgcggaggttatggttgttacctcattttgacaatgaagcatcaaaggttgagaggtaaaga

SEQ ID NO: 37767 - DNA, 3939 bp, Homo sapiens
atctttacagaacagacacatctcacttcttgagcatcactgaagaatgttctgtaaagtaaaatttccaggaaacagagcttactgctcagaacactcaactttagaaacttggaactattttgcacattaatctttgcagaatcaatttcaccatggcttgcactctgaagcagagctcatggcacacatttaaccttttctgaaaacttagtacacccacgcattcttaagcagaggtcattgcatacatttaatcttttcttggtaacttaacacgtccattgaaaacagtagtgattatgtatgccgcagcagacagacagcatgagatggtggtgaccttaagaaatttatataagatcttgaggtttctgactcttcatctgtgaatggggaaaagagtagttctgaacctgtgggattaggggagggggaaatgagataatacatggaaagcccttggcatgaggcttggcacatagtgccctaggatcccctggcaggagcgtcttaaacgtgattgctagggccccatccaaggccagccagatcaatatctccagggctgctgctgctccagcatcgaggcttctgttttcatctgagctcagctgcagctctagttggcaaccagagattctaggtgtgtccaggtgtttgccccaacactaaattccccatcctgctgaagctttgagagttcatattttctttttggagttcttttctgcctcctccgtttcctaatgctcttacaagcagctgatatttactaagggccagtctcctaggcactgactgcactgagcactttgatcaaacacttttgtgactctttcaccttcaccccaacctggtcccaggtggccacagtgttgttctcagggccgtgcaggtgcccataggtgcatgccccttaaatttggggccttaggcacctgcttgccttcccctagttccagccccagcccaccgagcccctgctctattttccccccttcattctccaccagagtcagaatccacgtggttttctcactggtgtgccagcccttagaactgtgcttgcacacagtaggtactcatgagtgcatgagcaagcgagtgagccccacagggaccctgtgcattaggttccatcattatgcatcattcctcttttcagatgaggaagctgaggcactcacaggctaaataatttgcccaaggtcctcagtaagtggaggctccaccctggctctgaggtcttggccctcgcagactgcttcctgattctgtcactttggctgccctgagacgctctggcttgcaaagggctcctcagtccgggaaaccagtcaacatatttctaaaaggaattgtgtgataagtaagaggccctgagtatctagggagtgttttctccctcccttttcctaacaagataagccccgctattattttccaacagataaaactgtgagctgaggaaatttgaaattttcttaattctcagcccagttcttgacccagttcctgttatccaccacccagcagtggtgtttgtccctgggctgctggttgcctctgatggctcatttagcctcagggaaaggtggaagaaaatgaaaacatcccagagggagagttaggcctcccaagagcgagtggctgcccccctccagctcacaggtatctggccagggtgggggcaccgctgtgttgtagacatgctccttaaagagtgctttgttcccacttggagtaggggaccctccctcatagggctgtggcctctctgccagccaggaagggcctgaagtctgatggaggagggcatctgaggacagggtctgagagtacacggtgtgctggcctgctctgtggctggggtccttgggcgactgcaggctgaggctgctcagcagtgaggaatgctgagtcaagaggatgaacagcttctttctgagaagccagggtgatcgctgagtcatgccactcttggctaacacatgtgcagcctgcccggggctttagggctgagcataaccagtcctgctttttatcttctctttctcaaccccatctcttcttcaggaaacatttaccagatgtgtggcttgagtgtccattcccgcaacaaaaacgctctgcagtaaagctccgagatggctgtgtttgtgttggactgctctagatggtaactttgaactgtgtctttctgctactgcctagctgcctccttgctctcagggaaagagcttcattttattgcaaacgtatgattaaagtcatacatggtcaatattctgaactttctatcagttcttagcatccccacgaggaagcctggctaataatggtgtaaacacagtgatggggctgtgtggactctgaactcgcttccaggaatctctgagctgggagtctggtgacatgaattccatgtgccgtgttttattcataccgccctgaagtaagagccatagagtttaaccccctacagagtggcttgtttctaattgatagggctgattgcccatcatgagggtgggccttttttattggacttattaagagacaatagactatgtgcatgcagcccagagtgcatagagcaattttgagccagtcacggacacggagagcggaggggaagggataatggggccgtgagaggctctcctgccctagggtacctctcttccctggtatcatgccctcatttcatggttgaggagaggaggaggtaatgggatcagggagagggtgcacttgggaagaagagggtatatttctgggaagcctcatgtaacatgaatgtgtggtgcagagggcctggaggaaagtcgcagtgactttggtatggggcagagaagatcatgaacatgggcactgtgatagtggggctgacttgataccacccgctcccactgccctcccaccgccctccctgttctccagcttgtttgaggagtggtctgagccctcaccatgtcaatgcttcacagcttctcccaacgtctcagtgctgttgcgtctgccttctgaagcgtgttaaatgtgcatttccctccgtgtccactgccttagcctggagccccttcatcaagccccggggactgttgttccagctactaactggtctccctgcctctactttcccctgctccaaccctctcccagcttcctagacagggcatctttctgaagcacagatccctcctgacagagtcttccgtgggagaaaaaattaacaacctgttatcaagcatggcccctgagcctttgtccccctgcggaatggggcagatcccactcagagggcagcacccttcccaggttgctcaagacccctcatccccacttaaggggactaggggattgcatgtgcggggcaggggcactgcagggagcacctggaggagtcctaaccagcagcacctcactggtgctacactgcccagctgctctcggtgagtcagcacactgtggttgagcaatgcgagcccagaggcagagtccaacgtgctttgcaggacttagaggcatttcccggactcgcggagacctacctttctattgactctctctattttttttttttaaacagtggccaccaccctcccccaaccttgtgcctttcctggagccccgtctgcttttttccttgcatgttttgcacatgctgttggcttctgccatgtgcttcgtcctcttctctgtccagtgcagccctttctgacttttcagtccctgcccagctgcaaagtcttccttcaccccttgggtgctttgtgcgcttgtttgttgtagtgcttctcaggtcttgttttattttctcaatctgatttttaaagatgaacttattttgttctaattcacaaacaagaaaatgcacctgttttaagtgtgcagtttgacgaattttgaaaaatgtatagacctgtgtaataa

SEQ ID NO: 37768 - DNA, 2224 bp, Homo sapiens
ccttgaacaggaactctctggtttatggcataacgttatgctccaggctcttgatatataaggatatgttctagagttccaacaaataaaagcaaaaataaaaccaaaattcttctctctcaagtggcagacttaaaagtcaaggtttttaagattcacattttgaaaaatcagcttggtgactatgctggtttctcgactccatcctgtgcttgccctcctgtcagggcagtgcccggcgaatgcaacctgctgccttagtgtgggggcagaaggcataggggaggatggaggagagagtcggctctggagtgaggtttgaaggcttactggagatgtgtgaccggagattgactttaaagggcaaactttggctaagggggtgcgggggctggaaaccccttccacagaagaaacctggcaagaatcaaagcacaaagttggctgcgcctggtgtcagcccctgataagcagcctgactgcaggggaggacgtggctacagggcagataagatgtaagggtggctgaggaggtccctgggcagtttatctcatacctcccactggcttctgcgagcccaggtgggtgccaaggttagccacctcccccaaacctgctctcctattcgcagcacaaccctcctggacaaagcgtttttcctcagccttcaccacccatggaggaggtgtgattacctctattcacagaaaggagactgggacccaaccaaggcaagtcatttgcttcagaccacagagcaaagaatcattctgtcattccagaaatatttgtcaggcgcccctggtgtgtcaggtaggtgcaccttgaacatttgtttaatttgtacttaataacattttcaagaggacattacctccttaagtgaaaaatctgtgaggagttttctatctttctaagtctttgtggcacacttatcacatgcatagtactatttctcaagttacccaggcacacacagatgtatggctttcaggaagccatacatctgtgtagctctgaggcccagccttgttcaacacttcactcagaagaattgctggcctgatgaccaacaataattgtcaacaacttaaaacttcattgacggctcctaaaaaaaatcagtgtgcatgtgtgtgtgtatgtgtgtgtgcgtgtgtgtgtgtgtgtgtgtatgagtgtgtgtataacattcattactgcaaactggaatggagtggggctggaaggcagcccagaagcaaggctcagagcctggagctgctgacctcttggggacactgcagccctggcctggcctacttttctcttctcccatatctggaaaatgaaagtagcctgacgtatccggggacccggcccaagactccacccattggcagctcttcacttgtatcttttcatatcaaaaatgggaggtgacacccagtttaaggaaaattccaaggcatttgtctcgactaatgtgaaagatgattacagtggccagaggactgccaaggctccttctcaagctgcttgagtcaatgagggtaaggttttaaagggcccgccctggcttccttgggcctgtagtttgtgactgtgtcgttttcagagtgggaaggcccagagttggccccatggaattctttctgcttctagggtgtttgaagagatagaaagccagggtaaggttcaccgaacctccaagcaaaaataaatttccagaaggggcccctttactctgaggacattgaatagcaacaaaaactaccactgaagagtcattttgtcccaggccctgtgctggaaactttgaacacctgtgttcacccctccctcatgacactcatgaagatataccatggctgtctttattttctaggtgggaatctcaggcttgagggttggggtggcttggggaaggtgtgtatctaagaggtagctcttatttatttttacttctagagattaagacacattctttttcaagatagacatggaactgtcaaaaaggattaaaagttaaataaggataaggttatgtaaattgatcttatgtaaaaaaaaacactaagatatttgaagactaggcatcattatgtgttatatcatgatttttaaaatgatgctaccaagagtacttcagaggtccaaagctgaaatatatttgtatacttatatatataaagtaagggatacttatttaaaacctcaaaaaatcagaagtatgtaaaggaa

SEQ ID NO: 37769 - DNA, 1065 bp, Homo sapiens
gaaaatgcagactaatcactagtaacagaaaagcagatcagtcatggcctggggaggggcaagagtgacgaattacaaaggggcgtgagaaaaattttaggatggtggacatattcactattttggtggtggtgatggtttcatgggcttatacatatgacaatacttaacagatacgccacttcacagctgtttcctaagagtttaacctttcagctttaggcccctcccccaacacggtgtcctttctcattgccacatcataaaccagtctttcccctgagtcacacacatgcaatccttgcacagcaagtcatgatggtgccctgtgtgtatgtgatagtgatgggaaaaggataaaacaaaacactcaacttgtgttatggcaaaaagagattgcagtgatgataaagaatgcaggaaaggaagccaatttatctgttaggaaaaaacttccacttgcttataaattctgtttcctctgatgaagtttcattataaagtgttttctttttctttaaaaacaagaagatgagaggacattgattacttaaaaatttttacattaaagaatactggaaaatttcagagaataaatgtaatgtataaggcccatataaggccttaggttgaaaacaacatgcacccatgaacttgctaagtaatttgagaaatagaacataattggcatctttgaagttttctgtatacctctctttctacctccctgcttccccccagaaatagctgctcttctgaacgtcagtgtttctgtagtgttagcatttatgtttgcatataaaaaatacattattttacttcatttaaagatttttaggccgggcacggtggctcacgcctgaaatcccagcactttgggaggccgaggcgggcggatcatgaggttaggagatcgagaccatcctggccaacatggtgaaaccccatctctactaaaaatagaaaaattagctgggtgtggtggtacgtgcctgtaatcccagctactcgggaggccgagggaggagaatcacttgaacccgggaggcggagcttgcagtgagc

SEQ ID NO: 37770 - DNA, 3283 bp, Homo sapiens
atttgtcatgagggcaaaacaaagaacccaaaattagagggcctagaagagatggtagaagcagtttccattggatgttcgtacccatccagtggcctttgtttgagttcttccagggatggggcaaacactgtctctgcattgctgagtgcttaatctattgttatgaagatctttttcacattggcctcctggacgtctatcccatggccttcgttccatctctgggttagggtaccatggctcctagcatggtctggtggctaccaggtgtacagatatcaatcctcttagtctaagggcctgtgggagagcctagctggtcttcttcggccatgaacagcctttgttattgttttctctgcatgccatgacaagagcgtgtctgagggcattctccagtgatgacctcctttgtatcagaaggtacacttccaccagggcaactacagcctcctaccacacatcattcactgtggacgtcttagtcagtcaagactctggcatttgtttggttttgttttccaccagtgctttgctttttcatatgccctgtcctgtacttaacaatatgaggttagggaactaagaatgggattttagatttgtctgtgttaagtctcactatgttagatttggcctatggttctatcttaatggcgtcttttgggaccctgatttgctctctcagtgaattcacagttcattttaactccaggactcccagaatgtggtaagcttgcctgctctgcccttctgctgtagaaacctgttctgcacctcccagctccctccccaacccctggcttggcctcgaggcattctcctttcctgcattcaaggcctccaggaatattaccacacaccatctgcacatcgtcgggttcttttggccaatgccaatttgataaatttttttggcttcagtgtccagttctgctttctaaacttgtatttgcttcctttggaaaatgtattccttctttctaccctccctcctttcctgcattcctctgctctgtactctccacaattgaagagtgccatgaccatgtccatgcccagcctggctgcctcttttctgggaggagaggtcagctccacacctgagagccaggatggaaccaaatacctggaactgagcctgaggctttccagtagagcatactcttctaattgactcatttaccattgagtatgggtgtttatacatgtatccaactctactaaccatattctttgttttgctcacaagacagatgtttgcagatacttacatgaaattctgattcactaagttcacagcatttaactgtggtaatctcaccatctaacaacctcatcaaacaaaagattgcatgagcttcaccagacctggcctgtttttagtcatttcatgctttctcttggtgatcgtggcttccttaagtgctgaaagactatccctgtaatcattcatctagaatctttcccattccttcatctgtgcttgcaaaatcccttaaactcagtaatgggtgtggaagctgtctgtctggaggtatgaagaattaagggatggcattctccccggaggtttgatagaaagctggacacagtgcggtctggaagagtcatggggatgatacgaattgttcatgtatcattgcctggaataggagtatgataagcagccaggcactcaagtcagatccttagggcctgaccacaaaggttaccagtggccatcggggatggcatggttaattctctagtgtaaagagacaaaggttaaactaacagaatgtgtcacactggaaagcattttggagatcaggtcaattagcactccctgtgttactgtccacacaagtcacccagaaagcttagtcaaatatagatttgaattcagtggttctggggtgggccctaatgttctgcatttccatcgtgctccttggtgatgctcttggcttatgggccacactttgtgtcccaagagtttagactatactgttttgttttgttttttcagatgtagaaactgagatccagtgagatgaagtgattttcccaaagatacatagatgaagttgaagcttagctctttaacccaggtctgctggcgtccaggttggtgtctctctaattatagaattgctggacttaggaaagcagaagtctcctgccctctcttaatgacccatagcatgttgagggggagccaaggttagattctagggttgcacatacttgcacaaacatgcacacacatacacacatgctcatgcacacacatgcacacacatactgtacgtgcttcttcctattctcctttttcaattgggaggtataagaaacacatggattacagccacattaaagatattcataaatgcaaatcaattctgaatgtgtaaacttttccataagaatattctgggaaaatacttgagttatttctgaccttttatgtataaacacagacattctggagtttgtcaaagaccatgttactgataaaattgtgttagaatgacgtcttctgatagtttaaatgttaaaagctctgggctcggctcagggaattctatactttagcattcataaaggaccctagagtttgagagattatccattaacttctgatattgaatttttgttgccaactatgactatttgttttccctgaactctgtaggggaacaacacagctgacaaaacccaggcaaaagcgtgtgtgtgggtgcgtgtgggtgcatgtgtgtggcgtgtgtgttcacacaggttaactaaacagtgcagattcctccaatttttctcctttttgagaagtaggaaggagcaagagagaagaaatcatctggagtggaaaagagggctggaaaagtccttgaactaataatctgccaattaatccagctgcttggaaatagcctggaattggaaggtcttttgggtgctctctggaaagggtaccaggaagtatgagacaatggctgctaggaacttgcactgttcctgagtagataagacctgttgtcaagtaaattgcggtggatccctggtaacacttgaagagcaatgcaagcctgggctccacctgggctctacccctgcctgactaagggagcttggggaaagtatttacataatctcaatcagttttctcacctgtaaaatgggcctaaagaatttaaatttccatgcaagtcaaaaccataatgagatatcatctcacaccagtcaaaatggctattactaaaaagtcaaaaaataagagatgccaacaaggttgcagtga

SEQ ID NO: 37771 - DNA, 7743 bp, Homo sapiens
gaggccaagggggtggatcatctgagttcaggagtttgagaccagcctgaccatcatggtgaaaccccatctctactaaaattacaaaaattagccagacatggtggcgggcatctataatcccagctactcgggctgaggcacgagaatcacttgaacctgggaagcaggggttgctgtgagccgagattgtgacattgcactccagcctgggagacagagcaagactgtctcagaaaaaaaaaaaaaaaaaaaaaagaggaggcttggcagcaccagctctcctaggtggatctggctgcatttgtggaagccagaggctccagctttcatctccctgagctgaggggtgatcagtggccatcccacctccagggtgtggtgaagggagacttccagagttctcagggcacatggcaggagtggtggccaccatgagaagtgggccagcatctgggacacgagcagacctgaataaagagtcctgcagcattgcctgggctgactctagggagattgctctaaggattgggaggtaggcagagagggaaagcttaggccaccacaggcctgagactgaccagtcaagactctgatgatgggaacatgataatgagctggattcagccagcaggcttgtccaggttcaacacaaagtcatgagaggaaagcaccagcttcgggaaactttagaggttaccgtgcagtggcgggtgttggtgtttcttaagggtctggcacgtttgctgagtgattctggctgtctgcctggctctgagcttcctgttcatagttccccagatgtgtcacggccgagggattaaagccctaagaggctgtgacacagccatctccaaaaccccactttctccttcctttgagcctccgtaccagctggggcgtccggcaagatgtgagttgtcactctgctgcggcacagacctgaattaacaactctagctagggctgacttcaaaaagcactttcgttttttaataaccaacatcagctcagcaggcttcatttgggaaaagaaaccttgtcggattaccccgacattctccacctcctgggaggccagccattcccaaatgccccaaggatgaagaacggagacggtaagatgattaattgcactgcaggttttttgtttctgtatttttttccctcctttttttgggtttacttacacattaatgaggtatttaggaaagacaaatggaatctgataaaaggtaacgttatattgtttgtcgaaacaacattttaaggatttcttgaagttatatggctctgtaggcatgtttcactttaagatgtgtttctgagtcatattaggagaacgactgtgattatctatggaagattaactatgaaacatatgggaaatatactttataactgtatattacttataaaccatgaatagttacatgacttttggtatgtggtgagagatgttaagtgaaaggtgttgtaaatgaagtcgttttataagactgttgttactgtaagaattgagacttattttatcacttcccattaagcttctacagtgttagagaggcataacccaatgttgactgaaggtgctatgttttctttttaatttattttttattttgtttgagatggggtctcactttgtcacccagactggagtacaatggcatgatcttggctcactgcaacctccgcctcccaggttcaagcgattctcctgcctcagcctcccgagtagctgggactataggcgcctgccaccatgccctgctaactttttgtatttttagtagagatgggttttcactgtgttagccaggatggtctcgatctcctgacctcgtgatccacctgcctgggcctcccaaagtgctgggattacaggcatgagccaccacgcctggcctgaatgtgctatgttattaatggcagcctctattggtttcatttaaaggtataatgcattgtattggcaaaacttgtacacgctttcttcaataaggacctcaaaggtaatcttaaaagcctgatcatatttttctccccccttcagaagctttgccaatgttgcacctatagctatagagaagaccatgcactctcagaggggattataaacattgccttgcatttttatccttgatctccataatttatccttgatctccatttatccttgatcctcataattcctactgatagtgttgttgtgcataagaatgagaaaatgggactgaacctgaaagattaaggaaagaaaataacaaaacaaaaaggaaaacctaatgaagcttatcattcaattcaatttataactccttattgctcatgcaaaatgtgaatttttcgctgtgttggtgagggtgtgaggagtggatggtggggaaggatgcttcaaaaaatacagctaaggaccaactggtttggtgagtcatggcattcacccatgagacagctggagaacagtgacgtgtgtgtctctgtgtgtgtgtgtctgtgtgtgtgtgcatttgatgccagagattggtgtttactataaatgtgttgatctgttaggaaaaggaagaagacaaagttgtccagaaagagccaagaaaacttcttgagatgaatttgatctgcctaatggtagtgatgagtttaaaaagattcttatggcctttcctaacactacatgctattgttaatcattgaactgacaaaccccgttgagcacaagactgttagtttacttaggaggaaaacttggcaggaacggtcaaagaatagcgagggtatacttctaaaatacgtccttggaacatttacacaaacagcacaagctcattgtcaagaataaaattttaaaaaatacatagagataatagtaaaagacgagaagtaaaaacacaccactgtgaggtaaacactgttaacattttggtaggtgtatttgtctctgagtacatttacattttgaagaaatatatttgtactctacatgcttttcggttatctgcttttacctcacagcgatggagcatcttgttatgagaatgagttttcttttacaaaagcttttccatttcattgcatagatagtttattaaatcctgttggcaggtagttgattgtttttctcttattaacagtactacaactatgttcttctcttattaacagtactacaactaacacccttgtagctaaacctttgcatctccttgatgcaaaggttatctcaacgagttttccttgagataaatccccagaggtagaatggtaggggtcaaagggcatgggcattttaaaaactctagatccctgctgctaaattaatcctaggaaagtttaattaatttatgtgcccaccagcactgtatgaacattttccaactctctcatcagcattgggttttataattttttgaaaagtgtgctactctgcatgcacacgtatgtttattgtggcactattcacaatagcaaagacttggaaccaacccaaatgtccatcagtgatagactggattaagaaaatgtggcacatatacaccatggaatactatgcagccatgaaaaaggatgagttcatgtcctttgtagggacatggatgaagctggaaaccatcatcctgagcaaactatcacaaggacagaaaaccaaacgccgcatattctcactcgtaggtgggaattgaacaatgagaacacttggacacagggtggggaacatcacacaccggggcctgttgtggggtgggaggaggggggagggataacattaggagacatacctaatgtaaatgacaagttaacaggtgcagcacaccaacatggcacatgtatacatatgtaacaaacctgcatgttgtgcacatgtaccctagaacttaaagtatcacaataaataaaagaaaagtgtgctactctgataataggcaaaggtatattttgttgtcttaatttaccttaaggaaaccctttgcaaaatctgctggtttccagttctgcccctttgggttcagcctctcgtcttttttggttactcattgccaaagcagtcacctcttacagtaacttctgccaacctaatttctgaggactttgacctcttttgatgtctctcagaaagtctgctgagagagcgagagaactggatgcttttgctctgaatttttaccgattgagtaacctggggtaaacctcagtctttgtgattttgtctcctttttagctataaaatttagacagaaggcctgtgctagccacctcacaagattgtactgggaatataaagaggcaagatagaggcaagctttttgaatagaggaaaagcaaaaatgcaaaatggtattattattattgttgttactctaaagtttagtgataaatctaaccttctaaaatatatagtttctggagagctgcatgctgaaattttgtcgtcttctaattctaaacttgggaagtgtgtgtgtgtgtgtatgtatgtgtgtgtgtgtgggggggggtgtgtataacatatttctatgcttcttggttcttagattcagtagcagtgtttagtgtgttacagcagtgcatggatacattttagattaaaaagatttccattttgttgcttatttattccattcttgtacaggaaaaccagccatcctcctcctattgcattctcatcatccatgggctttgctcagctccccagtggactgagagctcctcaaagacggggtccggtttcatgtgtatacctctctccagggcctgctttggggtctgacacccagagggcggatcaatcaatgtttctcaaatgagtcaatgtaagggaggtagaaaaatatttacccagttctgtggagaaaagaatattccaaaaaggcaccccagaagattaaaaaaaaacctaaatggagcttttctaggggcaactggttatttatttcgtttagtttgggtgagtctcagtttctattgagtaaatatttaaagctctgaaaggatattaaacaaatgaatgcaagccaaggataggaccaggaaaatggagaaccctgtctttataggtgcaagtgtcatggatttggcatgaatatcaaaaactttaaggaggcatcgattttcactctgactcccagctcagtgctgggctgcaaaaatcaggaccaaactgacatttagtaatggtttgaacttggtactgaataataataataataataataataataataataataataataaaagctaatatgtaatacagcacttgctaggtaggagacctggttttaggtaccgctcatataaaataatcagtactattattttattttgcagattaagaaacggaagcacagagagtgatttgctagggttataccagtagttattgcagagctggaattatgacgcagacaggctcactctggagcctgtgggtcagtgagggtaggtcggactgaactttggagacaatgtctcatggttttaggccactggtgatgtttgtgctgtttatttgggtatatgactaccatttattgagtcacctactaaaggaacatgcactcttctgggttctttaagtataatatcttgaatctttctcgcaaccttgaaacattattccaactctaggtccagacaagctgagaccctgagaagttcagtaagtttcccaaagctgcaggctagtgaggagagatccatcagcctgcaccaagtctgtctgccttctgagtccatgtgccacactggcctggacaactgagtgctgatgtatttggttcttccatccaaaggtgccaagagtccagttctactgcatttggaggtgttgaacctggaaaactcagccacaacaacccctcaacttggggatcaggcagggctcagcctcagcttctctgaacccacatgggccaatgtgaaatggatttgatttttcagaccagatcctccctggcaggaccatccaatttatcacaccaacctagactcgatgggcgtttaaaatattgagagatatttccttatatttcctctctattgaccccccaaatctgcaccaaggaactccagcgaatgagatggagtatggtgagtgctagcttgggggccaagggcggcttcgtttctcctgggcgacttatctcccttttctttgtttagtgtttccagttataacatgagggaaaagactataatttaaaatggaattttactttttttggttaaacttttccatatgattttgaaactctttaaatttttttgagtgaatgacacatggtttatttgcttttggagtggtaacacaatttaaaaggtgaaagtctttttctcttccctttctgcagacgcttctttccctcttcctcaccaataggcgagtcttgttaatagtttctagttttttcttccacctcttttgcactcatagtgtgcaccattctataccttgatccatagctgtatcaaaggcggtgcattttctgcctcttaatggacagttggattgtttgcaatgttttgttatttcaggcaatgttgcgaccagtggcagcctgccctcgtaattttgcagaagtgtttccaagttgttggttaaattcctggaagcagaattgtggggtcagaggctgtgtacacttgtgattttgatatatatttcagaattacccacccccccaccccaccaggtcataccaattaacacccctaccaggaatgtttgaaagaatgcctctccatgtgctcgtcaacagtgcctgctaacaagctggtttttattagacttcggcagtctcaaaggagaaagctgcaaacttagtaagttttctaaattttcctatctcgtatcatgaccatgcagtgtcagccccactgtggtctctcgtggcaaatacaacagtctgacaggtactttgttgactcaggttgggcatctattcaattggcttaaaaccatttgcgatcacaacgtttttcatttggtgattgtgttttgaggccttgctgtgtgtccagtcatgggatggcacagggatgcgtggaccctgccagggttgcatgaaacagctaggcagccgcgggagttggcacatgtgtgctgagcactgtgaaagaaacacagagacagaaggctgcagagacagcgagtagggagccacggtccgtgttagcctggtgattgggacggctcgaggtggagtgatgaagtctgaggcatgagaaggagccagccagacagagggcagaggaagcagagcataaaaacccagcatgagaagcagaaagcagctctatgtatggccaatgaagagagtggaagggaggccaaggtgagctggagacagaggcagaggccagagcatggtgggtgtttagggctgtggcaaggagtttggcttttattgtgagtttcaggttgactgtagtcatgggctggggaagatggtgccaaggtctgtaaactcttaccttgtagatgtaaattctcacctgaataacaccagggaggcatggttctatacacaagcacctgtcagactgtgttgtatttgccacaagagatcacagtggggccgctgctgcacatagggctggcgaccagaacactgtatctcttggccaaccttgtcctccgtgtgagacaagtggagacattttacaaaaatacgttctacgtctctctggagtacaactcagtttacaaagggctttctcattcattatctcatgcattaataa

SEQ ID NO: 37772 - DNA, 2676 bp, Homo sapiens
atactttgtgtttatatgacaaacagagctaggcttcagactcagatttttatctccattgaggtctggtgagatgtttgaaaggtttttttttttttttaaggatagaggacaatttgttgtgctgtgctgttctaggtgttgcaaaatgtctagtagccccaacttctgcctggtagatgcacacccaaccaaaaatactcccgcttgtatttaaaactcacttaggttatagctaattcccaggcactgtctgtagagattctgctcaggtagggctctagaatgtccaagaggctgcacagctaggcatgggaaccacggattcaagccatccctctctctgactcaccagatccctctgacatatcttgggccagtggctgtccagcctgggttttaaggagctgggtttcagtgaagaatgtcagtaggttcagttctcttcccagcccttttaatgcagaggcccccttgtcagcctagaaggctgttctaagctcctgtgcaaacccctcttgtgaacccttgggtgtggccatcctggagatggttgactggtgatccagatttcagcctctcccttctctgctttgcccagtgtcatgttcaggcccccggctttgtcaaaagagagaaacacttttccctgggtctcaatcctttgaagttccattgggtgagtcagctccccacttagcttcagaaggatccaggacaggttgtcctaaaattaatacctgcacattcatggacagtgcatggtgagaggaggcaaagatggcagagacaactataactggttgtggaaaagagttgagggagagaagagaaaatattattaaatggaagagattgaaaaatactgaaatcaagtgcaagaacctttaatgggcagagttaaatgacacatttattcatccaataaatatataaaatgcatctaccacctactaggcttcattcaagacaatgataatacggcagtgtataaaacagaccaaaacctaccctcatgaagcttacattctagagggggtagacagttaattaacaagaacaagaagtaatatatatagtaagtcagatggtgacacatgctaggaaaccccagtagggacttcaggtaagacagagatgtgtgtgtgtgactgtgtgtgtgtgtgtgtgtgtgtgtgtgtgtgtgtgtgtatccatgcaacatccaatgatctgggatacctatttggcaacaagagaggaaaatctctttggcaatagtgatttggatgttagtagtgtaggaggaatgagaaagccatactgcaattatcaggacaggaaatgattcaagtttggatagaactttttaacaatgaaaaatgaagagaaacaaaaccactttcacatggcaataattaaatttctgagtttacgtaaagaatcttatgaaacttctcattccaaccttttgtttcctttaagttctttattatctttgagtgtttagatttcaattctcgacagttcttcacatattgaatgagtttgctctcctatcacacagagatcaagttatctatgcattttacacttggttactttagacttgagtatttgtgtcgaaataccctcctttttaaatgtggttttggttgatgcttttggaatgaggaatttatcagctgtggtgactcgtatatactctgttagccagaaatactagcttactctttacccgaaaactccctattccaaaatgacatcacactatgagtttatgcctaatgaagctccagtaacatttgcttatttgcatagtagaaatactgtcaggtacacgaattttcagtaattttctcaatacctctatggtattactgaataggtatatcatgctcattttatacgttcaaagaggctgagtatataaatacccaaatataatgaatgtttggcaggtaatgatcatctctatcattgactatgtttaaatactttttatgtattaacttattctctcaacaacccaataagctggggactattgataacattattttgccatcaagggaattgaggcataagagaagttaagtaacttgcttagtgccacacagatagtatattgtagagctgggatacatttggggcagttgggctccattgcctatgctagtaaccatcattctgcacttcctctagttctaaagagcaaatctcaaactcctacatgttttagggtgatttttaactttacacacaatggcagtggtcagtggtagaacagtaaaaggcagcaatgtgaagggggaaaacgatcagttttggagagtgtgttggatcccggttcagttattttactcattgggtaatcttgggcaagttccttaacttctctaggatgtctgttgctgtctacaaaacaagagtagtagccagtgtggtggctcactcctgtaatcccatagttttgggaggctgatacaggaagatcacttgaggctgagagtttgtgcccagcttgggccacatagcaagaccctgtctctaaagaataaaaaagtaaacaataaataagctgggtgtggtggtccaggcctgtagtcccagctacttgggaggctgaggtgagaggaatacttgagcccaggagattgaggctgcagtgagccaagatggtgctactgcactcca

SEQ ID NO: 37773 - DNA, 1638 bp, Homo sapiens
cctcctctccctgcaaggagcccaaggtgtgatcctgccaggcgttcgttcgctgcatgaccttggccatccttccattcccctgggtgtgaattctcattggcaaagtgagctggtgggcataagtgggttttaagtttaaaaatttaaaaaccctgtctgcccccaagtgtggtatcaagattttatagtatgacacttaaattgcttttttcatccgggcgcgtaacagcaacaatgaaaccagcagataacgcgtgagtagtatcagctctgggcctggcactattttatatgtattagctcattttttttaaaaaactgttttcaaccactccatgagatgagtgctcttatgatccctttttcacagaagaggaaacggaggtacaaagaaattagtgcacaaagccagtcggagagagcccctggccaggcaccaagctccagaggtcgctctggcgagcgtttgcttcgggatctgatgccctggagtcgccaactcaattcgcgggtcgcagccaggctccatgggggtagtagagccaggtcgtagtggctaggtgagttgtctcaactaactctagtggagccgccgcagccctggaggagccgggccgcgactcgagagcgcccggcagctctccaatgctttggaaccggcgggacccctgcgggctacccggggcagggcggtgtccgcaggggtctgtccagccgcgcctgctcctccgggtggagagttgggacacccggccagctcgctcgcagcccgcggactggcccagccgagccgtctccgcccgttccccgcccccgcagcggcggggctagagccagagccgcgcccggcagttcccggccgcgagggcgggcgcagcttgtggccggcggccggagccgactcggagcgcgcggcgccggccgggaggagccggagagcggccgggccgggcggtgggggcgccggcctgccccgcgcgccccagggagcggcaggaatgtgacaatcgcgcgcccgcgcaccgaagcactcctcgctcggctcctagggctctcgcccctctgagctgagccgggttccgcccggggctgggatcccatcaccctccacggccgtccgtccaggtacggggaagctggagcatccggggactaggtaggggtgagacggaccacagccttgacaccttcgagtcccccgctctgcaggacgccgtgagcgtcctccctaagttgcacttggttgtcagagtgtgttgtgtaagaaggggatggcggtgaggtctgcgtgtgtgtgtttcttgtgtggagcaagagttaacgttgttcaggtcgtttgaaggaacttgccagttgttctggaggggggttctaggtaggtgtgtgacttcccgtgtgaatggctttcaggttttctatccggctacgttctacaggttcaggagcgtccctcttagaggttaggctcaggaccgtcagtctccttaacaaggtaagggctgaggccttaaccacactggggagggtaacttgttgcccctccagataaaggatggtgctagggaatgtagctacaagcaagtaggcgctgagaagacactcattatttacaacagtcatgcccagcactttaca

SEQ ID NO: 37774 - DNA, 1584 bp, Homo sapiens
aggccctgggaaccttgttcctgtttttgttcccagagccaaatagatatttgatgtatgattgttgaatgcagcagtgagtgaataaagacatgaatggttaactgaaaacattttatcaaaactgttatttgtcatcagagcatgggccggtttccaacagctaacatttaggagtgaccatttgccaggcactgttctaagccctttgcatgtggccattcatttcacccacatagcgccatcaatgacatgctgtcactgcattgcttgtcaaaagggggaactgaggcacggaggctgagcttttactcaacatgccatctatgttgagggacttctgacttggatagccgttcaactgcgagcactatggaggccagtcaggcctggccctgccttggaatttctgtgttattcagggacataatggggtttgtgttgatttttgttgggagtgtgtgggttaatctaggtgcaaccctcacctccttcccttctgatgtcctcactcccattggtcatgtgacccttaacgcccatcccaagctcagtgccaattccttgccccagggtcctggggattgacatggatcccaaaagcccgctgctgagaggacagggccactcccacccccctgactgtttcccagagcagctctggggcagaagtaaacttggacccagggggcataaccctttgcccttttatagtctattagaggaggatgaggtctgacatcagctggttcattgccccttgtgccccttgagcacactggggcccagggagagtcacatccctgccttgtggtacaggccaccggccctggacctgtgattaaacattgtccacaattaatttggaattattatctcgtgatacactccataaagttcagtcacacatcttctttttcttctcccctgcctaatgatcagacaagccaggtcttgtgactaaatgaaccgacagctggcagtgttcatctgattttgcaatgcccttattttgttgttgataaactaatgcaaatagctggttggcctggaactggtgattgggaaacattttaacccttctttccttcctctctatcctaaagacttaaaacacacttcacgcagtcacagaaagagctcatagaccagactgcggggcttcaaagccttctatcttatttaatcatctgtaaatagtttaaaggtaaatatggtaataatactagtattctagactattttgggaagccagctgatgtgaataaagggtcagagttaaaagatattgaaggaatgcagttttactgctctgaggtaggtttcaaggcttgagccaggcttagagatctttgtcctgatactggggataaagtgaagagaatatgaatgggtatgtctcgcatggttagaaaatctttttttttcctgtatttgtttaaaaagcattttgtaacttaaaaaaatacctatacaccttttttttttttgagatggagtctcactctgtcactcaggctggagtgcagtggcaccatcttggctcactgcaacccccgcctcctgggttcaagcaattctccc

SEQ ID NO: 37775 - DNA, 1771 bp, Homo sapiens
actttggggtcattccacataggccaatgcagagcatgcagtaactgctcaaataggatttggaaaggaatgaataattcatttagacgttcaacttggaatagacttaagcagacactcctggtgatgaaggacttagatgccagaaaatcaggctcaaagactttcaagccacttcctagtgtgatgtcacattccttcctacgctccactggggaaggcaggtctgccccgcccacggtggcggggaaatacctaggcatggaagtggcatgacagggctcgtgtccctgtcatattttccactctccacgaggtcctgcgcgcttcaatcctgcaggcaggtagacaccgggccgggagtctggctgagccaggcatgggtggggccctgacagtaggagaggtgtgcaggaaaagacgtggcaacaatgtgtgccaccgcaggccagggatcaggccccccaggccggcccccgaccggctaggtgaccatgggggagccgactccgtctctgggtcgaggagtggagctcgcggctattttcagctccagcggctccctgccttcctttctcctttcccgctggcccttgccaggtaggcctgccctggctgctccccagtgagcgggtgtttggggtttctgtttagaccgccaggctcgggtggatcccgaggacacaggcgcgcaggggaggctccgtgcgccgcgagcggggttggggtcccacgtctggaacccaggccgcaggctgcgctggggggcgccctggccctcacgggggctctggacaccagcctgcttcgctgtcaggtggcagaagcagctcccacgcggtccccaccgccgccgccgcctactcctcgcccatcctcctctgcggcggggcgagctccctgccctggatcctggtcgggcgcccagacgaaggagacaggggaagggcagtctttggggaaacgtggggccaaagtcggagggctccccaggaaaaagggaaggtcagcggcctgggcggttgtctttgagattccgaggtcgcccacgccggcgcctcgggcccgccctactgcgtcctcccctcccaccctcttctcccttccttgcagcccggtttggggatgtggtccttgctgctctgcgggttgtccatcgcccttccactgtctgtcacagcaggtacgttccgtgtgtcctccgttcccagaggctgcccgagtccacaggctcctggcctgtcattgggagcccccggggatcgcgtcagcccgagcgcggctccttcccctccccagaccgccaggcggagttccgcggaagaggaaacagagaaccagctccacgtgctcggatgctcagccctgaatgtcgcctttgagcttggaggtgacttcggggaggggaaggagttaggcaaattccaagtgaagacttgagtaacaatgctcaaatggaattactacaggctattttataagataaagcgttattttatgacacaaggtgaaagcaaggaaaccgtcaatagaacaaatttcttctaagaaatttggtatggccgggcgcagtggctcatgcctgtaatcccagtactttgggaggccaaggcgggcggatcacgaggtcaggagatctagaccatcctggctaacacggtgaaaccccgtctctactaaaaatacattaaaaaaattagccgggcgcggtggcgggcgcctgtagtcccagctactcaagaggctgaggcaggagaatggcgtgaactcg

SEQ ID NO: 37776 - DNA, 920 bp, Homo sapiens
ttcttgaaatgccaaaagtttttgtgggaaatggcacatccagataggaatgagcctcctatgagcgcttttcacgaggaatctgcttaaggcagggagtaagcatggagtatgttccagacctcactggagaacctgtgctaagaaatatgaataacacaggcctgctggtgactgtggtcagctggaaaacacatgcccctcaaaggtagctgtctattcaggtcaagcccatcttctcacttttcaagggaatatggaaatcggaatttgtgtgtgcaactttttataatttgtaaagctttgtggggcctgaataaaacacatctgtagaacaaatttagcctgagggcccaatttcgtgactttcccacactggcttgcatgaccttaacaaattacttgatctctctgagccttggtttttttctgtaaaatggaagtaatgctggcctgataggcttgaggtgcaaattaactgagatcaggtgtgaagtaggtactccattctctcgctcttgttttgattccgcgatatttgccagcccctttctgtgtcccagcatggcccctgtcccactctgattgctgctagattcctcatttctaaacaccagacagactaaatgcacaaaattgagtggttcacaagtggaagtggtcgttagctctgcctggctcctttccacagatttagttgctaataaaccgctcagggcacgtggaggtctgctgtcctattttagcctaggctgtgaattattaactagtagcctaggctgtgaattattaactagacttgaagatcatacatcacataaatgaatctggatgtcgaagctagacttaaactatttaaatctgggagctgtgaaatgaggaaaagtaatctttaatagaaattgacgaagatattatct

SEQ ID NO: 37777 - DNA, 1372 bp, Homo sapiens
ttataggttaagttgtattttttaaggcagaattggtaaagaaagttgtgtgcctaagatagattagttagctagcagtcattgataacgttaccttcctaattactgtttttaaacatttttggttattatagctttgtaatattttattatttggatccaccaccttcctccagttattcttatttttcaggcttttctttatttttctaacattaattatatttgtttaaatgcatactatgtgcacatggttcaataatcacaaattctaagaggtcaccccctggaaaacctctttcctgctaccgttccatatttgttctgggctcatcacaccttcctcaactgtggctaccatgattagtgccctgtgattattcttgtatgatgctatactagcaaataaaaatatatagtctagctctttctagcccttccttttttacgctcatctttctgcactttgtgttttcatcttcaaaagttctcttttcttgatgatcctggcatatgttgacatagaaggtaactcttggcatggaggagcacaggctagtcatttgagattggaattagtttttcctgcttgttaacgcctgccagcacacccctctgggtcatgagttttctttatgggaagattttcatctattgattcaatttctttaatggtgaaagaattacgcaaatttcttactttctcttgtgtgagtttggtaagattttgtgtcttaggaagtttctcatttcattaaaggtctcatatattctggaaaattgtttagcagctcttctcttttaatgtctgcagacatcaaaaccttcaaagtaaggttcaccttcagtcattattcattctctcttacacacatacacacacacgtgcacacacacacacacttacttgattagtttcatcagagacttgtcagttctagtactcttttcaaaagctaacttttgactttgttgatcctttctgttatatgtttcatgttcatttaggttgtttagtttccctcttttacaagaaatgtggaagtgagtgtccttatacctgtattttaaggcacgtttgccagtgaatgcattcctttaagattactagccctagaattgctcatttgtagggcatgcagatgaacaaagtattcaactttgttgatgttacacaaattgcttcacagaattttgtatcagtttatacttttgccaggagtattttattttactttattttatgacagagtctcactctgttgtccaggctggagtgcagtggtgtgatcatggctcactgcagcctaattcctgggctcaagtggaagcccaggtaattttttaaattttttgtgtgacagaatcttgc

SEQ ID NO: 37778 - DNA, 1986 bp, Homo sapiens
agagagggagggaaaacggagggaagaagggagtttcgtagaaaagaaactaaagaaagcaggggagagagatggaggagaagggaggaagggaagaaagaaggaagggaagaaaaaagaaagaaacaaagaaagggacagtgattaaatcctgctttttgacagtgggaataactgagttgaagtacagggaagcattcagcggggcctgggccacagggcggcctctattgcttgtctggaggtcaaaacaaatccccaacaccacagctgtgggttttagtctgtgggcctatgtcctgccagtgctgtttggcatagaaatgcctcagtgtgatcctgactctctgagagcctggcatttcccaccatggtgcttgtgactatgctacttttgttttgttttgttttgttttgtcttagaacagatacaatctattaaggccttgcaaaagtaataaatctgctctaaagtcccctaattagatgaaaaaagaagcctggtgcagctgatctgtgtggagatgcacgactttataccttttaagtccagaggcctgagtgacaagagcaggaaagggagggaaactggttgtctgagaacgttttatgggccagctaaaacataaaagaggtcactggcatcaagtgcttgctttgcacataaaatacacagtacggttgttgcccacatgtttgataaaacgtggctattcactaacttggattttttccaaattaaatttctgaattcagaattagcaaccctgagcaatgtagaaagcgataaactcctttttaatgacaaaagtcatctgaaccttaagtgtccagtgcaacctgaagtgctgctagtactgtggatagtccgactgggcatggggagggggtctctggttttggctctggcatctgcagaggccgccccgtctaagcacacccatgactgctctctcctgcttgcgtctttgagaagaagacagttcagtcccccaccactgattgttttctgacacagagttgagtggttcagttgctttctactttttgactaacagaagcctgcgtcactttacgtattcttcctggaagctcaggccccatggtgtgtctctctcactgtctctctctctcactgactctgtcagtgactctctcactgagtcattgcgactcccaggagcgtgactatagctgtgacttatgggtgttgtgcagtgtgtggggaagctgctagtgaggtcgagtttagcaggaagagaaaacaggaatagtgactcacacggagtagtgggggctgggcagatgagagagttaggcagccccgccctctgctgagactgggacgcagcccagattctgcaacagtgggcagaggatttggcgatggaggctaacaggcagccaggggtcctttttttctttatttttattttgcttaattcagaaaagtatgtgtgcattttgtgatgaaattctctacagctctgtctacgagaactgccctgtaatatctctgtgtgttggctttaacagtgagctactgatgagattctgagattagtcccagatcttgtttatgtccttgttccccttgaggatattttctgagttaaatcaggaaataccgattaatggatgaaaatgagaaagagagaaataatgtccttcgtaggataagtcatttaccctgactaggttagctaagctgtatcactcaattaataattaggtgtgcatgactcaccattttagaaggagccattgacagccctagctgaagtcagcaagttctgtatcttctctagcaagccactggagctttacaaattctcctggcaggggtgcatgtgtgtacgaggatggaagggtctgtgcacggatctcctagagagatttgaaaatgcctcgccttactccagataggtctttggagaatgtgcatgtaggatagaatggctaaaacgaagacaagccaaacagtta

SEQ ID NO: 37779 - DNA, 1156 bp, Homo sapiens
tgattgaggctatagagaaacatgagggtcatgcacaatagctttttttccccacacttagtagatggactgtttctcagtctgacagccaccaaagctttatgtcctgatgaatattttcgtcctctcatcctctctgatggcctcatttctccaaatttcttcttctcctcctttttttttttttttttttttttttttgagacagagtttcgcttttgtcaccgaggctgggattacaagcatgagccaccgagcccggtcaaggctttcatatttttaaaactttgaagtacagtgagaaacataatttagtaagcaactcagtatgcacacacggaatggaaaaagctctgttctatgttatttgttctattttgttcaagtctagctcaatttttcaaaatgctggtcacagctcgccaacttgttttaataaccaacttatgcctttccactgcaatctggagagctcagcctctcaggctgctggtccccctgtcaatcacgatactttggctactttgctttcttcaatcaacaaggctttatcaagaacttatggctcttttaattatctgacttcctggtcaatcagctttgtttgtggttttaaatgaccacaggatagtagaagtgaacataatttcctgcctgtgtaaaaggatgacatcaagaggaaaagaaagcagctcactgggtgaaggaccttgagaaagagatgaacatttcctctcttgagacacaggacaaacaaggtcacgcctgagctcggcaaacaaggacttcggtgcctgcctacggcgccattgcgccctctagtggctgctgaggaaccgctgtccagcccgaagctcacagagccccgttcaggctgccgcaacctacctaggcggccagaatggagacttacaggtgggcgggcatcccggggtgcacacattaccttctcggggctctccaacttaaggccaaggatatctttcttctttttcggctgctgagaaggtggagatagtgccattttcgaatgtgttcctaactcttgggcttctgagactgtcgcagtctgtccaagggtggtgagtggggatcagcaggccctgtttactatgtgctcgcaagaggggactgcggtcatagggatttcagagag

SEQ ID NO: 37780 - DNA, 1065 bp, Homo sapiens
tcggcagggcgatgcccaagacggggtagtggacggggacgaattggttcagagacgggtagcagatggggcagaaggacgagtaggtgggctggaacaggagcgtagtctgcgggtccagaaacgggggacggatgggaggaaagaagagccgactgccagggagctgcggggtggcgccgagcgggcgccggggttgggaggcggagaggcggggcagctttcgagtcattttcagcgagtgcaaagctccctcgtcggaacggtcggagtgcgcggcgagcgcggggcctgcgcggcttttatctcctcagggcgttccagggcggaacgtgctttgtgacctgcgccccccgtgaagccgggagcccctcgcgagttggcacagggccccgtctcagggtttaggagcgaacggggaaatggaagacaaaggaaatggggggacatagcaacccctattcttgtaccctgtagttttgccctcagtaggcaaaggctgatcagagggctaggatacagttagaggccgggggcctgggggagcggctctgagcaggatctgggaaaaggggacgaagtcagtgccccaggcaccttcccttaagacagcgcagcgttcaaagcccttcagtccttcacatcactgcgggaacatgcgcaattagacatgctaggtccattttacccatgggacaggaaggaccagagagggaacttccataggctggcggtggtgacaaagcaggtggggctagaacttgggtcaggagagggcaggtaggagggaaggcaaaatgccccaagcgcgcaccagcgccttgcctctcctgcatgtctggacggggtcctgcagggggcgcgtcagagcagacctgggcgtttcctagcttacccttggtccccgtattccttggtttgaagctttactctttaaaatactttttttaaatctttaaatatttattttatttcattttagattcctgggtacatgtgcatgtttgttacatggatatattgcataatggtgaggatttggcttctagggtacccatcaccaaa

SEQ ID NO: 37781 - DNA, 1825 bp, Homo sapiens
gctagcacacaaactcaagttcaatttctgggtagtgtccctctggtagggtcactcattacaaaagaataaagaaatatttcctgcatctttattttctcttatgttggggccacaacaaaataatcacatttatgcctttaagcttctaactgcaccctagttgatttgctatttgtatattcttctctaatattgtatgtgcctgtttaaccatctctgagcactcttttcctaaaatgtacattcctacacaaagctaatatcccattgcctattaaaaagtatccaaaatttattgagaagaatgtcatttgcatttaaaaagtcaactccttgcctggcaatctaagacccttctcccttatcctgctcataattctactgtctatcattagttcttttcagctaatcatgctccaggggacatgatgacatttggcaactggagatcagtttcatggaggtcgggtcctgttacatatcccacaatgtgcagaacagctgccgcccacaacaaagaagtgccaggccccaatgtcaatagttctgaggctgagaaaacctgctctagacaatgagggaaagggatgccctcagaaccacctgggggattcccaccaaatgattctgatgtgccccattcctggtttagcataactgtcctggaacagagtaagttcatctcctgaatgaagttactctcgtttctccaaacaccattaactgctctttcctttggcttaattatatcactgtagaatggtttccaggaatggcaattttctttgattctctcctacatgcacactctttccattggagggtctcctttgggaagattaagtgatgtgagaagcatgcagagcacctgcctcgtcacccagagtgtgagatcctccatgaaagggagtctactctccttcctttttctgtagtttaagcactttggaatctgaggccatgcctcatgcaactcacagcaacacaggaaggcactcatctacagagtcacccagtgagtcattcatactaaagtaatatctcttttcatttcaccatcaggagtagtaatgtggattcagtaacaggcaagtaacactctcaaaaccacaagtatctcctgagagcagcaaataacagagttaaaaactttcctttctgagaacattgcctttctcagaaacgaaggtgctaaaatcactttttcttgtaaagtggtgattggaagtaaccattgatcacaaatgctaattcagcttctctaaaagacatgtcatctcagacatggtctctaggctattgtacccttcctctcaccaaacacacatgcaggtaatcctctccatgtgctcaagtctggagaaatgatatatctcacaagtttacaccttttctttaactgaaataaatgtaacctgaaatcaacacaaaatccaaccatgtcttactgttattcactaaaggttcttagaaccacaagattacagtattttgtggctactgggaggtattttcatttctttttcacaaaaagacccagttatttgactggtaccatcagggttgatttttgtgtaaaattgtgttttagtgtctcttacaccccacacatacatagttaatttatcagggtccttgttattatctcctcttctttgtaaagttagacttaaaaatatacaagttttgaaatgaacaaatggctgtgaattgattggctgagaatggtttcttcatggaatagaagaaagacaagcgctcttttcactctgtgttcttaaacagtcttcatgcttagaatatgattttaaatttaaatacc

SEQ ID NO: 37782 - DNA, 1338 bp, Homo sapiens
aaaaaaattaaaacttcaacaattgcacccctctctattacttccctatagtgaactcccatccttctgggaaagcaaaaagcctggggcgcatttgtgtacttgagacgcggagcccctctcaccttcggcatcccccggggacccctcttccaccctcagccctcccctcctcttcctctgaagagccgggcggccgctgcggccagcggtcctccctcctggcatcctctgctgtgaaccgcggcctgcagggtgcttgcgagcggcccgggcgcgcccccttccggccccgcaggtcacccggctacagcccgggttttcccgggacccgcgccgcgcggctgggcaggaagcgccagacgcctggggcccacgccgtccgcgggaaaagggcaaggcgctgggttttccagcagcaacctttggaccccgcgatccagtagctccggtaactccacgcggggcgtctgggtggaggagccggtcctggagcacggctgcgaggagcacccggaccggagggtccccagaccgggacctccgagtcagggaggattctacgccagggagcgccccagactgagagcgccccagaccgctacactcccggacccggagcttcgcccgaccgcgggcagtgcccacctgcagcctccaccggccggggttagcagccaggagctgccagacgcctgacattcttctttctgttcctactttttttccttcttcttctttttttttttttttgtagccctctctgggtgccttatctctttaatcacacctctctttcactttccacggtagtcaggaggcggagatcgctgcttctcacctactttctgaacttggcctccgcagtcgcgacctggcgtgaaggaggagctgccgcccccgccccagcctcggggacgcctctctgaaggtaagggtgggctccgctgccacccgcatcccctccccaccccccagaggaagggaagaccaccatccggggagggattctcaaaacaagatcaattaagagagagagagagatagtgtgtgtgtgaatacgtgtgaataattgatgagacagcatcctgtctttctctgaaagtatagttttagaaattaagacatccccaattattttctggagaggtgagaacgactgaaataaatgataacaatagttgtcattttttaagtgcttactgtgtgcctgacactgtagaaaatttttagatatcttattttcacttaatcctcctaagggccacatgaaataggaactattattatgctttaataaaagggaggaggaattccgtcatttacccaagagtatcc

SEQ ID NO: 37783 - DNA, 1577 bp, Homo sapiens
gattagctcacactcagggctgaatcaggcctagccttggaaagggaggagtgcagaggtggatctagggttcttgcagataatggcccagaaactaccaacatcagcttacttgtaagactgaattcttctgtggcagaactgtggattacaatagtgaagctccgcagcacctgccacatggcaggtgttcagaaatgccatgaatcagcttactaaactttccattctacgtgggaaattagcactcagggagcaaaccaggacacgcgcgcgcgcacacacacacacacacacacacgatgaaaccaaaccgccattgtgcaatgcacaccctttgtccaaaggtagatgggtacaattcactctgatctgcatttttaaacattcaagtcaaccgagagctctagtgaaaatgcacccaattctgtacaagtggggtcatcaacagcggcttctccagcctggtctggtaaaaaagcaaaccacaggcacacacatcatgatgaaaccaaacctacgctgtgcaatgcgcagtttgtcgaaaggcagatgggtaaaattcactctgatctgcattttttaatatttaagtcaaccaagaatcctagtgaaaatgtgcctaaatctgtccaagcggggtcaagagcggcctcccctgcctgttctggtaaaaaggcttgcgtgtccctacctcaccagcagccgcacagcagctgggcttttccaagcttgcccacacccctgttctccgccctgcaaaagctgcacctgccacagcatttaacacctggtcacacctgaggttggtaccagggcttctcaaaaggcagggaagggaagacgttccgcgaacggggtgcaagagaaagcgcgaggggcaataaagcagtgtggccagatgcagactgaagtgggtgatagggcaagaggagagcttgataggtagtgaggcactcaccaggcggactgcgggttcccactccctgggagctccccggaagctccaagaaccgcctgggtccccaggcccgaacacagtcagcacttgctcccagcccccacgctcgcactcaccaagaagcccaccaagtagagacagagcaggaagcggcgggctccgacggcaccggagtcggcagcctccgcctcggttcctgtcttctgctcctgtttccgctctgcggtctccgagaccagcctcggggccgagttcatgtcccagtgacccccaagctccatacccgcgccggccgggggtcggacgcagcagcagccgcggacctaccccgggagcccagccccgccccgagcggaagcaggaggcgcgcgcctgcgcagagagagggggcgggtgctacctggcagctccgcgggtgcgtggccggtgctggctgggagttctggtctcaggcaaggtggggactgggcacatcatcaatacggtaagcacacaccagtttgtgatgataatgatgatgctctttgtttcctctgggtacagaccctgctgcccctatcgttggaggacaggagggaattgtattgagcttcacttcctcctatggagttgtgct

SEQ ID NO: 37784 - DNA, 1539 bp, Homo sapiens
tgacttttattataatttcctttgtggcactgttgcaggaatcaggaggaccagagagacctcagggtaaagcaggaggattttatggagtgcactcagacccagtggattaacatcctgagactgggcccagaacaaagacagctcttgaactttatacacacttcaaaaagggggtgggctagcttgaagcaggctttcagtggcatgaaagcaaagaaacagaggcagaacaaagacagttaatcaaattgtggtaggtatgtaactcaggattacatatgaccattgcggtgcagcccagatggctgttatctgggtttgctctagtgtctagcacgggcttatctcataaccgttgctatggtgcccagatggctgtagttcaggcctgctcaggcttctcatgaccttcattgtgccgcttagataaaacaaaatacttgaagttactagttacagagaacaggaagctataaactcatactaaaaagggaaaggaaaatttgtttttcttctccctttgctgagggagttctccagagtacattcctttgtgtcctagcttcttagatagtgtttacaaggcttttcctgggtctgggctatgcctgttgctgcctctgggataagtcagcctaatacagggaagcttatttctttttctacttaattttatttttctttctttaatttccacctcagcacaactctacattgtttgtgtatgaccatttgtttaccaagagcagggagagctaccctgttgcgtgggatggaatgtgactggtcactcgctcttgaggcttccatgccaaccctgggccagcatattgagctctgcccacaactaggagcaggtgcagcctgggctcaggcttgcggtggctgctttatcgatgccacaaacagaattggacgctgtctgtatttttgggcagatggtgttagggaagggcagagctaaattttctatgaccattgctgggtatgtgcacataggaagactctttggcatcagcagcactgtgtttagacattccgtgcatggcagagggatgctgatatcaggctgtggggtaggagcggtggggcccatggtgttccctttgctgggtcaacaggctcagagcaaggctcagaaggcttggaaggtggatattgcttctccctacacttgggcagagacttcctcaggcaggccaggccacctgtttccaggagagtcagttctgggcaaagtgtagtcattgtcaggacattgaccctcagcctgtgtttcagcaagtgatcacacaactctgcaggacctaaactgctgctgtttgttttaacgtggactcacagagaactcttagatacacaggggttgtcacgcatctcctcctgccccgtggcattggatgtgataggaaagacgcaggaagtgttaggatgggtaggcatggcattctaaacattggcttatatgaagaaaattactgtagagctgaatagtcataatccctgtgcaaagcaacatcaacacagcaatttctg

SEQ ID NO: 37785 - DNA, 1540 bp, Homo sapiens
attagccaactagttccttaaaaactaatttccatcaaaaagaataataaaattatcaatagtcttaaacacatgtttgaaatagcaattctggaaatctcactcttttaagtattatcttcaagatattctaatactttgtgttttgagagctgcaacatctttttctagatgtttcctagaaagaaaagaggtaaaatacacacaatgaagtaggaatgtaatctacaagttttgtattagatattcgagcctcttaatgtattatgattttacttataagggatcaataagtattactcctgttttaccattttcacatgcctttataggcaataacaattatgggtttcctcacatgatcatatttaaatataagcaacttactgtttggggaatcatgtgtattattaagctgaaacaaatgctctcattgaacttaatgaaatctacagtctcaagtgcctggaaaatcattacaaataaggtgaattcaaataagccaaagcacaattattaggtttaattcctaaaataaaattagtccatctaaaagtaataagcgtggtaactctgacataacaacttcttcaccaaacaactcttcctttgtactttaataaaggtagctttttattcctttttgtgcagctttcctattgccttactgtcacttgaaacccgcaacatacgaccttaacttcgtgaactaccacctgcattacaatgtatgactcatcagttttctgatgagtctaaagttcctttgactcaggctttggaagaggatgtggaatgatgaaggcattgatttggaaagagtgcatattaggacaaatctactttgtacttggaaagggttgttcttaaacatctgtgaacaaatttgtgcaaatggaacactcacttctgagtgaaaactactgcatgaaatgctttttatcactgaaactacttagagatctaaggcatcaaattcctttacagttaaattttgtggaattaatttttcaaatggaatttgtattttcttcaatggctctgattttaaagcttctgcagatttatagttcaagatggtgaaatgcatccacatctacacccttctttccaaaatctatgaaaaggatagaaaatcgcatacacacataaatgtgtgtgtgtgtgtgtgtgtagacatgtgtctgcctgtgtctgtatagctatatctatactatacatatgcacatgcaccaaggacacatatacactgccataaatacctatactataatattctgctatatgctataacatagaactactcaaaaaagaaatcttttagcaaaatggaaagtctaaagaatttctaaaaaagcaaatatattcagatttgtcaaaagcacactgctgtgaaatctattgttcaaagctctaatggtaggactattgtttctcagtggatgttgatatggtttgactgtgtccccacccaaatctcatcttgaattgtaactcccacaattcccccgtgagggacccagtgggaggtaatggaatc

SEQ ID NO: 37786 - DNA, 772 bp, Homo sapiens
gatattaccacagagctgtcatgagtatctttacattcctgtttctggagaattaatccataattgccttaaaattataaaagcaattacattgccattaaagtgtctattgatgaaacaacctgtagaaacaataaaaataatatgatccaagaacaatttcttgactgactcaaaaagatatttttcaaaaaattaagaacacaaataagctgattattaactttttcctcaactgagggtaaacataaggctgctgctggtggtgttgcctttttaggttcaaaggtgatcctgtgagcagcgatttccaatgtggataaatacagctgaagagactgatgtgtgacctttactttccaaatcaagtgcgtgtgtaatctgcccacggttaatgcctgcatccatattcaggagagacatcgactccccttggccctggccctgggcctaagtgtttctatgaatactgagccggcaacccacaaaggctttgaaacaagccagctcacagagctgcactcaacttccccagtaaaaacacaatctgtcaacatgctttaaaaaatacttttcattgccttcctcagatcatcatcgtcctggtttggacagcagcatttcaagcaaagtgcttttgttctctttagaatgataatgctctctgcaaatgcttatcaattattgacagcttttgttatattcttagaagtaatgccacaataagcagtgttactaacttatgacatcccttttcattaccaatgattga

SEQ ID NO: 37787 - DNA, 1229 bp, Homo sapiens
aaactccaaataaggaggtggggtagggggctgcaaaaagaaagacaacccacatacagatttcacctcactaacgacttaattggcatcacccctggggtgaaatgttgtaacaccctacaaccctttatgacaggaagtgaaaattccatatccaattggagctacagggataatttagggaggcagaatgcaattatccaattaggaatttagccagaacagaaaggttaatcccccttagtcctttcaaaagagcccatgggatctttaatgacgacaaggggtcaggacctgtgttttacaactcaagccaaaaaattattcagacttctctgttactttctgaaaaacagggaggctcaatctaccaaatttcaaaagaaatattctccaatatcagaacttttcagaatttgcagatttcccgtattatccactctaggttatgaaaccacagtataagttggtttagcttgaaaagcaagtttagtatttggctaacaatgattctgtggcatgggatgctttcctgcacagaagacagagaatggcatggagttggatgctgactcagaggtttggaatgcgccattgatgcctggctgggctccagcttttggcttagaatctgccaacttggcaggctggggaatttgctgtggcaatttttcaaaatgggaagaatcagtccaaggagagattgtttctacattttaactaccaggacaagtgacagggtcctctctaacaaacagtctggcccaagacagaaagagaggttaggctcaaaggagaaccgacagcctatttgcaagaacctcttgtacaagtaatacaccttttgggcattcattccaaagttccagccaaaggaaatatgaattacaaatttcagtctgggaggcacagaacacagacctgccggatgcaacaacaaatggtacttttcaggtcttcctattagacagacagttatgtcatggatatttagaagtgaagcaatttttctttggatgtcagccaatacaggatcattaaacagagctttttggattctcaagtctaatatgtctatagagagggagagaaaaaaaagttttcagttagtaaccaactatagctttgccatattactcttttaattcttcagcctttaattcccttgataaattccaactgacacaaatattttgatgaaacttgtagaatgtcctcaaatattgttt

SEQ ID NO: 37788 - DNA, 940 bp, Homo sapiens
ggaaagatagcccctagtctaagacagaggaacattcagcagttgtgataatgaattgatagcataaaaaaatagtttaccttttacatttttatcctgcatgtgcatttcttacctacttttctctacatttttgtgatttcttctattagaagggcacaggagcacagactttggattgctaccgcattcatctatttcttttaaagacaagaactggaatcatactcctttaagaataataggtgtgcccctacccacatcctaggaaatccacttcacttcttccaacttgtaataaaacaacgatttatgaatattgtctcctttttcggtagacacctcttttccctgctaagggttgcttgaagacagatcaatgttccaatttaattaaagtgaacccccaaggcccagccccagcttttttttttttcatttttattttcagaagtatcgagttcacaagaaagtgattctttcaaaaatggtacgtacgtttccaggaagaaataccagacggagttccgtatgcttgccttccacagagagctcacacttcaaaatgtccagtgatctccgaaaactgagcagaccaagagtgtcagcttaattattgactaaatatcgatgacaatactaacattgacatgtggacaggaggagtaagagatgtgaaaaatacaaagatgacacagaagcctcgttgacccagaactagaccctttcccaactgtgaacaccaggctggaaaatcatagatcattcttagagcagtcatcacttttaaagacaaagttttgatataaaggagaaagaatctctgctctctatgtttagtggttattcaggggttttgacgtgaactctttcaagagagcctcccttttgtaatcaccaggatttgtggtttgcacaaatcttttcaaatcttgtcatc

SEQ ID NO: 37789 - DNA, 592 bp, Homo sapiens
gttagtctggcagagaccatcttgagcctatatctatatggagcctttgtgtgaattaggaaagggcctacagaccttcgtcccgggccagagcctacagcttgggaagtggaattgggcaggatgtcaactcctccctgccccctcagctggaagctcttatagagtcttccacctacacagcactgcatggaaaaccagtcaatattgaaggctgggggaggggaatgagctgaggtatctaaaggcattatgtgagattgtgaaatagatgttggtgtaacatgaattgtgtaaggtgtttccaaatctgcctgtaaacaggtcagatgcagcccatgatgctaggatggtctggaaaaaaaaaagggagcaaagattaacatgattttggttaattttaaagcactgtgaaaaactaaatgaaaaacaaaaaagagagcaatggaacaggatttatcaaaaacctgccttcgtgtccattgcgtagttctgtgagttaacaacgatgacttgaagaatatcatatttctccccctgctgcaaattctacaaaccattcttatccatccccaaacacccaccttggtcg

SEQ ID NO: 37790 - DNA, 1742 bp, Homo sapiens
tgattattataaatatttgatctgcataagcttttttgttgttggaaataaaacaaatggattcctgatgcatgaaggagtattttcaccaattaccttcttttaaaaagttatgtagtttcacacctccttattaccttagatttttgtgtgtaattcacactttatgtatatccttcctggattagaattttcaggtggaggatgaggtgccctgaagtggggggacttacccaagggtgacaccaactgtgcatgtaagagcagagcctgcagggttttgattcttagcccagtattttgccccaaatcatttctagttcattccctgttttatttgtttattgcttaattcttatagaacatggacagaggctaagcagttcacatcagctcactcaaagaagagataaaatcgagttctttccttccttctactttttcccccaggttcttatattctaaaatagctagctttagcaacatgcactgtctttttcccaaggcacattactccttcgcaagtgtaagttttaaaaatagttttgctaagaaagatggatcagatatgccatttgtaaattaagaaactgaggcagagagtgactaagcaattcgttcagggacatcagtgactaagcacaagctcacttggactttggaacttaatttattccagagaagggccaagttccagactatgcaacttacacatgaaaaggcaacccaaacaagactactttcctgaattttaaatagaaatcttaaattgcttgcaagtaagcacaaaattccaagttttactgtgcaaaatcctacagtataggcacacagatggacaaataaaggggaaaatgatgaatagaatgaaaatttaaaactcacctttttttaaacagtattaaaattacattgtaggatgctttgtgcatattgggagctaataaattttttttgtacttgtgcacacatttctgcattaccaatacgtaatcaaggtataatgaaatatgaatattccccttttatgtattttaagttcaatcataattttctttagttgtctggctcatccatgattcttagcaaatgttacctaaacaacagagatctgaacaaaccaatcgtaatgagagtcgacctttgtgtcttacattagagtgcttcaaatatgttgctgtatggtatatttgatcaagatatgtacactgtactacattttacattccacagttttcagttgccaagccaaaatatgggcaacattcgaacaggacagaacacctggatgggactccaagaagtggccccagagagttaaatcccagtgactgctagtaggtgaaagcagacaaacaccaagaagccggtggtaagaaacaacaaaggtccacaaaccacaggctcaccaaggtgagcagagaggaatacaggatgaaagaggaagaccctccacacaaaacaagtctgactttaggccaaatactgttgccctgcagcctttttctctactccctgacagggaagggtcctgtgatcatggtggcgtgtcctggcctagcaggtataatataaaaaggctttgaagctggacacagtatcctaactacagctgcaggtgaaatctaccctggagatgacagattttagtaaagcacttatatccagtcactagaaccaaccacatactagtgtttcttcctagttttctgaagataggggtcacattgtttcttggtttt

SEQ ID NO: 37791 - DNA, 537 bp, Homo sapiens
ttacacactttagacttgaagtccaataggaatcccaattagcctgagaactttgcaattgtgtttctttgctggtctgctaggagacttatcctgttattgagcaatattctctctgagttttgttttttttttttctatcactgatagacatttgtttgtctggcttcagtgacacaggagttcagagtagcagctctggagtcaggttgtttcagttcaaatatcagcttaatcacacaccacctacatgaacctgggaaaattactcaatctctgtttatctcaccttcctcaactataaaatggaaataattattgctgcaagattaaatgagatgacacatacaaagcgctaaaacaccgtaagtggtcattgcatgctagttgtgatattgagaacacaattaggtaacagtcttgacacagaagtttgatagcatagaatttcagtcataaaaaagaaagaaattccgtcacttgtggcaacatggatgaacctgcagaatgttatgttaaatgaaataagtcaggcac

SEQ ID NO: 37792 - DNA, 620 bp, Homo sapiens
ttaactgcctgaaaacttacagaaatgcttgattaaaactagaataaaaatctccagttgccttcagcaaaccacagcacaagggtgggaaaaccagtgccaggttgcagtttaagtatagtcacttggcgcctgctgaaagtactgctcccttcctgtttaataattaattcaactttaaagccccaaggatctggactcagcaccagtttcacaaagcagtacagaaacaaaatgcttccagaactggagggggggatagaggaagaaagaatctaacatttcaagaaacatcaccacatggggccggcaagcagggggtggggtttggaggtggaaagatccagggtggagaaattcaaaataaaataaatacacacaaaagcaaggttattcacggccactggcactaggactgggagcggcatggcgagccggaagtcatccatttgggaggcaggctggtgcctgcaggctagtggggccgagagggtaatgggctcagtctctggaaaaggagacccagccttgctcttcagcagtggcctctgctcattagtcagagcatcgtgctggaaaaggcatccaaggtgggcagtcatccttgctttcgcgctcct

SEQ ID NO: 37793 - DNA, 1527 bp, Homo sapiens
agtaaggcttagtaccaacgcttagggaggggcgtgcaaaaacgagaaaggtagtgtttgaccttaccggtttaaggtttatcctgtgcattatacagttaagaaacaacgcaggagagtgccagggaaccgagaggggcttgacagttgctgcaggagagtcttgacttggaaccagacgaacgtggaaagttagaggaggggaaaacccctactaggataaggcagacaggaatcaaggcttggagcgcatctggggccccggccgccctgcccaggtggaggaagagccggctcgaggtgcagcaagggggctgggaaggaagggctggctaaagcgccacgtggatgtgagtgccaaagagactaggagagcgtggaagtgagtcccgaagagactgagttcaggacgtgaagagaaagaggccgagaaaaacgacccaccagcgatccttcttgaggtcgacaccgagcaggggtggagtcggatacgccccgcggacaccatgcacccaatcagcgacgagctgtcgcggatcgcgggacacgccccctgatccaaaggcccgagaagctcttgcacaggacagcctctggaaccccgcgccattagcgcctgcgccgtctctaggccccgccccctcacccctccggtcctggagctcccacagctaacatggcggcgccctgtgtgtcctacggcggagcagtttcgtaccggcttcttctctggggtaggggtagcctcgcccggaagcaaggcctctggaaaaccgcggcccctgagttgcaaacaaatgtcagatcccaggtaaggcctgggaagactggaagcggcttacctctgccgcgcgaggatgtggagccagcgcggacaccttcccccagcgtctcgcgtgccttcaggcagggactctaggatcttaggtatttagtggaggtctgaggttgggggggaggaggtgggtattggcgtgcagtagccgctctagaggttgttacttgtttttttgcggggtgcagcgaggggaacttacctgaaggtagaagtggagcgacctcctccttcatttggctgctgagctaagtaagggtcggtgcctaggtctgtgttgggtccagtcctaccctgccctgctgtctagggaggaggagggccgcgccagagaagaatgatgggaattggattcctgcaggtgcctggaagacaatggagaaagtcacgttgtgtagaggacagtgactttttgaaagtgccttcaatatgcgcaatttctggcttcttaattttcccgaatccccctctatggaaagatgcaggccagaacttgtacgtttcgtttaatccagggagaagtggggagtcaacagctggatggctgatgatgccagtttactgacatgcgatctcagagcaggaaaaagatttgagagggaagaaacgagtttagtatgggattatgtttttaggcatctgggatttccagtaggtctacggatagtcaagtgtatagctcaggaggagaa

SEQ ID NO: 37794 - DNA, 2145 bp, Homo sapiens
cacacaacgcagtaggatcttccctgcacaccttctcagtgccttaacttgccaccacaatcacacccgcagctgccttccttcctgatagacaaggtgcttgcccatgagcacttcatcagtgattaaactctgctcagacatgttttgaccacagctgcgcgtgcagtccacgtgcagtaaggcctgctgtgtgatctgtgagcccccatttttagcagccaggtaggaggcttcctgagggtcactcaacagtccttgggtagaagccacggcaggtgcagacaaccggacagcttccgtgtttaaggatatcaacacttaacacagggaggcaggcggactaacttgcacctgcacctccagaaggcaatggaaagaaaacaattccacagggatgacagcttccagcccttgacctggtgctaaaaacaggggccaggaagcccagcacagcacttttccctactccccaacacacccctgcctactctccagatcaggacaattcaggcctgagtgtgacccgaatttgagctctcaaatccaaagagctcccagaaacctcaatcacagcgccaaaaccattccataccagggatggaggtgcaagtccttcctggcccttctccccggaaaacccaaatcaaggacgaggtctctcaggtcttcccttgccctaaacacacacgcactcctcacacacaacatacacacttgaccccacacccgtgcacacttcatcccacacacacgtgaacacttatttgctcaccccagcaggctagccggcccccacaagggacagctaccaagtcgcacacccgcacacctgcccccaagtgtatagccacttgctccccccaccccgcgttccagcccccactacacctgccccagcgcacacgcacgggctcgccctccaccccgccccgccgcctaccccccactcctgctccccgccctcctgccccacgcgccccgcgccctgagccccgcaccccgcgccccgccgccctcctcactcaccggcgccggcgcccgccgtcccgcgccgccccgcggcctggggccccgccgccccgctccggcccgcggctcctgggctggcccgaccccgcagccgccgcttcccgtcacgtggggcggccgccaggcgctggcggagggcgggagcgcagccgtctccgcgccgcccgccggcccgcgggccctgccgcctggctccgagcacaggccgagacgggccctgctccgggcctcggcgtccccctccgtgcaccggggccacgacacggcccgcctcgcggggcggccagcgggcggaaggtgttcattcggggggcgctgaggccgccggccccgggcgagagcgtggtccgcgccagctgtgcgagcccgcggggctgaggtctcttctccgcccccgccgctgcggggagcttcagggaagccgggctttgcctggctcgctcgccacccagtttctgtcacctacacaggaggagggcgcccgggaaatacctgctgcgtgaatgaataaatgaatgaaatgcttgggccctgggaaatgcttgggcccgcggccgcctgaccacgcgggctggaggatcggacgtaccgccggtgccccaccaggagacgaaggcatggttgggatgcgcagccctcccacgaggcccatggcgccccagggccctagggattgaccgggacccccgactggcagagtccacctgcttgatacacttatttgagaagggaggcctgggactatcttactccttttaggaaaacccaactgtagctgctattcctttggttcaggccgcaaggaagaattgtaggttaccatgaatccatgaacccctctttagtatacaaagtccactttcatgacggaagaattggaaagctccctccagagttgtcagtactcaattattagcatataaaaagtcaaattttcccagggattttcagactttagaacctgctagtgacctgtggcctcagctttcttccagccactctgagtattgtaaaacaaagatattatcccaaccctgaaggcagataccagattgtacgccatggtcttctgtttcaaagggataaaaaaagaaagaaaagaaactggccaaa

SEQ ID NO: 37795 - DNA, 2091 bp, Homo sapiens
atgcccggttaattttttttttattttttgtagatacggggtcttactatgtggcccaggctggcctggaactcctggactcaagcaatcctcccacctgagcctcccaaaacgccgtgattacaggcataagccaccatacccaagtttaagttttaaatgtgcaaaatatttagggatatgtatctctcccatgaatgatgaaagagaagcagaaaatatttcttagtaagtgaattactgggaattaagactatgattgatacctacagcaatttaaaaagttacttcattgtacctattaatacatgcagaaaaaaatgtacttggattttatgcttgctacttcctcgctcttgagtaaattatcctttctatgcatcagtttcctcatctgaaaaataggcattctagtaatatatacctcattaggctgttctgaggaatgtgataatacacgtaaaatgcagtccctggcacactgtaaatgtctaacaaacgtttggcggctattactggcgtttcccagcccgttattattttttacatgtgagcaagttaattcagaggattacttcaagaaacaaatacttgaatacctatctgtccaagcagccggggttacagggaattcactacataaagcctctggtcttacattatatagaaaggcgatgaagagacaagaaacaggttaaacagaaaaacacgataatttcacacataaccactgccatatttaaagcactgtacaccggccctcggagccagaattctttccctcgaggttgccccaggaatccctttgacctctgccattggacgtcacagaaggcgcgactaatcgtggctggctcccggagcttcactcttccctctcttcctgcgaaacttgacacgccatttgtttctacgtctgacatcctcctcttttctctggtccgtgggagcttttgcaagcgggaccaggccccaacacccgaaccagcagcgagagaaggagcccggcatgcggcgactcagagtgacgacacacgcgagtctccgcccgagtacgtcacttccgcaacgcttccttcgcggggctttgtgggtagccgactggggtctcctggcgacgaccatggcgggggatgtgggcggtcgcagctgcacggactcggaactgctgctgcacccggagctgctgtcccaggagttccttctcctcactctggagcaggttgggcgcgccggatcggagggtgggcgggtgggccttcccaggtgaggcgcttgcacccgagcttgccttaagtagccctcggcaaccacggacactcccgccgggtttgtgtcactctccacccacacagaccaggcagctgtctcctcgctcctgctcctcgccccctctccaaaaatgagacgtccgtagaatatcaggaatgcttgggaaatagggcttatctatctgagtcccgatggcttgtaaagaggagtcccaggcgacaccccctgcctgtgtgtaagccccgacctgaggaagaaagaagcgtggaatagacatggaatgtagaaatcatggactgtcaggactggaaagcatctgagaaaccgtccattccacaccttctaatcgtttaaagatgataaaaacagttccagagagatgaagtgacttgtttaaggtcacaacatctgtaaatggtacttccgggaggagaattcagggctcctggctctccatgtagtgcgtgctcttttccagctggtgtggcctctgataataggagaaaagtgagaaaggaaaaaagtgatgttttaagtgatagagaattactggaagtttccttggggtttatgtagcgtattttgttgtttttcatatggctttccccttagtaccctatctttgttgaatttcaggtcctcttgccacgtagagcttaattatgtcagtaagtttttacctgtggttctcaaactttttaggtacttaagaatgagtcgagggacttgctaaaacacagattgttgggctccgtcctcagtttctcgttcagtagttccggaatgtggcccgaaatcttgcatttttaacgagcttgt

SEQ ID NO: 37796 - DNA, 1331 bp, Homo sapiens
tcaaatcttaaaaaaagggagaatgacagttggtggggagactttttaaatagatgttaccagagagctgtaatagtcagggttttctagaaaaatagaaccaacaagagatgtacatagagagatttatcgcaatgatttagctcacacaattacgaaggtgaaaaagtcccaagacctgcagtcagtaggctggagacccaggagagccgatggtgcaaattgcagtctgaaaagaggagactctatagacccaagaagagccgatgtttcagtgtgagtccaaaggcggaaaggaccaatgtcccagctcaagcagtccggcaggggggcttccctcttactcagtttttttgttctattcaggccttcaactgtttggacaaggcccactcacattatggagagcagcctgctttactcagtctacccattcatatgtcaatctcatccaaaaacaccctcccagacacacccagaacatatgactgaatgtttgggcaccgcatggcccagtcaagttgacacatgaaagtaaccatcacagtagctaaaactgaaatccacaatttaggataacagaggaaattcacttgactcaccccaaagtcaaaatgccagcctagtctccaggaagacacagttctcagccactagagaaagcacacgtgttttgtttcagatggtcatcttgaggaagcgaactcagtataatgcaacttgagatggacacttaataaatgtggctttgatcaaattctcataataaaaccgcacagaagaacccaatgtctaatgtttccattcacccaagctcaaggaactttgtacctcagggcatctgagtcagagagccgcttagcgactcaggcccggtgctgacaaaggaggctgcctgagtcactgaggctgagtaactggccctcggcacaggacaggagtaaactactcctgatatctagtctgtttttttttttttttttttttggcaatattctattgggcgtttttgactgcaatttaaatatctttcagtactggaaatggtttaacacgcaatcttgggtcaaagtatgcatcataaggcctcatagaaatattcaaatgttaaaaaaaataaataaatattcaaatgttcctcccgtggtgcgtttagtggttagaactcaggttctccagttaagctgcctggggtcagatctcagggctaccatttacagcccgggaaaccctgagttaaagttactttgatctctgttttcagtgtctttacctgtaaaaatgaggctatcaaatatgtatacactgtctatgatgtccaggcttcttaa

SEQ ID NO: 37797 - DNA, 2044 bp, Homo sapiens
catggcaggctaataaacaccgtggaaacacaattctgtgtattaactgatgatcttctaaactggggggtgatctaaatccagtaacacttgacaaaattttatataaatgcacaatgaaatgttctttgagtttggttttattaaagtttaattgatagactaggaattcctgtacttctaagacttgatgcaaatggtttttgtttttttgttttttgtttttttttgtctaaaacatcttcaggatagtgcaaaacctcttttctttaatatattattataaaacactcattagtagagtcagcaccaaaaatgtgagatgtattgggagttgtgttttgaagacagttctcctgattctaaacccaaattgtgatttattaccttccaaaatatgtggaagggagtgcgggccttaagttcagtgatgtctaagtacactgctgcttgcaagccagctacacatttcagctaaccggattagcctacttccagttaaaacccgactgaggatatgaaaataaatatgactgattcatttaaaatcagaaaaacactcaatattttcttccctctatttctggtatgctaagatatcacacgagtgcgacttaagaaaaacttagaatcttttcatttaaaataagccatttttgttttaaccgaatggttcagttattaaatgtctacctgagtcaaggagcgaggtcacactgcaaactccacttatttctactaaagggaaatggcccggactcccccgcgcagaccaccgtgccaggacagcccgctcgggagtcgggcctggaagcaggcggacagcgtcacctccccgcagccgccggctgggacccgcggccagcctttacccaggctcgcccggtccctgcccgcatggcggtgccccacctggtgaggacgcgggctgcagtcctccctctggggatgagtcggtgggctcctctgagctccagcgcccccagggtctagacccctcccattgctccgctcccctctccccgtggtctccccacccccaacccccagggttcggctctcctctcccgggtctaccccacagctcaactcctttctcccggcttctccccgcacggttcgggtcccctctcccagtggtcttcccggacccacagctctgctctcctctcaccagtctccccaactccggctctgctcccctctccttgggtctcgcaccggattcggcccccacttccgagccctggtggctaagcccctcggcctccctccggggcgcagggggttggaggtactcacggcaccgcagcgggccggggactcccggacggggctggagggcgcgggcggctggtggctgcggctccgctgccggccgagtggagcgctgcgcagctcccgccctcgagaaaccccgccgtgtcatttgaccatataaggagatgcacgcctcggctcgctggcaccgggcgtggggcgcggggggcgggcgcccccaggcctcgcggttgccgtgcccccgccccgggctgcggcggtcccggcccgtaccctttgtttgccagggctcctttcttcgtgccctccgggtcttgggagcacagtagttatcgggagcgtcgcctccggcgtgggctctcgggcgcgagtttcggacgaggcctgggcgcggtggcaggggtctgcccacgccgggatctctgcctggtcccaggagcgggagactggagaagccccaggacgtgccgggggaggcggagggaggagggggtcacttctcaggaggcatgtgcctgggatatatttgcaaggtggacgtttttccttcttaccctgcagatgcttctttacgaaatgaacaccacagatgaccataaagaatccttcgttccactacggaggggactaaaggaaggtcctatccccacctctccctctcggggccagaagactagttagacatcttggattcccctccagggcgggaaaaccaaagtgagctgggagcgtgcctcccacattccaagcccgggccctctgc

SEQ ID NO: 37798 - DNA, 1779 bp, Homo sapiens
ttatcctgacattccttcttgagacaacactgcccataacgttttcccgtctctcctgtaggtgggcttcagggagaggcacagctaggaagggaggaaagagaggaaaagacttcctgcggctagcaggtctcaaagccttgtcccagagtgcagcaggatcccctgcaaacctgttagaagtgcacattctcaggccagctcctgctttaacacgccctccaggtgattctgatgactaaaggtgatttgaagtaaaataaataccacttagggcttccaactctggactcggtaatttaccagaaacctacgaaatgtcagtttagggcgtgggggagggacagggaaatagagatagactaaacatagactagactcaggaactctaaaatccagttggaagtattacttcctctgtcagttacttcactcagggaagcaggaggtagaagtttgagccaggaggtagaagtttcagccagtgggtctgagctgtacaaatgctgaaatttcattctctgggagaggccaaagaaaggcagggcttctaggcgtgtgctcgcaactgccaccctgtggtggggtcgtgggggggaggctggtgggctagacccatctgtgcaggggccaacagtagcctcctacccggatgggggctaccccagggggattaggatgagctcaccattaccaggtagaaagtgaacacaggaaaacatgagctggaggtcagaccgccctatgttcgttaccctaactgaccactgccatcaagattgttaagcattttgtcaccgttaaaggatttcacacaagctgttcctcccactcaaaccttggccaggaaactggtggatgatttgcccttgattcagaggcaatcattcttaattgcctcacatggttggaaggtgagtaagtgtctaagatcataaatgctggcgggaaggggtcaggagtgatcaaaccagcacccctcctggcagtggggtcaggaggcaagtccctgcatgccttcccatgacacagtaccagatcccagggtggtggcacagaaagctggattcgctttttctggaaacactatttgcccggatccagcagggaagtctatgaaagatgactctacgggcagggtatgcacctgcctgtgcccgtgagctgggtgcagttgtgacgggagacccaagggcctccagcaaacaggaggaacttgatctggttacaggaacgatcttgcaggatccaaactttgtttctctgcctgtcagactttcaggaaaagctcagctttccacaaagggcaagctcttttccttttcttctcccttctgccatgctctggttaggagggaaaatgattggctctttcttgagatacacaatttccatatcccatttcttccctctctcctttttcacaaactatttgttggatataaataatcagtgtttaaagcctcaaaacatgcctgacttttagccaaatccacaaacaactccatgattccgagtttcccatccttggttagagtttatttggagcgtcggatacagtttccactgtggctttgatacctctttaagaaagactctgtttggtacattaatgaccaatagaatgaaactattcacacccatagttcatttgggccagtaaatgttgctggatggtttcagatgaaaagtatttgtaaggtagactctgaaaaactttgcttcttatttgagatctctttgtctctgatttcagtccttttcaggagcaatccattc

SEQ ID NO: 37799 - DNA, 1530 bp, Homo sapiens
atttttgtgccataaaggcattaacataattaacagcttggtgccagtttaaatatgcgtatgtgcttaggatcaatgctaccattttgatcattgtttgagagaatcccatttctgatgtgttagtaaataatatgatattattgttcacatgcccatctaggctctttgtcccagaaagaggatgcgaaggggtgatataaaatccaccttggagccatctcagggctggttgttcttgattcctctgaagacctggagctgcctgtgtgaatcagactggaaaaacacgtggctgcacttttccatgaagtaggtaacaaagccacagttcatgcctgggaaacttgccctagcatctccgccaggagagcaagccgactcatgcctggactcccacacgagggccagtgccaagtacgctggaatgaagggacactgccaaggatcaggaataccaggagctcagcccacttaccaggctgagctggggatgctgagattactgtgcacactcaggcagagctggaagctgagtctgccatccagaaggctggacccagacagagttcagggatcacaccagaatcgggacacaggagaagtttgctaacctaggtccaacccagaatcagattcagattcagagcaggaggtcagcaggacagctttgtcccccaaaaggaatcaggcggaggccggagaggcagcttgccagctaggagaacacctgagcagtcttaaacccaggcaggttactggcagttgcttcaccttctagtggcctcacttgcacaccagctttccccaagcagataaccccacatagctgcaaaatgaattattttctcttgtctgcttctagagggtccatgaccattctattggcagttggagaggtgagagttaaactgaatgtgagcctgtgtcaggggccatgacccattttaatggagggtctctaacagcaccagtctctcggtagatatcactcgaatggtgctaagctacctactagcagatttagcagggtgatgccttttgaagtctaaagttttgactgctaatctctgggaaacatgtcacatcgtatgctattatttggtggtggtgtccaaaaccaacacattggtctttctcagacgagaaggattcttggcacaggcaagcagagggaagtgtgtggtatgtgcgtcttcctgtatcagcttgtgtttctcttatgctggagacctgaggtgtccacactggtggaaaaaaaatgctgccagatttaaggtgaggagcaatggcatgagtaatcctttcagatagaagttagcagtgctggaccttggaggttgcagttacagctgccaacattcgaaaatggacttagttattttaggaagccaagtgctgcacatagagccaacctcagttgagatgccttgggaccagtacatagaaggtgtttaagattctacagttccatttcatcctttacaaaatgtccaccctgaatctacagcttgcttattgaatctttgt

SEQ ID NO: 37800 - DNA, 599 bp, Homo sapiens
taggagaaaacggggctccatccacaccatgagaatggggcactggggttgtacagagccagtggtggcccagtgtccctgtcctatactggatccagctcatgagacagatgcagtttatggtcagactccatgtggtccagtgctcccttgataaagaaggtaatccaatgggaagaaagtgaactgtccctggtcccatcgtcactgggttctctctggcttgtaaggacagccagtttcacatggaatgtctgggacagagtccacacaaatttgatttggtgtcagtgatctggggctttgtggcaatgttctgccctgcttgaggttacaggccaaagttcaaagaccagcaacccaaaagcctggtcactggagtgtagatgctgggtggagtattcacaagcacgctacagaaggcccaatgcctgaagttaagaccataagctcaactctcctgatcaaaaagacaaacactattctcttaacacaaatgctgtctctaggacaaatgctatcaggatgatgaaaatcaattttctgcccattttttgttgttgttgttgttgtgacagatctctggcaacaaaatgctc

SEQ ID NO: 37801 - DNA, 2115 bp, Homo sapiens
caaagtagtactttcttgcatttatctaagcacacctgttttatacttttggtaagaggtgctcttcgggtttgagcttgagccctggttcacctggaacatcctattcaaccatcgccttctccaggcttttgtgtctcttgacaaaaaattctcaactgtattctgactttccgtggcaacatcttagttacctaacttcagtcccactgagtcttcttaaaattgtggcaaccagaacttcccaaagagaaaacgagtgatgattggtgcagggataacattcaaagaattttactgatgggatgctggccaatcggaatggaggtgggcacagaggcctcctgctgtgcaggtaccggggtaaccatcaggttgctggaacaggcagcagtccagtagagtgtggggtgacttaggcatcttcatgccatagtggggccgcctgggggagcttgtgaggctgctattaccaaggaataaggaagtatttcaacattttaataaccagagggcaagccttggttttgtgcttggataatgctgtctctttccatcattgtactgccatcaggcttgcatttcaaagaggagaactgatttctaattccagtttctcactgagtactcatgagaactctggccaagtaaaactagggtttggggcgcagcagagagttgggtcaaatggctcccagcaacatgagtcattagttccagactttgaacttcttcctctaactatagtcactgatttacacacacaacacagatgcttcaagtgccaacagccaataacctataacccgaatgacattaggctgggactgaaagaagtcaggcagcaggcaggcaagccttttaaagaaaactgaatccaagatcaacaaccccggaactatgtgccattggatctccagcaacactgaggattaggggttggacaaaagaaatttttattaaaaaatgtttatcttaattggctattcctgtactttgtgtcagaatttcctgttttgttgtttacttcctttttaaattgtaaacctccacttgcattctcctaccctcagatagcaatcatcaggatcagtcattctcttcctatattttcatttcttccagtttctagctagggtgtttgtgtttagggcagtgccatggacacacaacatgagaggcaggaaagccagtaatcaacgcgttcaggaaacaaatgccaataaagaagcattaacgtgaatgatttgcctttgagtcagtgaacaaataccatcccctccagcctttgcctctcctgtcttttctactgattgcatcagagagcagagacctggctgttggccataccacaaaagacagctggttacaggacaagcatccttctgaggttaccaagtcaaagccacctgggaatagtcctgggtccctagtcacacactgaaattcctcttgcttaagtctggagtaactgtggtaaaagctgtgctttaaagttggttttgggtcctggagtggaaagcttgtcggattcagggaatccgacaagcttcacctccccaaaacacacctcctaatatcagcacattggggcttgggattttacagttggttttgggatgagagtggaaagcttgttggattcagggatatgtgggaataaagaaagtcccgtgtgcctctatgtgcatgtctgtgtgcatgagtgcatgcgtgtgtgcgtgtgtctacttgcagagtacctagggatgtgaattaggtgtgaaccctttcctaagtgtgttgttggcacacacaaaagggagcatattgaccaggatcaaacctagcagccaagtgatcatggtaggaaagtatattcctggagcatccccagaatcttctgactgggctgaactgaagacactctatcatgtgtagtgcagagataaattgtgggggaataaaccagatggtgatctgaattattaagtaatggaaaaggttggtttcaggtttttgagctcacagtgacacccacccatttggagaaaatgcacatcaagagagcctcagactcaacagaatcctttagagattttctcaaggtcttcgtctgtgataatacatctttcc

SEQ ID NO: 37802 - DNA, 878 bp, Homo sapiens
gttttgatatacctgggcatatccagatgaagacagttaaacccagaatgtcattaactctgtgttctttatgtggataatgaacttcctcttacgcccatcagtgggctctgaagggtcattgattgtaaactcctttggcttaagaaattctagtcttgactccagaactaatgtgcaggtctgaaaagaatgtgtgcattggccgatgtccctgagaaagccaaacaagcaaacagaaactaatcaggaatatctgcagctttcagtgatcatgttctcttcttcataaattgagatatttatggaaagtcagcttttctaagtaagctgttttcagtaacattccagaagcaagaaactcaaggtctgttttgcttaatggagaagaaaaatgtaggagggagagggaaaggggaaagaagtggggcaaacaacagagcaaaaggctgatgcacgtaactgggtttggaagagctagagttccacgtcagatgtctggaaaccttggctagcactgctggggccaaggcctctgaccctggtatgattttccagcggccttatcatctgaattggccagactgaacttaggttctcctccagggctgcccgtctgcagctgggggcttggatcccactgcaccctttttctgtggttctgtttgtccccttcagtgtctctccactatttcctcttgtcttaagtggtccatgtcacacactcatgcactcacctggctgttggcacatgagtttgcaacctctggaccctctcttaaaggttgtagattcagtagtgaaagtttcttaccaggttccaaagggatgcaaaaattgggacaggaaggtacctgcccccaatatgtcccatcaat

SEQ ID NO: 37803 - DNA, 875 bp, Homo sapiens
gtcccctggccttgtgtagtgtggcagccctaccacccataatttccttgttgtcttctccccagttctttctgttctacagatcctgatagagtgatctggtaggtaggaacagaggccttcaagatatggggaatttgaattaaaaggaactcccttattccttccctctgccctatttcaagtgtttttgtcacccagaccatctctttgctttccctttaaatatttccttttaaatcttttaaaatccctaatatcactttgatctaagatgttattgatcttgttgtaggaagtctgagaacactctaagggctattgacaaaagtgagttctcaccttggccacacttattcccctaatctcatcctcttctctctctctacctgagaaagataaaaaatgtggaagcgattcactgtcaagagagactgcctgggattctaacagcagagtggcatcaatattaattgaaagctccttcagctggaagggatctgagaggtcatctatgaccctttacccagtgagaggaatccaattcttcttgattatgtttgtgactaaacactcatcatctcaccggatagttcagtccattgttgactttgtcttatcgtttgatactctttgagccaaaattatactgaaccagaatcaactggctttctggctggaagtccctaccatgtgtcgagcaaagcactggcagctggggacacagaggtaaattaaagatacatgctgcctcccacgaggtcacagccagtgactgttccacaaagggacaaccacaatgaaataggcagaacatgaggagagtacccagcaaagcctcaaattcagctgaaagttctgcaggtgactgaact

SEQ ID NO: 37804 - DNA, 989 bp, Homo sapiens
ttatagtttaacatcctcattgacttcagccatgtcctgtagcacatgaatttttttttattacgagggttttccctatctaacattctcttggaaatgttaaaccccaactgagcccagtattcccaacggggcagtgtgcagagaaccattatttcccattgccttggtgttctagtcatgtggccaatgagtagattcctgtattttggaggtcattgtttgatggttaaaacttaaccccctcctgcccaaatgttttctggataaacagctacaaagccagggactctacttatttttttcaattaaagcagcttagaatgacccacttatgtgccttctgcttggcacttgtgctgcattactgtggcctgcagttcaccttgccaatgtcaatacttctctgaatgaaatcaaattgccttgcaacttggaacttggacccacctgttctccttactttcaccgtcatcatggagacctttgcatctgagtcataggtctcatgtcttcctggaagacatcagaataattttacacaacatataatggaaagggacaattccatgctttacttctcaactcctattcccagagacaataacttcaaattcttttatctgcttcttctaaaccaggtagtacaaacaagttatttgataaaatggaacacttagctccatttatcaagtaagttgtttatactactatttcttgcttttaacatttttcatatgtttcttgattttaaaatgttatttagctcttaccgtcttgttcttgtgggaaataaggtattgattaatttaaacctcactatcttcctcacgctctcctctttcttttgccttcccatgctttcaatatggcgttagcaaacatttttgtgaaatcagtgtatggtgattatcattatgactctgtgaatattatacacactgagccttggttctgtttttgttttgccatgactctatttcctttct

SEQ ID NO: 37805 - DNA, 795 bp, Homo sapiens
ggcaatttcaaatagaggccttgtctgttttgagggctaagatccaactttgcattattaacatatatttatgtgtgtgtgtatatgtgtacatatatgtacgtgtatatatgtgtattatgtatgtatgtatatttttctctgataacttaatgctgcctttgagggcacaggccccagctccctggtatttgtgctacagaactctggcaggcacccagggacttggctggccagaggaccaggagcatgtgggaccagtgcctggggctcccagccaggttttcagcccttgccatgctgccttctatactgaccccttgccctttgcagaatgcctgtgggtttgagaacgtcccaggggacttgctgttagccgcttccagctggtgacatctaaaggcttggaggccatggctccataggcagcatgcccagaacacttaccaacaagagtgcacccagaggctgcagtttcggctctagatggggtcctcttgtcctgccatgcccatgtgtcccaagcaggcatgtgagggaaaagagagtcagaatcccttctgcactgatgggctctcaagaggtattatatgtacttgcatagagagggccagtggggatttagaatcagccaaacagaactgggtttgaaccccagccccctgatgacacatgtgtgacctggtgaggtggcctggcctctctggaccatagtcctcacaggaaacatgtttgcacctgcattggacctgcttcccggggtgctggccggccaggggctcagcctaggtgttc

SEQ ID NO: 37806 - DNA, 2189 bp, Homo sapiens
ttttgctggagtgtggtggctggagtgtcgtggagtgtggctggagtatggtggctcaatcacagtttactgaagccttgacctcccaggcttaattgatcctcccacctcagccttccaagtagctaggacttcaggtgcacaccaccataccagctcatttttatgtattttgtagagatggtgtttcaccaagttgcccaggctgctctccaactcctgggctcaagtgattcacccacctcaacctcccaaagtggtgggattataggcatgagccaccatgtccagcccagcatctgcctctaataagcaccccacccccctgggggttccagtggccaccaagtgtgaaaggccctggagagatgattcccctgtcaagggggagcagtgagtcatctgctgttcactgcatttgggtaccaagcagagcagatgggaatggcagggagtgcaacacaggtagtgtgatacaaatgctggccagacagtattttgatcccaaagaattttagctcatttaagattgcattgcgagtttcacacgggtaagagtgttaacgctgatctaaattttaatttagccaattttcctcctcctccttccccaccccagctgtcacttcctgcagcgagttacctcaggcatctggcatttattgaatagataccaccttccatgtttgaggaatgccagtttcatcagcaaacactctcctgtggtcttttcctgtgtgtactcatgctggaatttctggacacagattttgcttttgttcatgcacagagcttaagagggatccctagccaaggagacaatgcatagggactactgatagagccatcagattcctgctgttcgttgacattctcttgagcatcagaaacaataagatagagaagttcaaatgtttgaacaagattcagaggcaatttttagtgggtcagatgtcaacagtggtaaaagagatgaatatggggtcttgatatttcaaaaccatacagacctgaggaggtctttacagaaatgcactgaaatttaacaccttccagcagagcaggagctgactttgacatcctgacatgcctctgttgaatgattcaaggtattgactcacccatgctgcttgagcaaagtggccagatgtgagctggcgaggtgcttggcagagaccgtaaatgatgaaattggaaggaaagcattttctggggtcactccgtagggctggggctcaacagaacagaggagaggacctttggatacacaatacttgtcctgacaatcctgctgcaaagctagcttccaggaatgctttatttcagttgtgccatgtgtttgcaatgtcactgtgagtctaatagtcaaacaggaagggtgaaaatagctgtgttacagtcacagtgaattaagatctttgcatgtgcctagtcaacagggctgactcagcagaggctacttgtatatttaggaactgggtgtcctttgatagggactttcacatccacaaagacagaggtaatatgaacggatgggcattcgcaggagggtagcatggtgcagtagggagagcccgggcagcctctccaaaacctgtctctcctggttatagactgtgccatgtcagggtccaagcacctcaccagctcacatctggccattttgctcaagtctccctgatttcttcctcactgttagagggggatgttcacctccattctcacctcctcggactgtcaggtaaatagacacaaggtgccgaggctcccagcttgcattctgtaactatcagttgtcatcatacaaacattcagcccggttatttgagaaccaggtgagtgttaagcatctctgatatcaacaaaatcttttacaaaccacctcagggtatggatttcttgtatcaataacacgtcaaatagtatataatattccaacgataagaagggaaattaatatttactgtgagcataatgggtcaggcacacctgtgttccaaatgctcaaagtccttgcacacatgcacaagcccgatgacagtttgtattacccctagttttaaaataaagacacagagggccaaatattaagaaatgtgtcttgggtcacagagggcaagaatttgaagccaggacgactcatcctagacaccctggagttctgtcacactccctttgacatgttctca

SEQ ID NO: 37807 - DNA, 921 bp, Homo sapiens
cgccgccgccgccgccgccgccgccgctgccgcggggatcgtcaggccggagccgcgcggccgagcgggcggcgggcggaggggagggcttggcggccgggaggctcgcggcgcccgggccggcagggtccgcccgggccggcagcgtccgcccggcggcgggaggagggagcggcgcagacaaagagcggcgcctgggcgggcgcagcgcggccaccgccccgggacccgcgccgctgccctccggctccgcgggcggcccacggcgaggtaagcgcggctaggcgggcgtggggcgggggccacaaacttggggccgttgggcggagttgggagcgcggcggggctcgcgggccggggtgcgcccgggaaggggccaggagagcgggtcccctccgcgcccctccggtgctctcggccctgccgcggcctgggcgcccccgaccgcggactgccgggcacctcccggctctgcaccttcctgcccgccttcccatccctaacccccaccatcgggggccggcccaggggcggggacgccagccaagggcgcgggcgaggatcagggcagggggcccggctgcggggcccggggactggagacccccgggtgcgcaggctgcgcctggcctgcaggcgggcggccggcacggagctcggggctagcgtgggaccgtgcggtggccagggtcgccagggcgcgtgtgccggggaagaatagccgcggatcgcagggccccggcgcagggacgggggaggccgcgatcggccgggagaacttaaccgtgtttattacaactatttatgttcgcgcacaaagctgctgtcacattgcataaaggaggtcctcgcttcggcgaagggagcttttgtgcccggcttcaggctctgcgccctgccccagatttacaggactctaac

SEQ ID NO: 37808 - DNA, 711 bp, Homo sapiens
taggagaagagctgttctcaaccatcttgatttccagcccacagattcgagagaaaatctgatgggctgagcttagggagttacttattcgtagcacaaacaactgcggccataagaagtggtgtttcagtttacagagcagtaactgtgtcaaagggtggtaaagagaaaaggcatttcgcagaaaattaggaactgtgcagagtaaatattcaatacaaaatagtaataggattggaatttgtcagcaggtagctggttcccagtgggtttccagccaatagaaatgggctcccagagccctgggtgattgagcaaactacagaaatttaaaaatcaatatatgcaagggccaagttgctgcttgggaaactgacaaatctgagggccagatcattcagtgtcacttccaacacacttctggtttttcccagactgcagaggctgagcaggtgaaaaatctcattccttagagtcatcagaaactaaagttctagacatcatctagggccctcttcctggtgcaaatgggagagatttaatttgcaagcagtcaggtggccagaaaggcagggctgagatgtctgctcacttgtgtggggagagcagaggtgggtggttctgaagccagcggatgtgggggctgtttgctgattctgcaggcagcttcctggttggaaatgtggccaggttctgctagatagctttgag

SEQ ID NO: 37809 - DNA, 1129 bp, Homo sapiens
ttgattcaagctgcagaatgtgattctgtggctgatccaaagattttatgaacagtgagtaaggcaaggaggaaggggagaggggaaagagcgggaagggaagggtgggtgaggaagaaggcaggggtgctggggagctgcgggagcttgcgcttccttttctggcatctactgttctctcagatcaagtacagttgtgtaaacagatctgtgcctggaatgtaaggaaggagggaggggagccaagtaagtcagagactgctggaaaacaggaagaacttgcctgaaatagactagctcgtgccttcaggatgggactcctggagaagccatcaggcctgtgaatcaggcacagcacagtagaagcactacctggcattgtgctgtccaggcctggggtggcactgtccctgtccgggcccctgtactaagtagtcgagtattaatgggctggcagagcaactagccaagcagaggcccccgtggcttaggggctcatctttactcagcgagatgagtgtgggactggcggggactgtcccttccagtccccactcgtcttcccctcccactccacccccagccagctgctctcagcatcagggtgttgaaaacttgcatcacactacatggaacgttgtaattgtgaaatagttcatgagagatggaaggtggacttttacctttgaatctttgttcataaacaaatggtgctgtacccagtgggaattccacaccatctcccaatgcatcccatcagtaacaggtttttgcctctttacctgcgtttctcttaactgtgattattatttttttgagatagggtctcactctgtcacccaggctacagtgcaatggcatgatctcagctcactgtaacctctgcctcctgggctcaagcaatactcctgcctgagcctcctaagtagctaggatgacaggtatgtgccagcacgccccactaatttttgtatttttttttgtagagacagggtttcaccatgttgtccagggtggtctgaaactcctgggctcaagcaatccacccgcctcagtctcccaaagtgctgggattacaggcgtgagtcaccatgcttggcctaattattttaatgaagtattaaaaaat

SEQ ID NO: 37810 - DNA, 1059 bp, Homo sapiens
ttgtgtcatttcaaggatgatacacaaatggaacacggcctcttaggactgaattttttcatggagcatatttccctcaaaatctatccaagctgcagtgtgtatcaaagttccttcctaatctattgctgtgtagaattcccggggatatatgtatgcactgccgttaatcattcacctatgataggacattctggttgcttctcatttttgacctctacaagtaaagctgctatgaacattcacacaggttttcatgtgaacataaattttcatttctctgggagaaatgcccaagaatacaattactgagtcttacagtagatgcatacttagttttttaagaaagcgtcaaactgttttccagagtaactatacattttatattcccccctacctgagttctttctagtttatagttttctctgaactttggtcacaaacacacatcacaaatgcaatgtgttatatttcaaaaacaactgagtttaaagattttgaaactaagactatttctgtagcactttcatggaatgactcacgcaggatctacagagacaactgtcagggagtgaagccaagggagctatcctgctgctgtagtgtctgggggttacgaaaaactttcatcagagaaagaactctagcacagggtctgggaggtgggcaagttacatagaggaaagggcctcaccaggaaaaagccaggcaaagttcatggcatcttgtctcaagtgcaagatggctaatgacagcgcctctcggttcagaatacaaagtccaatttgggtttctttccagcctaccaatggtctccctttgccttttgtatctctcctggaagactctttaccattcctgcaaggcctccacattcaatctcagtcatagctcaagccctagctcgagtcatttttgcctttaactctaacagcactttgctgaggcctctctttgggagactttcctttcctactaggtatcatcgacgcttgtgcccgttcagcagcccccaacccccatagggcaccaagtgcagaagagcctgagggtaacccc

SEQ ID NO: 37811 - DNA, 2314 bp, Homo sapiens
gttcgaagacctgggttctagctcctgctcccaggcctttctgggttcaaattttggccctccttctcttactatctgtgtgatcatccataaatttcctaatctctcttggccttaacttcctcacctctaaaataggaatcattatagtaccgatttcccagggttgctcaatgattgagacaatggcactaagaatcatgactcacacagttaagcactcaacaaatgtaggtagtattactgccataataatagttattcaactttaaatggtctttcctcttgggtctcagctttcttactcaagattgaccacacacacactttagactagttcttcctcccttgcaaaactacacacatctaacacccatccgacgcctgaaacctcccctagcaacccggagtcctgctggggttttccagctccacctcctgaacagctgggctgtagcacacaggctggatctactcatacttgccttcctagagctcaactgaagtcacttcagacaagtgaagtacccactcacctctggaatcagatcttggtaacgccaacaggttagcaggtgatttcatttcagtgtgtgtctgggtggctagcattcaaacgcagctcacactgggagctatttctagtccaattttgctacttggtaacgtattaatagcatcaattaaaacattcccaacgaatagatctttaaaaggacggtttctgacttccctaacaagcagagggccgaccacctgcctgcgaagtgcccctcctgccctgtctccaggcagcatgctgtgagcgatgacagaaactggacccgcgcacagagaagctgcaggcacgccctgcccggccacccagctgcctgcctgcttcgcccggccgccgagccccgggggaaaacctagaatggggatgccggtgcgccccgacacctgggcacggccgcgggccggggagccgcccacacttggctccccaagagttaaacgctgagtaattttcctgaggagcaaacagtcggagcgggggctctgccaatggccacagtatttttatccgacttaaccgacaccgcggcgcgacctcggctgtccccaagggtatccccacgcggcacgctccggagtccccgaccgggaccctcgccggctcccagcgcgacatggacgacagcgccgccgccgagtcccccgcgcccgggcaggaggcagagacctggggccgcccgaggactgctaggggcccctccgcccggggtccgcgcccgggcctaagcggtagggggtgtgcgcccaagttggcccgctttgctgcaagagtggaaaggggtgggagcagaaagcgccggccccgcccggggcggggagcaacgcggggctgcagggccgcctcggggccccgaaccaccgccgcccggcccaccgcggcgccggggaatgaatggggctccccagctggcagcgggcgcgcactcacaggcgacgtaggccagcaaggcgatgcccagcagcagcttcatcctcctgcggttgacggcagacacgaggcgcagcagcgccttgctcaccatccccgggagccgcgcgggtccagggccctaccgcgcgggggcccgcctgctgcacaatgcgcggcggcggcggcggcagcggccccgagagccccgcctcctgccgccgcgcgcccccgcccccgcgcgcctgcttcctgctggcgggatcaccgcgcaggcgcgcctccacccccttcctccggctccgcccccgcccctccggcttctctacccgcaggcgcagttgccgcctttcttgccttggttttcgaagaatgtgacctggagggctggtgggcggtgcggcgcgccgcggcgcatgcgcgttccggtctgttttccctgagttaaagcgcgcgggtgccagccgggaggtgcggctggattcgtttcgctgaggtgcgtccccaacccaagggcacgactgcagtggccagtttccgagccccgcccggaggggggcacgcggtgggcattccggtgttgcagtgaaacgaaacttatttgctaaacttggccgagccttagaagttgaatgcctgcctcagaaagttgcctcgttctctgggctgtttagttggctttttttagttagaatatcggcagcgaaaatgataaatcccctaaaccttgccgaagtaaaaactggctgcgttttttttccttggctatgatcaactggggtgcctttgttttaataatagtcttttattattattttaaaaagcagtgctaagtatattaatttagga

SEQ ID NO: 37812 - DNA, 1633 bp, Homo sapiens
cccagctactggggaggctgaggcaggagaatcgcttgagcttgggaggcggaggttgcagtgagtcgagatcgcaccagtgcactccagcctgggcgagagagtgagactgtcttggaaaaaaaaaaagtataagtttttgcttccaataacatttgggggaaactaaaagcgttattaaactttaaaccacatgaaagaagaatatgaaatagtctccgctcagagtgaaaatgatgagtaactgttggtagacaataccagtaaagacacagtgaattggcaaaaacggacccctaagcgacggtgccctgaggagtcacggaagttcgggtgaagagtgcggggcctgggcaggaagttcctgggagtggtttgaacaaacggtcctgcaaggtcagccagacggggagcgtgcttcagggagacagcgagttcagcgctcggtggagcagcaccgtcggccaggtgcatggtcactgaacagaggagcccaggcccacagccaacaggaacacgggaagtgactggcccatgtactagaagtcgtatttactctgtgtccgtcaacccgcgccagctgtcagctcacggctctcggccgcctttgggtggagggagggcgttgccagagcagcatcataaagtacataggtctgcccacgtcgggacgcgtgggtccgcgtctgcaggttcctatcgctccccgttttctgaatattgggagatattccacaccctggtcacactccctaacccagctcgctccaggcgtcccacgctcagcgttcagggtcacctccctgcaccctggccggccccgccccaccaaaccacgcccacctaccgaacccaccccccaccgaaccaagcctggcggatcctgcttcatcaaaccacgtccactcggtggctcctaactgggccaaagcccgctgcccctccgcaccagctggggtcctacttctccatcaggctcattacgcacttcagttttctttccctaacatgttataagcactttaagggcggagccagtgcctgtgggatactttcaatatcccttgaagaaatgaatgacataattgccccttcccaatcctgatcaccccaaagatggggccagctgtcctcactgaggccaggagactctcaggaatgtgagtcctgctaacccttaaagggacacttacagagcaagagtagcaacagtgagaagagggtggggtgtcccgtcacagcccttagcacatgtccgcagagcaaagctaggtggctcccagccctcggggcagcaacacaggcccgcacctccactgccacagctatgctctcagctgttggtgaaaacttccctggcaccactcgggacctgggcccctccgcaagcactgcgttgtagtgaccatggtttttcctgtgcctgtggttcctgtgtgtgtccctgtcactctcggtctctgcagccacccacaccctttgcagcctttaagtctctgcgagttggggagcagagcccatctcctttcctgggtggggagacctcagtgcacacagcacacacccaagtctgtcggggatcagggctggcacagactcaccggtggtcaggccttcccaccttccctcctta

SEQ ID NO: 37813 - DNA, 733 bp, Homo sapiens
ttattattatcagtttaaatattttccatttgtagttggttgaatccagggctgactgtgtaattgtaagatctttatattacaagcaaagtaacatcatattattcaaagataaactgtgattattaaaggtgtacactgtaaacactagggcaaccaccaaaattttggaaaaactgttatgtcctttcatcttggccactgacatgccatccagacggaggaagatttggaatctttggggccacatgagtctcttgctgcatcgacaaacactgaaattacctggggggccaggatcctgctgggatcatgcatcaccacaagatcaacttccacaaataacacccaggttcctttgggaaagttggtatgcggcattaccacttgaagtggaaccagagctttgcccgaacgactgccctactgtaaactttgataaattgtggaccttggtcagtgagcagacatgggtaaatgctgccaaaaccaagacaggaattggtcccatcattgatgtggtgtggccaggcttctacaaagttccaggtaagggaaaactgctaaagcagcctgtcatcatgaaggtcaaatgcttcagcagaattgctgaggagaagattaggggtgtgagtgtggtgggccttgtagcttgaagccacatggaaggagagtcattaaatgctaacaaatgcttttcaaataaaaaaacagatatgaataatgactccat

SEQ ID NO: 37814 - DNA, 627 bp, Homo sapiens
aactgtaaactaagttatcgatacagtgtaggtttttttctgcacataaacacgatgtacatgatttcaagctagctcaaatttatgaaaactcccagacagcatgagaaataagaaggaagcaagagagcaacacttccccttgcttgctgccctgtgggtcattgctcgctaacgtccaaggtcaaagcccttggccgaggggcactgctggcagcctctgggctggctgacagaaaaatacactaccacttttcatcttggtgagtggtctggcgacctagggtcaaaaccgcagctaaagagatctgctgacaaaaaggcagagtggaaattatctagatgaatccaaccagctgttagaaaaacagaacaaccctgctctgaaggtgacagcagaggccagccaggcgtctgtctttttcctcggactggggccagctttaaatgcagccaaatcaatccattgtacaacggtgaaccagccagtccatggtgcctctggttatctctaggatcatctcgtatgttggtagctggggagattgtggcaccccataataaccaggcagcctgctctcttacacaggtgcatagtggatgctgctgctcagaggctttcgggag

SEQ ID NO: 37815 - DNA, 782 bp, Homo sapiens
gtggctcaagcctgtaatcccagcactttgggaggccaaggtgagcagatcgcttgagctcatgagttcaacatcagtctgagcaacatagtgaaaccctgtctctataaaacataaaaaaaatttagctggatgtagtggtgcatgcctgtagtctcagctactcaggaggctgaggtgggaggctggcttgagctaggcagctagagattgcagtgaggcaagatcctgccactgcactacagcctaggtgatagagccaaacattgtctcaaagaaaaaaaaaacaataactcaggcaaagtaattaccaaatatcataatatattatgtatctaaaaataaaagcaaagcatattttaaattttttgttaattcatagcatgcctatagaatagtgcaatactcaatatcattagtcacaagggaaattcctgtcataccaactgaaacagagtccacaggacaggtgggaaatcacccagggaataaaactttactccaagaatgtaactctttgcaagcctggatgccaaagctgtctgctgtaacatgaagccagtttaatccaatggctgctgaaacagcctgctgtgattctaagagtagttttacccaacattgtcatttaccaatcagagcttgccagctcccaaaaatcttactagtgccaatgaactttctttcagaacactatgtaacattcctcctttttataaaacttcgaatcttgtctttgttcttcagacatactgaagaccacacagtctgtggtgtgtccc

SEQ ID NO: 37816 - DNA, 1208 bp, Homo sapiens
agggagagagggatggcccccacaaacaggtcacgcagacacggttcatcaggatcccccggcccctggctagctccccacacactgcaggagtcacgcagattgcgaaagtcttctctgcagacttcatcttgcactactcacttcctcttagcacttggaacagcttgggtgttctatggattctctctgattacataagaaattccaaaatttttctaatggcctatttagaaaaagaaaaacaacaaagcctgatgggaatccacttagaaaggcagctcttcccagagagggtctctgcattagagcgtcttggagatgtctgtgagcaggagggagcccacagcagaaactgcccttccccaaagctgagtaaagcccagctctgccctccagccccatcacaaggcttctgggatttctttggcctgtaggtaccaggctgacaccccctgcatcctgcccgacctcatcacatctcccacagggcctgccctaagtggagtggaccgagctccctatgcagccccaaagactgtgttccactgcccttttcctcattttacccctaataatctagtgtgggttttgctgttaagggaactccaaaacatctgaggcaagttttagtccatataaactcaagtatggggaatgccaggaaacaaatgacagagaggagggttagggactggaatgaaaatccttaaccctttctaggtgttgttaaaatgatcacctgggaggccatcagaccttagtgcctccagtgtcccagattcctatggaagcaaaccaagacccaactcagttacactgaggactcaaccagtcagaaaccaccaatcaaccctggactagggactttccaattattgctccactttgaccaattaaacatttcccctatcctgcttcccattcactctataaaagtctccccacacgctccttcaaaggagccctgaatctttctggcttggagcgccagattcatgaatcattgcctgctcaaataaactctttaaaatgttaacgtgtcagagtttacctcttaacagttcctattctatttttttcagcttggtagaattagagttcatactacaggaatctaacgatcagtcttctccaaagaggtttttcaacagtggaggaccctcccagcccttctccattatcagtgccctttctctctccacatt

SEQ ID NO: 37817 - DNA, 655 bp, Homo sapiens
gcttcaggaattagcgtgattggctaagaataagccattctcctgggcagtggtcagtttaggaactggcttggaatgtactttggccaataagagtcagggagaggctggaagagaattctgacttgtagaatatttctcattcttctgggaatgcttcaagaatggacctctcaattcctctagacatttcatgtgtagaatatagagtttggacttgatgtaataattttgcagccaaatcctaagaaaaaagcaatgaataaaagaaaaactagggtctgggagcagcaatgtctgtgatgtgctctaggagaggcagggagagcaggccagaccaaagagtgcggtctgggccacagatgtcacatggcctgtactttggactgtgatgcatacctatgctcgctatgtcacattccctgtggacttcatgactggggctatgggataccacctggaatagttcatcagggaaaaggatccaaggcctgtggaggaggagaagagcatctcagagcaacgggaggatcacaagctcggtgagctgcttagcaaggagcacacccaggtgatgagccttaagggccagctggaattttccctgaagctgtccttagcagaaactgcccagaaaagaattaatggaggacac

SEQ ID NO: 37818 - DNA, 2064 bp, Homo sapiens
cacacacgtgtgttactgtacgtggagactgtacatcttaggtcacacaccacccctgaaccaatcctacaaacaccataggtgatacacactgtcaaagacaaagagtagatgtccacaatagctgttctttctcgtttataacacttcttttacctagtaataatcagctaccatttactcgatacatactgtgtgctgcctcttcaaccttttgaccatttaaactacaggaaactaggttatcttcaggttaccttagttatgggagtgtatggaaaacattaatgggaaggtgaaagcgcagcaaaccacttcagcagttaacagaaaggctctcagagcactggaccgccaatcaggacacagcagcagctctgggattcgaccacagattctctggcgtgcccttcgggaaagggtggcctcgggccccctactctacagagtctcctcccacggctgcccagttccctggccgactatcttgcctccaccacatcaccatcagtaccgggcggctgcagggcagagctgtccagggacctcctcacagcctccagagtcaagaaatgcctcctcagggaagccctctaccgcatccctgacctgtgagtcacggagctcccgggcaccatgctggccacaaatgcctaaggagccccccggaaccagctgtgggtcccgcaggcactcgcaggctagcggacacctttggaggactgagagacctgtcctgcaatccaatgttcctcactctcacaagattttacagacgtggaaaccgaggcccgaggccccaaggggtaatcggcccgccttcccatgccaataaccggcagtggcgggacccacacctactccgtgacctgcaggcccaggggtcgagccccaggtagaacgtctagacggactccgcccttagcgccgtacggggaaccttctcccggacgcagacacggaagcggaagtgctgccgagctgtagctatggagacgtggggggcgggccgcccggagagcgcgacctttgacctgcagtagagcctacgtcagaggctggcgcaaacagaagtgcagcggtggcggcggctggttgcgggccggcggcgggctggcggagatggaggtaactcaggtcgggcccactgcctcccatcaagccttccgcgccgcgatttgggatgtgggagtgggcccgatgggagggcgcggtagtctccctcttggtgtcccgaagcccgcgctgctgtcgcctccccatctttcgtaaactctatccctgggggttacctgccccgtagagcccgtttgtgtacgaattgccacagcgaccgcctccgtccgccctcattctctgtctcacgaggctttccaccacttgattccatagaaggtttttccctgtaagggttctacgcgttccgtgtggaattaggaaaagagttcttctgacacctgggtttgattttgttttgcaggatcttgttcaagatggggtggcttcaccagctacccctgggaccgggaaatctaaggtgaagagaatacttgaatagcgggcttcctgaagagtggaagggtgatgaattggaaaactttggcatggggaaggggggggcgctgatttttttttttttaatagccttgctccaagggatctcaattttagtgtgcgcaatcgcccatttcctgtttctcccccgcccaccccgatatagaaagactttttgtttgcttcctgctcctggttagcactgctgggagatcctgctatttttcgaacataaagcagtctaagaaggtttatatagtggtgtagtggaaggagcagtgacatagggtaggaatcaagggattctgatctgtgggctccagtttctacattgccaaagagtttaattagtccagttttatggccctgtacaatgtttaacattcaatcattctaaatgatagtggtttattgctaaggtttattgtgtgcatgctaaatttctggcgcttgcctaaccactcagttccttcgtttaagcttcatgataaccatgagataggtactgtt

SEQ ID NO: 37819 - DNA, 586 bp, Homo sapiens
tgctttaaatataatcctattttctgatgaaccatgaaagaagttcctagtctggacaacacaacacagtttcttaactggggttcttcatctgaaatgtgtaacacagattatttgaactagatgacagccagtgtcagttctcatcaagttatttcacaatgagtacagtgcaggtatgtaggagagaagttgattcatacattcagtagaggtcttagagctaattctcttgcagaacccagttgagaaaggctaagtcagcatataaagttgaaagatcttctgtaactaagtttctcatctttcagattgtgttcaatacagtcagagaacatgatgatgaaatctgaacatacacagactgtgagtcagctaacatcccagaacgaggtccttcgaaatagcttccgagatcaagtgcgacatttgcaggaagaacacagaaagacagtggagacattacagcagcagctctccaagatggaagcacagctcttccagcttaagaatgaaccgaccacaagaagtatgtatgtacacatggaaatattagttgttcatgttttcatgcatttgtctctta

SEQ ID NO: 37820 - DNA, 2577 bp, Homo sapiens
acacgcgtgagtcaccgtgcccggcctacatttatcaatttttaattttatggtttatatgctctttgaaaagtctctcaccactccaaccttacttttgtttttttcccttgttttcttctggtattttcataacctctctctttttttttttttttttttttgttttttgaacatttaactatttgctttgtttggaatttactttcatgtgaggacatcaaatagatccagtgttttcctccgacatgcctcgactggcaggagaccaaagttttcattctattactagagagtagctatagttacagaatcaggtatcctgagagagatcatttatgcccaggatgaataacttgtcttatctattaaatctattaaatcctttggagatttcacttttttttttttttttttttgggacggagcctgttacctaggctggagtgcagtggcgcgatctcccagctcaccacaagctccgcctcccaagttcaagcgattctcctgcctcagcctctcgagtagctgggattacaggcatgtgccaccaccacgcccggctaattttgtatttttagtagagacggggtttctccatgttggtcaggctggtctcgaactcctgacctcaggtgatccgcctgcctcagcctcccaaagtgctgggattacaggcgtgagccactgcgccggccccaaaatttcaggttttgatagacggaatgggtgaagaaaatgagagctagcaaggaagaacaggatgcagaggcaagactggaaactctccaagaaaggttaacttttcttaactcacaagttaaacaaaggctgcaggctccatgcggagctcaggcacccagcggtgaccgatccagaccaggtcctcccggaagcccggcctgcccgacagagccttaccacagagccccctcaggcgtcctcgccaggacggggcggaaccctgtgtagctcccacccccgggacgaaggccgctgccagggccgcgcagccacgcgagtggaatcagaggagcctcgaggcaaggagagccgggccccgctccctgcgcccgtcaccgccatccttgttgtagggaactcggcccccgagccgccgccgcgctccgtgggctcccaatgagcccctaccccagccacccgctgcgtttgcgccagcctcccagactagcctggggtgctgaaatgggggcgggcccgagccacgggttggggcggggtctgatgcgcgccccgccccgcaacgccccgcccccccgcgcctacctctccagtccgcgcccttcggcgcccgccccgccagtccccgcccctccttgcccagccgctcccgcccctcccccgccttcccgcgcggcccgcctcgccttcccccccctcccgcgcccccgcgcggccggcccctggccttcctccccttcctgctccgggcccgccagtagccggccgcggcggcgagggactaggacgcggctggagcggcgccgggagacgaggggctgagagacggcggcggccgaaagcggagagatgctgggcgtggcggccgggatgacccacaggtacgggccgcaccgcgcggcccccgccacgtccgccccgcagctcccggcgggccttcgggccgggccgggccgggcctggcgcgggcgggcggccgggctttccccgcggcctcccccggtcggccggagccccgacccccagcgctcgggtggcggcgtggctgcgtccgggcccgcggaggagacggctgctgttcactcccgggtgtccgcggtggcacaggcgctgacgccgccccgctgctccgagagttccataagacaaatcagtatttgccgagctaatcatttatcttctagcagtagggatcagcgggtcgcagacgtcttggtctcaggacccctcttgggactagaggacctggaatggtggctatctccatagactgtactagaaaggaaaaccgagacactgaagttactattaactcattgaataaatccgtggtatgttaacgtacataccacatttttatgcaacatagggttttgctaaaacaaaagagttcgtgggacgactggcgtcctttacagtttgcgaatctcttgagttgtctgacttagtagagacaactacgttctcccatctcctttgcagttcagtctgttgcggtatgtttttatatgaagaaaatctgatcttacacagatgtgtagttggaaaagtgagtactgtcttaatagctgtttcagataattatgggtattctttattactacaccaaaactacgtaagtggaagtttctcaaaggctggtttggacgtggaatctgaagctactgtcagcggacttttcacacagtttcgttaaaattccttggtctgtcttgcagtttgaatgcagctaaagctcctgtcagtggcctttgcacacagttacgttaaaattccttggtctgtcttgcagtttgaatgcagctgttacccattgtaacaccatatatttgtcgtttggaagatattggctcactgagtttggcagatctcaag

SEQ ID NO: 37821 - DNA, 1424 bp, Homo sapiens
acccaaggtaccccctacatagctgactgccaagggatgggtgctgctggctgcatgcaccatcagggtccaaggcactctgctgtaaaacttttgaggggccagtgccactgaagctggtgctagccaccatgccctgcaggagctagacaccgaagaagccagagtgctgcaggagctttgcccagggagcaggcaggactgggaagcaaacctcttcctcctgcagtgtctctccagcaccctctactgacaaggtctcagtgctgctcatagaggacaaagattcacagaggtagcagtaactgcatcaccagcacctagcaatatcccagtgatgcctcctacaggacacaagggggtctgtctaagtgggtaattgccatatttttatatattattgctagatgtatagaataccactttttgagaagaggtaaggaatggaataaagagcttcctacttagccctgtgaactgctttcaaaaaccatagcttcattccgtgacagagaatggagagctctgtgtggggagagaggaaggttgagcacaggagcctgcagaacaagaggagtgactgaggcccctgggagatgctgctagcctggttgtagctgggcagtgttacatgagcaccagcttacagtggttgacctcctgaccttatactatttccacatcttttttcattgtacttatggcaaaatctaagttatggtagctgaaataatcccttgcctttctgtgtacatttcacaaaatttaaagttaatgaaagaaaagaaacctttttaaattcagcaaaatatacatatatgtgtgtgtgtgtgtgtgtgtgtgtgtgtgtgtgtgtgtgtgtgtgtattttagttcctctgcttcatcctggtcagtattttcaaatgctgtttaatgcagtaaaatctacacaaaacatgttctgtgtcaaaaagaaaataacgggcagtgaaagatatgtacatttgaatttgaaaaggttcattgttttcacttgactcaagtgaaatgttttttattctgttctattctgaaattctcatggttttcttttaccttatcattgagggaagtaaaccccgtgttaagcttagtcacaaaataaaaactcccacggacttccctcccagtgtagctgaaggttaatgtccagggagatagccttgactgagtcagaactaaaataagggtgttatttagagccagatactctggtgctacagccactacagccgtgtcaagagctcctgacacactggaggctgtcactggtgatctgggcgttctcctaagtcagcattcctagctaaaaatactgccattctgtattggaaacacagcttcctctaatttgtctgttttgaccagaacacaatgttatctttttaaaaagctgtttaggt

SEQ ID NO: 37822 - DNA, 1438 bp, Homo sapiens
gatccgcccgcctcggcctcccaaagtgctgggattacaggcgtgaaccacagcgcccggcggaatgcgtggattttggcataagacggtggttctggaaccaatcccccgccgagatgactgtttaaaaaattgtaattgtccaaaacttaatatttgtggtctttttcattatgcagttctaaatctccctttttttttttttttaaattcagacggagtctccctctgtcgcccagacggcgcaatctcggctcactgcaacctccgcctcccgggttcaagcgattctcctgccttagcctccggagtagctgggactacaggcgtccgacaccacggccggctaattttttgtatttttggtagagatggggtttccctgtgctagccaggatggtctcgatttcctgacctcatgatccgcccgccgtggcctctcaaagtgctgggattacaggcgtgagccaccacgcctggccctcatttaataagatatgaatttaaaaatgtatgctttagtattcacacatgtccgatgcaacgtatttaaccagtcatctccagaaactttgttccaatttacacgttcaccaaattggcctgagtgctttttttcttccaatgcattgcgcacttataatttagaacaagtgaccaaaacgcttaagagcccatcacgcaaattgttatctgctggaaatctacgccctaggctgtggacactggcggccgaaatctgatcccggcttgccaagacaccctcagagcacgcggcgctgccaagagcctggccgagtgcagctcgagcgccgacgtcgccaacgtggcgcacactgctgacgcagtacgcaagttcgtcacagtggtcctccgccggctgcgccgcaagttcgtcacagtggtcctccgccggctacggcgctgcgtcactggtttgcaggcgctttcctcttggaagtggcgactgctgcgggcctgagcgctggtctcacgcgcctcgggagccaggttggcggcgcgatgaggcgcagcaaggctgacgtggagcggtacatcgcctcggtgcagggctccaccccgtcgcctcgacaggtgagtgggtctcgaagagaccgacggcctcgacctggccgggcggcggcctcgcgctgctcaggcgtcatggctcccgacgggcgctgctccctggcgcgctctgttgaggcgccggccggctggcgcagtcctgtgggcggcgtggcgcttgcaagcgcatgaagagtcctggggggacagcggtgggcgggagacctttggcgccggcgcttcctctttctcccggcttgttcccgacgcttgttcccgacggtgctcgctcctggggccgccctggcccgggctttctggccgatcgcgcaccccgtagtacccgcgcggcctagttctcgggggcttg

SEQ ID NO: 37823 - DNA, 872 bp, Homo sapiens
agatagatgtaactctcaggctcaaagcaatgctcccgcctcagcctccttagcagccgggactacacgcgcgccaccactcccggctcagatatactcttggtttttcttttatatggcagttagcaaaggtcacttctgatggaacgaccggtctatgtggtgagcgcaacgcacaccaaacttaacaggttaaatggagctggagcggagcgctgcaggcaggtgcggggcctcggtgcccctcaacccgtggcacccaggcagccggggcaggactatcgcggggagatgcaatactactcagttacgaggtgtgtagtgctagcacgagaaacttggaggacgcgctgacaagccgggctgcagtctccgggtcgccccgccccgccctttccctgccgccgtgcgtgcctcgggggggcggggtctggcacgtcgtgacgcactgcggccgcgtagcgccgcgggtttgatgaacgcggttcccggggagactggtacggttgctgtgtgctatggagccgagggtcgtcaagccaccggggcaggatttagtagtggagagtctcaaaagccgctacggactcgggggcagctgccccgacgaggtgaagccgccgcctgaggtccgcgggtgggctcctgctgctggggggcggcccgctccgtgccccgcgcagccggcctgggggcgcgcagcggctctggtcccggccccggcactcccgccgtggctgcggcttgggcctcgtggaagcaggcgggaggggcgggcgttgcgctgcgggggtgcgggggtgccgcttcacctatgcctctgtgttcctggtatactgggcatggtgtggtgttggagaaagtgctattca

SEQ ID NO: 37824 - DNA, 1342 bp, Homo sapiens
aactctggtccatttatgccacagactactactcagcaagagagaggaatggactattgatacatgcaacaacctggatggacctccagtgaattatgctgagtgaaaaaagccattcaccacggttacataccttgtgattccacttttataacactcttgaaatgacaaaattataggaatggagaacagattactggtttccaggggcctaggtgagggtggggtgggtggaaattggctgtggctataaaaggcaacaggaggagtttttgtatgggagctgagtcgatatcactgtgtcaatatcagtgtcctggttgtgacttctgtgtatagttttgcaagatgttatcgttaggagaaactgggtaaagggcatgtaggatctctctgtattatctcttaccactgcatggtaagaagtatctcaaaataaaaagtttaattaaagacaaaacaaaacaaaaaacaaagagacacagatgcctgggattcacccctgactaattacatcagggtgtttgggcagattgggtgggctggatgggcagagagggtgttaagacctgcaggtgactctaatgttcatcagagctgggcatggagcacaggttctcagccctggctgaggtttgaaaacctctgtcccaggggtgtgaactcaacattttttggaacagagaagagcttcctggtggatggaaggtgagtcctagaccatcctcccctgggcagctgacagccccaggccatgccaggtgagatcaggcaggctgacctggggcatgcgtttatggagagatgccacatttcagcggcagccaagaattcttggccctggaactcacccacagtatagttatttctggccaacaaagcactggatcagaaagcctgccagggcacagggggctgcatttggcctacggtggggtgtgggggtgggaggaggggtaatgggggcattggtgagctgcccagcatgcaccaggctccactcccgctgcccggccagatcaaggagtccacggagggaggccagcgagtccagcagcaggaaaacccctgacctcagccatgagggatttatctttggggttaataagaaggtaatttagaaagtggattttgcaggaactggaagctgaggattatgatttcagattgcagcactgacggtcctatcctgttgcctcttaacctgcccacactcaagcccaggttatggggagacagcctgacttagctcagaaggccgctgggaggggaggctggaggctcccagggctatcagacatcggggatgctcgagggcagggagagggcagctaagtctagg

SEQ ID NO: 37825 - DNA, 734 bp, Homo sapiens
tgctggaattacaggcgtgagccgccacgcccagccaaggcaaaggctgtgtaactgtgggacttgcagttctacactttccccaggcctcaattccttgaaatctaagtgaggtaactggcctgggtgccactgacaaccagttccagccctcacactgcatctccaccaaatttctggtgggctcccaggtggctgttcaccttcgcttcgtgagacagatgaaagcctggaaacagcaacgcctcttgtttatgggcagagatgaccctgtttgaactctcatgtggaagccaaaggtcttagtcactggtttaggaagtcgggggcaggtaatgacatctgtttgggcatatctaatcactgttttggtttctaatgacagtccttcaaatagagggctataaatcaagtggccccgggctcatggaggccccccagggggctggatggttctatcaggttctgcctgccatctgatttcttcaccctcctccactgcagagatcctcaggctccatgcttctgatccacagccacacacctggataaacgtgggttaagagtaggtgcctccaactgcatttacaacataattgatgcggccttacaaactatttgatgtccaaaccccatccttcaccgggcctaccaggcgaggctagtggaggtgagaagcctcacaatccatgttttttaatgcatccgagttattccaaagcaaagggtatttc

SEQ ID NO: 37826 - DNA, 781 bp, Homo sapiens
cctgggcgacagagagagactccgtctcagaaaaaaaaaaaaaaaaagtgctgacaaagagggactttccctcagaatgagttctgacatgcgatagttctcctccagacctgaggggtctggggagaagacggctggcaggtatgggcatcgacagacgttggaagcgaggtaaagagagcagaggaaaggacactggcctcgcaggcagtgtgtgtccattaccaggtccccagggccacagggtgtggagggagctgtgaactcacctgggcatcccccgaggtccttaaaaagaagacagcagaagcagacaaatagcggttaagaaatccgaacaaaatcgctttcaggattgtctttcctgagaagagaatctgtgaggcacgatttttcaccttccaccagggattgagaagtgccctgcggggttgagagcaacccgggagccaagcaggagtggaacttttagatgggccttggcatgtggcttacacaagaggccctttggcctgcacagagtttacacaattcgaaggctttctggaaaacgtgcctcagagccgtgtgccccagcttgcttgttatatctggcaggcaccggctgctgtgggttccgcacctagggtgcgccacaccgtcccctactgccctttagcctgtatccaggggcagtggctggaactcaggcagaggagcagaggcccaggcatgcgaagtggggtgcctgcagttaggggttgggctgggaacgccaatactaaacgcctcaataaccagc

SEQ ID NO: 37827 - DNA, 1131 bp, Homo sapiens
cgctccacgaggggacgccatgtgtggagatgctggagtctaagggtattgtgattgggcaatggtaagaactccgggtccctaagtccattcctgctgctacaacaaaacaccttagagagtaatttataaatagccatttccttttcaccgtgctggaggctggaagtccaccatcaaggtgtcagcagtgaggggggcctgttcctcacagatgggggcttcttgatgggtgctggctgactcagcacagatgggggctctgatgtggcaggggtggggtagagacgggaacgctctgcagaaggagcggaagggaggaaacagcttcctccagccttcttataaggttatcagccccgttccccttacgacggaatcacttccctggaggccccctcttactactgttgcaccggggactgggcttcaatcagtagcagcaggggatgcgcgctcagacccagcagtcggctctgcccgcctcgccgggctgcaccgagtccgcgggtctctagcgcacggcctggccccacgtgcggcgaggagggcgcagtgaagttctgctgtgtgcaccccctgcagctcggccgggaagcgcccgctggaggaacggagagcgccgcttcagcgtcggccacgtgggccgggctctgccggtggcaacctggacgcgctgcgggcgccggcgagacctgcgccaacgcctacctccgggccacaggcgggataaagctgccccactttgcccccagcgaagagaaccctccttcctctaagtattttcttcagcaactaagcttttctgtttgctcaatttcttgtcccgtgagcgctaccacccaccccccgccaccttcttcccctccccccacatccgttcactctctttgaccttttgccaaaactctgaacgctcgctgccctccctcccatttcctcaccgcgtttcaggagctgtaagttcttggtgttcaaaccccctacggttacgtaaacagaactctgcagttatcttctttccctttcttcggagctttgttttcaagttcattagagacttcctgtgggtgtaattaccgctctgcagttttgagcgctgcccaccttccccctgttttgttaaaaatg

SEQ ID NO: 37828 - DNA, 1225 bp, Homo sapiens
tgtcctctccttttctgttctattaaaaaaaaaaaatcctgcctggcctcaccagtttctgaggcacgtgacaaaatttagttttcatcagggtccttcatgtggcatggcacaaaaaaagacatttcagtatttatttgaaactttcttggctctcttgcccccgtttttgtggcttagaggaaggtgtggatttcttctacttcaccagaattgtcctttcaattcaaaatatgggcttctgagttgctggatgaaatgttctagaaacagtctttgagtgaaaatgttatgcttaacaaaacgagcttcagtttccacttcctttctgctatacaaacctatgtggtgctgcttattaggcagaaatagaagagcagatggaagggtgtgtggtacggatgccttctgaccacaaaatcaaacaatagaccttttcatctctcggtcaaaatacagcctcatcacctctcctctcagccaaaaagcaacacagaaatgcacagtttgggcataggagcaggccctgccggccagcaggagtgagggagggtggtgttttcttgccctttcatcatggctggactttggcactttgttctctaagtgaaaacaaaaatagccactgacttgggctctgactatatttgctgtttctttaatgcttctcttccttgctaaaaatacattagaggtgattaatcaaacacacacacaaacacacaaacccacaatcaatgcaattaaaaatatataggtggagaaagacaagaaccaggtgagagccctgccttccctgcacggaccaggcttgtagaggggtgtgtctctcttcctcactgtttctgttctgggattatgcctgttatgggcactgacctctctttcttggctgcagtgccatttgggggctcagtcctcatttagctgaccttaatttggatggttcccaactttccatcaactggcattgcacatgactggctttgtggagttccacctctctcgctcacaccccattcacaatgaggatagaggggctaccgcctggagcatgggaggatcctgaacttgggagcttccatgagagaatgtatttgagttgttctcagactaccgtttttgctcagcacttttttggggggctcagtattatttccaaaacattttgtgtaattacataaggtttctacttctttaatttgccaagtaaaatgttaaaaaa

SEQ ID NO: 37829 - DNA, 1592 bp, Homo sapiens
acttcccctcttgtctgtgttggtgtcctagcttaggtggccccttttcctgctgttctcaactttggtagcaccttggcaccatctggggagctttgtagtcctgaggcatgggttccccctagcagttttaatgtcaccaattgggtggaagccaggcctgggagtctagaagctcccagctgagtctgctggctgctacactgaggaccttgtctcctgtctgtgtcgtgcctcgttgcagatggtcacacccatagagcagcccgtgcctagagtcctgggccttggggctcagaatggggccaggccttcctgctgagccgccccagtgacacaggcactgattggccactggagaagcgggagtgaatggcaacaaggccaagtgggaagcctgtgtctgcactgaccaccgtgccccaggccggcctagcccaaagagacctcctgctttgacttttccttactgggctgtgcctaccttgtgaaaactccagtaaaattaatccaatggctgcttggccagacagtcaggacacatttcgtgagccctggtctgggctcagaggtttggagtccacagctgggccttgatcttctttccccagtgacgtcctcaggctggggtgtggcaagtttggagaggatggggaccctcactctgtggcccaaatagagcaatagggcctttttcttctgcttcagattatctattctcacaaagggaacaggcatccaaaaacctcacagaacagcattaggaaatcaggaattgcagccaaaggactcttgtcctctgtgtgaggctgagtcggacttccgtgactcatggttctgttattctgagtgtttgagactattaaggaaattgaatttagagtgtcgtgatttgtgagaacaatgaaatcggctgttcatattcctgtagcgtcagcagcagatgagatgggaggtgttgtctttcaggcagacaattgggagcaggctattgccttgtgcaggtgtcttgtaagggctgaggaaagcttcttgaggtctgagcagtagctgagaggtctgcagatcccctgcctcagtagagggacccatcagcaactgccagtcctgggccagagccggcgtcagccgtacaccgcatggatcctgagactcccgtgtgcttttgcagccctgagattccatgtgcttagtctccttctgttcaccccttaccagatattcccggggcacatgctggagtgcctgtcctttcttcttgcatcaagtgtgtggtggcaaatgaggaagggattttcgtattctcctcgtgtgcattccagccagggaggccaatgaacaggaaatgctcatgaaaaaagtcagatggggcaggtgacatacaggtaattaacaccatgggaacctataatggagaatgacagagaatgacttttatatttggtggctggggaacatttttaaagagatggtgtctaaactgagagctgaagatatgagtggtgagaaggggccagggaggcaaaggtcggggacaatcgcctggtacagggagactaaggagagattgagcatggtgttttcagagaacc

SEQ ID NO: 37830 - DNA, 624 bp, Homo sapiens
aaaggtggtcttcaggatttaagttatccttttgcacttaaaaatgaattttgtgcttgaaacaaccatggaacactgcctattgtgtccatccgtgacagttttctggttttgaaactgtgtgagcacatcagcaccaggtgatacgaaccctcagggtacctaagtccaggggagagtcacccagaagagaagggtgcaatgggctgcgtgcagttggcatccctaaccacccgaccggccatcactcactctcttacttgtgccccaatccctgactcatctgtgtattgcaaagagcatgaggatgtacctggcagagcgcaggcacacggttcataatgatggaaaggtcaaccctggcctggaggagccagagtatagtacaggtcactgtacaggtaaacaggcgattgattgcaggagagggtgggtgattgacctgcgtgtgggaacagagggtcaccgacaaaggcgcctggtcagcccaggtcaggggagacttcccggggcacagatgggaggatccttggctgagggtcagcctgagcagaggccaggggacatggcccgaagatgagggccagggacgggagaggtagcaggcagccctgggagggcctc

SEQ ID NO: 37831 - DNA, 6304 bp, Homo sapiens
taaatgatgagttaatgggtgcagcacaccaacatggcacatgtatatatatgtaacaaaccagcacgttgtgcacatgtaccctagaacttaaagtataataaaaaaaaatttaaaaaaaattataaaaaaaatcttgaatgcataacaaacataagttttttaaaacaatgcttcattaatctatacaagcacttgagttgttcacaaggaaaatatatctacctggtgaagagaagagacctaacatttgttgagtatctgctactggcagggtactcttctggactcctttatgttgactatttaattcccacagcaaccctgaagaacaagccctgacattctaaataagaaaactaaagcacagagagtaatctgcccaaagaaacatagctgaaaagtaaaaagctgggatttgaaccagattagacttgttccaaagtccatattcccaactaccacaaatcagattgccccaatgtggtgtctcagcaggagaaagtaatggactgcttctgcatattttgcatctcatcgtgctgctttccaacttctgacaatgtaaacttacaaggccaatttcaagtaaagaaacttgtactatttttcaaaaggtggtaaagaaagtcagatctgaaagagaatggtctataaagttagtattctaaaactaatgcaatcattgtttcttatcatagatttattaaataaaaataaaaacattttcttgctatactattcccttttctagcataaaagtagcttgctgtcataattttctttttttttttttttgagacggggtctcactgtcatccaggctggatcatcctgcctctaccacccaagtagctgggactatatgagcatgccaccacagctggttaatttctgtattctttgtagagacagagttttgccatgttacctaggctggtctcaaactccaaagcttaagtgatccacctttctggcctcccatagtgttgggattacaggcgtgaacgactgcacctggcctgacatgaatatttaatgccaacatactactgttgttgcaaatctcactgatttaaagttgaaaactaaagagaaagaaagaaaaaaatctcagatgctcatgtcatcaagaaaagtcctttccttcaattgggacatgtttgtgtttcaagtacagttccgataagcctagtgaactttttccaagtctactatagactacctgaagaactatttagttcttgagaattccaaagacatgaagttttactaaaattacgtcaaatacttaaacaactctaaactactaagcatacatcttcctttcaaagctacaggtcccacaatacttcaatgacagtgattttgtgctaaaaagttaaaggtgattaactgtgggaaagagattagttaggttaatctttaattattaaacttggggatttaaagagttttataaaggcatgtttccaatggttgaaataattaatataaaatgttaagatcagttaattaaactatgactatagtgctatttacgtgggcctcgtgacaagcctgcgattggtgctggtagattaggatacccaccatgactcagcatacccattcaataaagtgtaagtggaaaaacaaacggaagttctggcaacaaagagggccaggaagtacagtcacataaaggtcacccaacaggtttgcgtaacttgtctttactgctagatagatataatactgagggacagattttacatgccaaccaaattacaacaactaccaaattaaataggaaaagactcccgagaaaacagatataaattctttttttttttgagatggagtctcgctctgttgcccaggctggagtgcagtggtgcgatctcagctcactgcagcctccacctcctgggttcaagcaattctcctgcctcagcctcccacatagctgggcttataggtgtccgccaccacacccggctaatttttgtatttttagtacagacagggtttcaccatgttggccaggctggtcttgaactcctgacctcaggtgatccacccaccttggcctcccaaagtactgaaattacaggcataagccaccacgcctggccagatataacttcttgaaactataaaaaataaaagcttcctaatacatcagactataatgagctacaaaagccttatcaaatcatttaatcacatatgacaaagaaccagaagagacattttgcctcaactttacccaagtgatccagaaatacagtagaaaggtctactctcttaggaagacaatagtgagccactgctcccactcactctgtagcctgacctaaacttactgagtttcttccagccactgctcccacccagtccgtagcctgacctaagctgaagaatctccctttctaatttccccttctttgtgtgatcagtgatcagatgcttcccaacctgaagaaatgctcagcaaatggatgtgatgggcaatctatgatttctgactacctatcattgagtcctttcctcttggtaccagtatccattatcctcattacctttttgggggctacctctcccccatgggatacagtcttgtgggacaattaatcaggttcacactcactcctaaacaagagatgggaacatgacctacatcaggcctactggacattctttccctggactatgaattgtgagcagtgaacaaaaaaggctggcaatggtttcagttcattcattccactcccagagctggaacaaaaatggtttctacctgttgcaggccttcccttcaaatctgcaagtccagacctatgtagcctccaaccaatgccttttttttttttttttttttgtcttttaagatggggtctcgctctgtcacccaggctggagtgcagtggcatgatcttggctcaccgcaagctctgcctcctaggttcacgccattctcctgcctcagcctcccaagtagccgggactacaggtgcccgccaccacgcccagctaattttttgtatttttagtagagatggggtttcaccgtgttagccaggatagtcttgatctcctgacctcgtgatccgcccgcctcagcctcccaaagtgctgggattacaggcgtgagccaccgggcctggccccaaccactgccttttttaactgaacacaaagtggtcttcattattctccaagaattgtcaaggaagcacctctgtacttgtgcagcataaacctggacctcaactttgacacagcagcagactccctctctcttgatcccctctgtcaagttccaagacgtgacactgctggttttcctcctcctcccttctcaagctctcctatctgctcctccagctgacaaatactaaagggactcaaggctgtttctgagtcacctttctttctagatgtatttctctctacaggcagtcttatccctggtcacacatagaattaatcatttaaatacccatgactcttaagctatttctttggcccattgcttttctgacctccagaaagataccccaaagtgcttacttgtaattgtcactttgctgtttcagaggaaactcaaagtcaacaggtcccaaactgtgacctccattgtgcctaccactgctgcctcacacacacacaaaaaagctagtcctccttcagccatacctatctagatgaatgcagtaaccatccacctagccatgaaaccataaattcaggagactaggcgtctccttctagcctcctgctttctcactttattatatccaaacaaccactaagttcttccaattttaccttctagtcatctctcaaatatgtccagctctttattttcattgatctcactttagtcaaagaaatgctctcctaactggcctctcctaagcatctctgaacaccccttcaatacctccttcacattagagcaaataataatttttaaaatgcaaatattatattattcctaaaatagcgttgccttccccttaggacaaagatcaaaatcctccccagggcctccacagctgctgcctgcctgttctcttctctcatctcacgtgagcccaggcctgcctcatctgtcctgctgtactgcagtgaactgatcttcttccggagtcttacagatgccattctctctccatcttcagccctttgtatatgtcttgctctgttttccccaagttactacagctcaaaatagccactgcctcaagaaagtcttcccgaattttccagcttaaatttggaacccccccacccacacaacccattttacactgtctgcctctcctttagtgcttatatcacagctacaatgtactgtgcaattaggtgtttaatttttgaactcccctacaagaacataaactccatgcaaaataatagtaatctctagcatttagcagagccttttaaaaaaatacttaagattttacccagtattattcactgctgactcccaaattactatggcagccctaacttctccctagctccagattcatcatgtgtctaataacctactcaaactcttcacctgaatatttaataagcagcttaaatgtaacatttctaaaacctctggattaccaactacacccctaaactctctgattcccatcctcctcaggtcaataacgatcaccaccagtcaccccattttctaggtcaaagtggtgactgagttatccttgatccctctctttccttcaaatcccatatgcaaaaataatttatcagtgggtcctatggactttaatttcaaattacatatccttagccaggtgtgatccatcactgtaatcccatcacttcaggagcccaaggcaggcagatcactttgtatttttagtagagatggggtttcaagaccccaggaattcaaggccaggaattcctgaccccaaggccaggaattcaagaccagcctggccaacatggtgaaaccctgtctctactacaaaaacacaaaaattagctgggggtggtggtgcatgcctatagtcccagctactcaggaggctgaggcatgagaatcgcttgaacccaggaggcagaggttgcagtgagcagagatcatgccactgaactccagcctgggcaacacagtgagactctatctcaaaaataataataataataataaaattaaatttaaaaaaatacatgtcttaagcatgcttctcacccctctgtcactacccctctctttcacgcctccatcttctcatgcctggaccaccatggcaacctcctaacttggtctccccacttccacctgcccccctcccccaactctcttcttcacataggggtcctcctcccacccctcaacagagactctacacaagcagggtctctatttgatccaacagtgcacatacacccaatgactagcatttggctgagcagatagcagacaaactatttgctgaatgactaagaattctgactgcagatttctaggcttcatccctggaaattctgaccctgcatttcttaatcatccacaggtgactgatgatgactccaccagacacctaggcctgtctcctcagagaggacttcaaagttgtccctgcccgctcttactcaggaccccttccacctcagtgcacagaggcctctgaagtgaccctgagacttggaagaaatgagaagtgagtctcctctgagaaacactagggaagctaactcgagatgattaatctttagtgaagacaatatcatgagaaaattgtcagtttacgagaatgactggcccacaaccagaagcatcctatgcctgaatttggtgagggtgggttaagtacacacaatgctttttttttttttctttgagatggagtctcgctctgttgcccaggttggagtgcagtggcacgatctcagctcactgtaaactctgcctcccaggttcaagtgattctcctacctcagcctcctgagtagctggttttacagaagtgtgccaccatacccagctaatttgtgtaattttagtaaagacggggtttcaccatgttggccaggctggtcttgaactcctaacctcaagtggtctgcccgccttggcctcccaaagtgctgggattacaggccatgaaccaccacacccggccataagtatatacaattcttaattcattatgctaccagaagtgaaaacattaattaactccatagactgaagaaatttaaaaatttaacttcatctaagattaagtcttccaaaagcttatatgcaacagcggcactaatttgatgcactcctccccctttc

SEQ ID NO: 37832 - DNA, 426 bp, Homo sapiens
cagtgagccaagattgagccactccagcctgggtgacagaacgagactctggggaggggaggggagggacaacacagtagtggaatctgcgtgtgccaagggtacaaatataactggtatggttggaaaatcacagtgagctcatcactgaagcccaaggaggcttacatgtaaatgcaaggacagcagaaaaggtgaggctgcaagaagctgacttcatgattctgagtccaagtgactcaaactaaggtcactggagagacgtcactgtgaagcaggaaagagaataggagaggaatcagcacaggtttgatgcaactttggaactactgagtttaaggttcctatgagcaccttggatccctcaaagaacttttatgtaaaattttacattatcaaaaacaaatatacgtggcccagtggtaa

SEQ ID NO: 37833 - DNA, 3850 bp, Homo sapiens
gacccctcaattttccctcactcacacatgcacacaaacacagcaactgagacaagggggtccagacagaaaatttgagatttttaaaaaatacgcgatagaatgaaaagagacctgggctgaatcagggagaaaaatctttgtccaggttctataaaacaaaccaacggtgtcactttggacggatcctctaatctctcagcctgcaatctgaactgtttctacaatttaaacttctcatgtaggaggttgcttagtagagtggttctcaaactttttggtctccagcctccaaagagcttttgtttacacagatgaaaaccaccaatgtttactatcaaaaattaaaagggagaatttgtttttaagaatacacaggcatcgggcctccaaacggcggtgagatcactccataccatgtagcctttggaaaactcgatgtacacgaccttggtactattaacgaaaatagttgtaaccacacttggaaaaccgctggcttactaacaagcgagataaatctacaaaagtaactggaaaggttcaaaacagtgaacaaacgcgttcttttagagtacaaaagagtcaaggcgggaaaaaaacggtttaaaatcccaatggaggaaaacttggacgaccacaccatcggataaaacgggagagcttttgaaaagccaggggagccgggctttctcccggcggcagggaggctcggaagtgctcacggctgcaaaagatgaccgctattcaatcagtccgcactgcgccttcaactccgttatagccgtaagagacccacaaacaccgctgtggatgtaacttttggcaaagaccgggaagtcgttcaagaactctcccaccgtcccgacgctggcgccgcgccccgcgaaccggggtccggccgcgcccaggctccgcagaggctcctctcccgccccaggcgcccggccgccgcggaagccggggagcactgggcgggcggggccggagggggcgcgggtcacaatcccgggccggaccagggggccggtgggtcgagggcgggaagtcccgcgggggccggggagcgcggggctggggccccggcgtcggcgggactcaccaggtgccgcgccacctcggaggaggccatggtcgcgggcaggggcacggtgaagcggctgtatcagcccggccccgagcggctggtcccggcgacggcggcgggaaggccggagggcagaagcaacgggcggggcgcgaggctaggctgcctccgcgacggggaagggacaggggcggggccgagctggaggcctccgggggcggggttggggcggacgccctgtggtgcgcgctgagcgttttgcctgcgccaagcgagcccctcacaggagctaccctcgacgcctgaggactgagcgtcagcgttggggcgggctgaaggagagctgggactccaggaagacggcgcgaggaatgcaggcgggaactgcggagcagtgattgcggccctcgcgaggccggaagtgggcgggccttgaggcgaggccgccctaggtaggtgtggccgagacagcggggagcggaagtgggcgtggcctggtggcgtgggcgcggggcgggggtgcggggggcgtgtccgcccgggcgcggcccagtgaggcggtggccgagtcctctggcctcagacgcgtaggctggcagcccgctgagcccgccagactccgccgccgtcgggagccggccgctgggagcccgtcgctatgggaccgcgctgagccgcccgctggcgggggagcagcgcggtcgaggatggaggggccggcagagtggggccccgaggcggcgctgggccccgaggcggtgctgcgcttcctggcggagcgcgggggccgggccctgcacgccgagctggtgcagcacttcaggggcgccctaggcggcgaaccggagcagcgcgcccgcgcccgcgcgcacttcaaggagctggtgaacgccgtggccactgtgcgcgtcgatcccgccgacggcgccaagtacgtgcacctcaagaagaggttctgtgaagggccgtccgagccctccggggacccgccgcgaatccaggtgaccgccgagcccgaggcccccgacggccctgccgggcccgaggcgcgcgatcggctccccgacgcggcggccccggagtcgctccctggacagggccgcgagctgggcgagggagagccccccgcccccgcgcactggccgcccctgagcgccggggctcgcaggaagaactcgcggcgcgacgtgcagcccctaccgcggactccagccccggggcccagcgaggacctggagctcccgccacatggctgcgaggaggcggacaggggcagctcccttgtgggggctaccgcacagaggccggcccgccagaacctccgtgacctggtgatgggcagctccccgcagctgaagaggagcgtgtgtcccgggggcagcagcccgggcagctcctccgggggaggacgcggcagaggcgggggcgactcagacagcgcatcggtggcctcgtcgtccgcggaggaggagagcagcggcggaggctccgtgacgctggaccccctggagcacgcgtggatgctctctgcctccgatggcaagtgggacagcctggagggcttgctcacctgcgagcccggcctgctggtcaagcgggacttcattaccggcttcacttgcctgcactgggccgccaagcacggcaggcaggagcttctggccatgctagtcaacttcgccaacaaacaccagctgccggtgaacatcgacgccaggacgagcgggggttacaccgccctgcacttggcagccatgcacggccacgtggaggtggtgaagctgctggtgggggcctacgacgccgatgtggacatcagggactacagtgggaaaaaggcctcccagtacctgagtcggagcatcgccgaggagatcaagaacctggtgggagccctggacgagggtgacggggaaagcgccgcgggtagcggcggcgggcgctggaggctttcaaaggtgcttccctcgcatctcatcacctacaaactctcacacgccctagaagatggaggggaccatcaccaccatcaccactcggctgaggggtgggtcggaggcaaagccaaggatccagggcgcaaagcctcgggcagctctagtggacgtataaaacccagactcaacaaaatccgattcagaacccagatcgtccacaccacaccctctttcagggacccagagcagccgctggagggcaggggggaggagggagtgggggaggaacgacctgttaaaggccactcgcccttcacattgagaccaaagtccaatgtatttgggtaaaaattgcttcttttagaaaatgcaaaggtttatttgtcttaataaattgaatactaggtgttgtaaggaagtgagaccagaaggacaagctaaattatgcattcttacttgagggatcggaatggatggggcggagttctcttcaggctagccttctgggaaaagtggatgtctttttcagagattcatcataccttgacctgtacctcttctctgccctccacttccctgccctggagtccgtttctggagactagaaatgtatctaaattgggggaacagaatgaatgaattaatgaatgagagttcctttgctttaaccattcctggatgcctgcaaagtaaggaataatgcagtttttatgtatctgattttataaggggttactctttcaagagtaacaaaaaaatgcaaactgtaatgaaactacattgtatttctaagtgtgaaaacgacaggctgccccgtttttactaa

SEQ ID NO: 37834 - DNA, 2902 bp, Homo sapiens
gaagaaaatccatgtgggctagacagacaaagtgacactaaggtttaggagacaggagaaattccagctggaggattgcatgtattatgtgtgtaagcgtgtgtataattataatcctctagctggaatacatatatgtgcacatatatatatatttatgtatattatgatgttctgacatcttaaaaaaccctccctggggcagccaattcttggagataagaaataacaggctcaggttggagcatgcctttgacaggcaaacaaaccaacccagagccagcactcctctatctggcctgcaaaccctagcagacggctcctctacctcaatcatcccaaggccaggtagtactccaggcaaccagggaccatccctagagtctagagcccaccagaattatccgctctagccaatcctatactgtccattctgccctgccttgcggttcctgtggaaaccaccataaaggccatggcctgacccttccctgactcctgtcttccacctcctggccaccctggtgtctgctgtgtggcctgtgtagcgcggcatgcctcctttctctaggaccgatgagcataatgcactttgctctccccagtctctcctttgtttcctctcatagccacacctgactgatgatttcctaaaagagtacaaaacaaggatcaggaaagactttgtggaggtaatgttgagggatggatagtatgagtatagaaagttttcaagattgaggctgggcgcggtggctcatgcctgtaatcccatcagtttggtaggccaagacaggcagatcacctaaggtcaggagttcgagaccagcctggccaacatggcgaaaacccatctctactaaaaatacaaaaattaactgggcgtggtggcaggcacctctaatcccagctactcgggaggctgaggcaggagaaccacttgaacccgggaggcggaggttgcagtgaaccgaggtcacggcactgcactccagcctgagcgagactccgtcttcaaaaatcaaaaacaataaacaaacaacagaaagtatccaagattaataacttgaaaaggaaaaagggcttgctgttgatgattaaacagacatgatatcattgctatatgacctggaagctgactgtggcagtcacaggattgcagatgtcatctcattcagctccgagataagggataagtcaccttgtggcagagccaggacttggacctacaactgcggatgctcagccctacactcctacctccatgtagactatttcctatgaattggaaaaattatactttcttgtcatatgaaatattttgaaaagaagtcttatttgtaatcccaagtctttttggaaagtgagttaagtatatagatatcaattaataggttgaatgatgacatctataataatttatcaaattctggccgggtgcagtggctcccaccagtaatcccagcattttggaaggccaaggtgggcagatcacctgaggtcaggagttcgagaccaacctggacaacgtggtgaaaccctgtctctactaaaaatacaaaaattagtagggcgtgatggcgggcacctgtaatcccagctactcaggaggctgaggcaggagaatcgcttgaacctgggaggcagagtttgcagtgaactgagattgcgccattgcactccagcctgggtaacaagagcgaaactcagtctaaaaaaaaaagaaaaagaaagaaatctcattatctctgttgtataacaaataatttgtctagtctttgtcctgaattcctggtatggagactctaaaaacccttggggttttttgagtggtagggcttttttatgctactaaggtaaaggtggaaccctagacagcctcaagatgggggctggttaccaaaagacccgcccagcctggtgattagagggttggggaatttgagtcacctgaccttgaagagaggaggggggtctggaggttgagattaatcacaggttcagtagtttaatcacttgtgcctacaaaataaaatcccagtaaaagctctagaaccggaggcttccagggcctcctggttggtgaacatgttgatgtgccaggacgtgatgtgccctgattccacgaggaaaggccactgaagctctgcatttgggaccctcccatatttgtatgctttacagtgaagctaatcataagcattgcactttcctgagtctgccagttgtactagcaaatgatcaaacctaagggggtcatgggaactcccaaatttggagtcagagtacaattgccctgaggaccctctgagacttgtggctggtgtctgaaggggactaggggtctgtggtgaactttgccctcaatctgtggcatctgcaccagctccaggaagttagtgtcgcaattgaattgctgtacacccagctggtcaggtcagtttgggtggaaagagaatgtcatattatccatttaaaacttgatgtccagccgggcgcagtggctcacgcctataatcccaggactttgggaggccaaggcaggcggatcacaaggtcagaagctcgaggccagcctggccaatatggtgtttagtagaaaccccgtttctactaaaaatacaaaaattatctgggtgtggtggcgggcgcctgtagtccgagtactcaggaggctgaggcaggagaatcgcttgaacccaggaggtggaggttgcagtgagccgagatcacgccactgcactccagcctgggcaacagagcgagactctgtctcaaaaaaaaaaacaaaacaaaacaaagcaaaacaaaaacttgacgtccaagatgaaacacacactaatcattttagatttctttcccttcaaattctttcagttcccaactcttaccagttaccaca

SEQ ID NO: 37835 - DNA, 838 bp, Homo sapiens
atcaggtcacagtggagccctcatgactagaattagtgcccctacagaagaggccccgagagctccctctcctcttcctccatgtgaggatacagagagaaggcaccatctgtgaaccaggaagtgagcccttaccagacactgaacctgctggcaccttgatcttggacttccagcctccaaaactgtgagaaataaatgtccgttgtctataagccaccaagtctgtgacaatttgttctagcagcccaaatagactaggacattaataatctgatgatggtttagaactctcatggtttttttcactgagaagagcataccaagattttttttttctattaaaaataatatgccttctgataggatacacattacttctatgaaaagaagaacacattacttctatgaaatctttgccaaaattgcataacccaaaggagacaatgaggaactcttgacaaacccagatggagggactttcctaatcctggcatgtactcttcaaaatgccaatattgtagaggacagagagactgtggagctcttccagattaaaggagacccaagaaatatgacaacagaatgcaacatgtgactcagacttctgctatgaaggccattattaagataatggcaaaatctgaataagatctgaagattaaaacagtgttggctgggtgcagtggctcacacctataatcccagcactttgggaggctgaggtgggcggatctccagaggtcagaagttcaagaccagcctggccaacatgatgaaaccccgtcactaccaaaaatataaaaattagccaggcgtgttggtgggcacctataat

SEQ ID NO: 37836 - DNA, 957 bp, Homo sapiens
acacagtatcagtctgatctctctttcttttccctacaagaggctgaggcaggagaatcgcttgaacccgggaggcggaggttgcagtgagctgagatcacaccactgcactccagtctgggtgacagaacaagactccatctcaaaaaccaaccaacaaacaaaaaatagtgttgcgacgatgctagtttccttattctgatcactgttctgtgattgtgtaagaggatgtccttcctgcgaggaaatgcatgctaactatctgggctaaagagcatcatgactgtacatgactgtactttcaaaatacaagaaagagatagaggaggataaagtaaatgtggcaaaaggttaacagttggaagcacgatgaaagataacatgggaggtctttgtgctcttattacaacttatatttaaacaggcaaaagagttaagagttaggcttttcaaggattcctagcactcactagaagcaaaatgaggctcatttaaagaaaggggtaaacactacgtttgctctctgaaaatagtttcaaatgaggcataactactccccgaaactttcattttcatgttccatcagagcaagctcaggttccaaattccccaccaggtgtgcatgttatgtgtttggactggtgtggggttgctttgtttttcctgaaggtgagctccaaagtggagctgagccatctacaaaaagatagcagtgatctaattgctggtctcctgcatgacctcttcccattgactagcttaaaaatcagttagatttagctttcaagcatgtgtcaataaaataaattccagatttcccaggtaatatatttccaaagagtaggtttgcacagtagtacaaaaacaaaaattgtttttgaatggagtctcagtaatagggagcctgtttttcaattctcttttagattcttttaacggctcattcatgggggcttg

SEQ ID NO: 37837 - DNA, 1200 bp, Homo sapiens
tactccggaggccgaggcaggagaatctcttgaacccaggaggtggagtttgcagtgagctgacatcacgccactgcactccagcctgggcaacagagtgagactcgtctcaaaaaaaaaatcagactccagtctcctgcacagctgactctgcacgaatttctctttcactattgcaatttccctgtgttgatgaatctactctgtctaggcagctggcgaggtgaatgcctcgggcggttccaatggtattgaaaaccatggcctcttatcagatcactaaggtagagaatatggttaaagaaaagtagtttgtgttagagttggggtttttcagaatctaaagaaaaattgcttaaaaactgtctgcaaaatagctccaagggaaaaaaagaatagaaaagaaagtgggcttttgtagtaaccacattcagaactgtgaactggctcctgtgttctctttatccccaagggcatgtgaaacactgttttcccgggcagtcacagcaaggctgcctggatgaggccgctgggactggaatgtcagcctgcggcctgccctccacttttcttagcggagctgtcatctaaacctggaccttgttttctgccctgcctccccccggctgcttgtcaatatttgctttctagatcacaagatcctaagccccaaggcctgtcactttaaacaaccagaagaggaagtcaacaataaccactctggtgaagctgtctactttagggacgtttccctagttggtttgctcctgcgagttcccactcccaggaaaagcactgcagtgctaactgagcagctttgtttgcctcccgactgtgtggcccccagcaactatgccaggattcacaagccagcgggatcctaaatgtctgtgtgcatggcagcaaggttgctcttcagcctgttggcaaaattctcccacagcacttttatttctcaggcacgccttcatgggccccagaaattaattccttgacggctgttgtggagccttagttgccagcgagaggcaaccaaggtttaaatgtaaattagcttacagagtgaagggaggttgcaaatacccctccacttagtacgtaaattcagcaaccttaatctagaacagcaaggagtcttagaattggcacagagtgggcacccagccccttctggccaaatccctgatgagagatgcctga

SEQ ID NO: 37838 - DNA, 1523 bp, Homo sapiens
actttcccatttagcttagtgatttaggggcctcaagatttattttcctttcacagtagccttattaattacgttcttagcatgctcctggcacgtgtgacaaaggaagccacccaggggcagaggaatcccagagtcccttgagaatgagcaagttgtttaaggcagcacagccagtgagggacgagccaggccggccttccagacgttcaccatcagtaagctcctgagaaacaccttgggtatggaaggggaatgcggggcagggctgggggtggggtgtgttggggggtagaattctgctaagcctaggcctaccccttcctgactttgttttttccctttgccccaccttcttccttcatgtacactcagtaactagggagttctggacattgaccttgtgattatctcttctcagcctagtcctggctttgttttgtgtttctcatgtcattgatggggcacctcctagatcagggacagccagttctgcaggtttgacaatgttcaaccataaacaccagagcaatcagctctgtcctgctgcaaggcaggttctttacaaatgacagagcaaagaccttggatctctcctggcactgcagaacttgaggctaaaaatacgtaggaatgatgggaagtgtttacaatagcccttgccagaagcctagcaagtgtgtttaaagaaaaatggaaaagtgcactgatgttcaagtaacgcaaccaggccccatcagctgtggactattgggagagaaatttctcttagatgacaggtttttagtggataccacattagcaatagtggtctcggtctaaacgtggggacatgcggacagagcaacccagagccacaggtcggtgatcaatcagtgctgccaggcataaggctgggttggaccggggcctggtggggctggtctctgagctcactcaggcctgtttctagggctctgttctgagctggatccaagcaggaactcccaggactaccctgcacttggctagggcagcttagcttcaggggccaggctaggtctagaatgaatttccgagagttctgccagcctccaaaaaggggacttgggggtacctcaggtgatctcctgggttgcaagctctggttccttctgcccccagaaggggtaaggaggggatagggagggacaagcaaccagaacacaaatctatagagtaaaacagagcctctgtgggggccctggacacatgcagccctgtttccacctccaactttaggccccctggaaagttcatgatcagtttttttggttttttttttgaggcagagtcttgctctgtcacccaggctagagcgcagtggcacgatctcggctcattgcaaactccacctcccaggttcaagcaattctcctgcctcagcctcccgagtagctgggattacaggcgcccgccaccgtgcccagctaatttttgtattttttagtagagacgaggtttcaccatcttggccaggctggtcttgaactcccgacctcatg

SEQ ID NO: 37839 - DNA, 847 bp, Homo sapiens
tgtaaaaaatgtaatagctgcaaagtgcagtaaagcaaagcaaaacgaaatgaggtatgcctgtgtgtgtgcatgtgtgtgtctacaaacattgagtatctcttataatgtggtttgggtctgtgtccccaccaaatctcatgttgaattgtaatccccaatgttggaggtggggcctggtgggaggagattggatcatgggggtggatttctcatgaatggcttggcactatccccttggtaatttcctcaggatagtgagttctcactatgcttgtttaaaagtgtgtggcacctcccccttcactctctttgctcctgctctggcagtgtgacaggtaagcttcttctttgccttctgccatgactggaagcttcctgagccctccccaaaatcagaagcctgctatggttcctctacagcctgcagagctgtgagccaactaaacctcttttttttttttttttgagatggaatctcactctgtcatcaggctggaatgcagtggcacaatctcggctcactgcaacctctacctcccaggttcaagcgattctcctgcctgaactggtaagcataatgcaaatattccaaaatcccaaaacaacacttgtggtcccaggcttttcaaataaggtataataggctgttctcacattgctataaagaagtaactgaggaaattttcagattttcctaatctgaaaatccgaaatgtgaagagctccaatgagcatttcctttcagcatcatgttggcattcaaaaagttttggattttggagcattttggatttgggattttctaattagggatactcaatctgtatgtatatatccataggga

SEQ ID NO: 37840 - DNA, 1959 bp, Homo sapiens
aatagggcagaagaagcaatcagatacgcatgtgtctcgggtgagccttaaagggatgacttctagagttctgtccgctctttgtccacaaggaatttcctgtgggcaaattgtgagggaggtatctttgtagctatcttactcaggaataaaacggaggcaggttttcctgacatagttcccagcttgacttttctcttggcttagtgactttggggtcctgagatttattttcctttcacaacctttacttgagtaaaagtttctcctttaggaaccacaaaggccagtcagtccctgagcttctgattcttttgtctccttagtgactatacttgtgtgctgtttcaccacacacctttgaatccctttaaattctgctgaggtacagtaaacaatcacctacctacatggtttgacctgagggatccccagaagagtggtcttctgaaatactgctgccatgtgtttgcctcaatgccaggagtccctctgtgtggtgcctccaggcagtggcatgggatgtggcaagctggccacccagcagccccacgtgagtgtgacttggtgtgttagcttccagtcctcatgacagtgacagagaccaggccatggaggaatgggaaaagagtggaacttgggatgtggaaagccctctagagagaacaaacttggagggttaaaaaaccccagtggtagagggcattaaagcaggagatcagaaagaggagatgaagagactacaaaaccaaactctgcccataccattgcttgtgtcaggttgggatcagtggctcatgcttagtcactgctttgcattcgtacatcttctgtccaacctatgttccatggctgacctgccacccaccacctgaactctggtctgaaggcgtcctgcagcaagccagagcgtgttccatgtcacctgattgtgcagacatggtctgggcaccaccctgtctaccttctgtactccacaaagggataacaaaccaccaaccacacagtaagacatacccttgtactcagagagaatttattttggagcgttccttctattctgaccttagctttctgtacttcctgtcctctgcaacatcggagggtttgtattgatgggagttttgaaagtgctaggctgacggtcacagccagtttatttccccacatctttccttctcacagccgcattctttgggttctgaatcagtctttttttttttttaattgcaactacgtcataggtatattggtttttcctggaaacagaggtggggctgcttaggtgatgatgacctgttcattcccagacctcagctccggtatgagtatgtctcactgaatcccaacccacaccctacatcctaacctcataatagcatgataattatattacaaaaatagcaaacaaggaccatcaaatttgggggtgggggctaggagaggaatgttcaaaaagatttgtcattctgagttacagggtttccgaattaacaaaaaataaccacttcagagctaaagtaataggaaaaataaatacatattaaccaaacaacattagcactaattaaggtccaaatgtttaaaataattggctggacaggaaactgctgggctcccaggcatttaccaagcactgagattcgcccgctgttgttattaatcactgagctttgaattgcaagcattttatattgcattctgccactgagctgtgttgtgcaactctaatcgaatagcactgtgtctttggagccacatctgttgcctaacatggtatgttcacattcactcagacactgcataaattaaaaaaccacgtttttattttctgtattttatttatttattcttgagatggagtctcgctctgtcgcccaggctggagtgcaatggcactatctcggctcactgcaacctctgcctcctgggttcaagcagttctcctgcctcatcctt

SEQ ID NO: 37841 - DNA, 638 bp, Homo sapiens
tgggggttgagttgggatcaggaggggtttgaatcggggttgggtgctggaatgttatggggtaagggggcgttacaacctgggaaggtaagtaggttgggggcaagctcccaggattaggtggggtcacggtgggaaggcgcagtgcgcgcagctgcgtccgcctgtcgcccgccccagggccctctgcacagcctgaccatacctgttgcttcagctcctgattgcggcgccgcagggcctggagaggatctcgctgtcgtctcgccagcatctccctggctgcggtgctctgattgctccagttgccagggaaaccaaccggcggcgccagaaggtgacgccatcgatgtgcgcccgcctcccagccccgccccgcccgggccggtcccgggaagggtcaaatgttctcttgcggtggtcatcccacgccaccaggcaggtcacagccgggggagtcacttttcctcggcaattcctaaggataggggaacgtcccccggcgtctgaaactacattccccacaatacatcaataataacaccaccttcttgctgggatacctgttttatggcatttgctttctgataccaattttgtaagctaatgttaagatacaattttagtatcttaaactc

SEQ ID NO: 37842 - DNA, 1208 bp, Homo sapiens
tgaaacttcaagccgtactgtggtattaaaccatgaaccataagatctggtttacgacaagaaaactgaggtcctgaaaattgatcatgcacagctcttctgaagagctaagactggatgcaaggttcctgacttccaggccactgctctttccactttaccaggctgccaacaacctaagaattcagtttggagtttacaatcgccaaggcgaagatgtgctaacaaggatgttactgaaaagaattgggggtggcaagatcacctccctggttctttttttcttttgttctttccagtattttctatactgatgtttaatgttgtcaggatgaacgacgacatagcacgttggtaagacattctcattaaacacccagtgaaccaaaccaagataccgaagagcaagttatcagggaagacaaaacttccaccttctggtgtctgtgggaacaagtcctgtcttctgcgacctagccagagttgatcctaagatatccgcccgaccccaaagtctccctttgcaatgtcactatgtgtactgctcaccaacactccaggaagagccggccatggcaggcggggactgtgtggcaagcctggttctgggcgccggcggaccggggctccggcgcggacatggcaaggtggccatgagggggacagaatggggcggaaggcgcagagtctcaggccaggtccagcttcttctgcgtcgccgccagcttgtcctgcagcctccttttcctccagtccaagtagcgcctccgcagtcggttcgcctgccagcccaggagtactccagaagcgaaggctactagcacggacaactgcagtgtcctctctgacacatccgccatggctgccgccggcgtgcagcgcggtctacggcgcggcggcggggtcaaaaggcgccgcgcgttcaagggtggggcgtgagacaaaaatgaagcgaaggcggcgaggcgttggatctctcgaaactcactaatagtcccatctgtctcgccttcaactgaagactttcccaggctttggacgaccccaccttccactttcctgaacccccacatttcttgttgatgccttacatcattagctaacattgggggcgtatcttgctcacccgactgtaagctcttcaccgctctgtattttctctcagcaatagaatgggagtgactggcgtaactttaaattttctggta

SEQ ID NO: 37843 - DNA, 1184 bp, Homo sapiens
tattttctccacatatgttaaaccattagtaggcataaatctttctttgacacaaaaagctgaagtatacggtagaaaatgaacatatatgccacatatctttggtattaaacacatatgactacagattcattttttttgtagaaaagaaaggctctcacatttttcacactttcacaatcctaatggttcatcttttctcctgatgacagtatgtacagtcatcaaatgcccttgaccttccatgccacagcctcctttctgttccagagggacccctgccagccttcctaaagaacactctcttgagaattaattcaggaaattttacaaaactgaaaatcactcagtgctgactcaatttttcctagagtgttgagcattatctattaataaaatacttaacttatgccctgttacgtaaatgtcttcagtgacaataaaaaggtttcttctttgggaaaattacactggaaccacaagcagtttccctaaactttatctctttagacaccttaacttgtgaatacagtctaaccagatttgttaactgtagacctaaactgccttgttgttgatatagctgataaagaattatgggaagaacatttcctgcaaccttcagtttctgtggggtggggtgtaggtgacaagcaatcgagagtaggtgatgcatgcatttcctaactggcacgcaatcacattgcattccaagactacattacttatagggttctgttttacagatgcatggctgctatgtaaaaatagaatgttttataattctcaccaaaatattctttgaaacaaacagttgcatgagtcaaaataaatcacaaaaggagttcaaaaacattttgaactgattgataatgagaaagcagcacatcaaaatttgtaagaggcaggtcgagcaatgcttagagggtaattttataactataaagacgaaagaattctgccttcagactggaaattgcaacatcaactctgccctggatcccagcctgagggcctgacctgaaaattttggacttaccagcccccacagtcacgtgagccaattccttaaaataaatctctttctttccatacacatgcacacccactctacttgttctgtttcgctggagaactttgactaatgcagattttactacagagagtggttctagggaaatagt

SEQ ID NO: 37844 - DNA, 810 bp, Homo sapiens
agtggagaaagcagtgctgccatgtagatgctccactctacggatttggaaaggaccaggcatgcccttgcagaagactgagaacagtggggtgcgggcaccaagtggatggaacccagagggagaggacaacaattatctacccatccaaggcagactggaagactcatcggtgggcaggggcagggaaggcccattggacccaatcccctcggctccacatctttctgagcagctttgtttccttcttgctaatgcaccttgtcactctgtggtagggttggcaggctttccatgcccatgtccaaatagatcccaaaggccatctgccacccacccccaccccagtctctagaagctcagcactcagttgaccctcaggaaatgtgggccaaattcaattactaacctgttgttacccatgagatcatagccagcgatgctgttgggaggataaaaccttgacatttcaccgatggcacatatctaggcaggcccacagccaacagttccctggcagtgcctggacataagggtgaatgctcacaagcccgccagcaatctactagctcacctgattcccaccctcatgccgacatgccaagaacctgaccttttgatctttactcgtctgataaagaatggtatctccagtttgggttgaaaactacatttctcttactgtgagtgtggtttaacatcttttcagatatacttgtatatttcaatttatactttcactgttaacattgaaactgcttagttttattgtatttatttttgtgaattctatttatgctacatgagata

SEQ ID NO: 37845 - DNA, 2633 bp, Homo sapiens
ttggacaggtaaagaccaagaaggaggattttttccatgcctggaactcgtgtctgcaccacgtggcttctctgtccctggcacacactcaccgaggtcagttggctcctgttgaatatttgtaattgagtgactcaggggtctacgggtccctggagacacagctctgcagggaaaggacagtcccaacacacagggaagggacagtccgtgtgttgaatttagggccccaagtgacttacagagacttgaagcttgtggtaaatcaactcccaacttactaggaacactgaccatatgacacccacaaagcctgatgctaaaccagtcaggaacagctcacttaacacaacctgacaatcacacgaagcacttgacaggagccagttggcaaaatgcctgtccctcagaagtggccctctgcctgaccatgatctcgttcctaaacgggagggtgtgcacacagataaagtgagagtgttttaacaggggtcctgcctgaggaattttaagtgccagaattacttagacctcatcatcaaattagcaagaaactgggtcaaccttctaaagcagtggttctcaaccaggggcaattttgcaacgtttggatgtttggcaatgtttagagacgtttttggttgtcacactgagaggggtagtgccactggtgcgcagtgggtggaggccagggatactgctaacatgctacagggcacagaccgctcccctgcaaccaagaattatctagccccaaatgacagtaatgctgagattgagaaacttgagtattcattttggcttcagtcgaccaaaatagcaaaataaaatgaaacactgaacaccaagtaagatccatgacggcttatcattgaaattattgtttaatttcaagaatcgtcagtttgtttctcatcatgtcctgatctatgggaagaagctgttaaaagagaaaggccagttgttcactgagttggtagctttatgggatttttcatcacactgggtcactgctggccctgggagggctgggtttggtcataccacagcttgcatctggggcactatctcatgggatggagatgggctcctcggtgggatcagggcaggtattatggccaggaacctaggagtgtgcctgcgtccaacacaacctcccagcctgaccatcccccttcctccctgactgggcagttccaaaagagcaaagtgcatgtgattcagtgccatgtgactatacctgcaggaatgtgtgggagccgccctaggagctctgatgagagctggattggagtgagtgctttaggctcagactgagcccagcttcttccttccttctaaggaccagctcttgggaccttgcacctttgggtgagcctcctaacacagggctctggagtaaacgtgccgagagcacaggtttctcatgggacgggaagcaggggccccatgggaacacctccccagagactggtctccacccagtgaccacactctgaaatgaccatgaccgcattggccttcctgattctgactgagttccactttctgcttcctgggacatggaggaggagcgaggagagggaccaggagcatcagggactatgggtcatgaaggcacaggattgggtcccgtcatttgcagactcaacatttttaatgtattgcccacccacagtgtatcaggctcagagaaactgacttatcttaattgaactcaaaaatgagtcatatttaaatctaaatgccagtttattcatcagaaagaaaatccagccaccaagtcatcagtacatgccctatctgttctacgagcatatcttcagatagaattcagttataattaggaggttgcaggaagtcacactatcaagacagctcgtgtcctcaggcctggctggagatctgagtgtcccctgtgacctgctccagaccctagagcccacagtgtgtctacttccctggactatctccatacactcagcatcaacctcattcctttaagaaatttatgtaaaccacccttcttctgttggtgggttatttcttcagatttgccgatcgggttgaaacatatctggggtatgaaacagtacttgagacaccctgattgaaggcgactgtgtcttgggccttctcattcactgtaggtagacttgtactggcttcactctcaggggtggtgtggccctggctcctccctctgggcccctatgtactgaccacagatatcgcccttcctgggacatgaggatggactatatggactcctggtgcaaaacttctaagcattcagaaatgtgatcaagtttgaaaaggaagggggaagtcaaagaatcactgcacaattcatttcaccttagaaacatgacagttgagccttgggctgcacagcctgcttgctgagagcacagtggagcttagtgaggactgaggatgggggctctggagtcaggtcaccaggttcagatcccggctttacctctaccagctgtgtgactgtgagtgagttacaaaccctctctgagcttcagtttcttcctcatttataaaatgtagagagcatgatatttacctcgtggggctgttggaaatattaaatgagacaacgctccaaagctcttgcctttgca

SEQ ID NO: 37846 - DNA, 4024 bp, Homo sapiens
gcagacccgggtgcagactcagaggactggagaggcggcatggagtttggtctcctgggaggtagagtgaggtgctgcggactccagggaggaaagggatgggtggggaggcgggaggggaggagggacggggtattttgcgctcccgcaccgcggcccgaactcagctgttctgccttcactggcctcagccagtcgagggagctcctacgaggttatctgcgagcccagcaaatcttgggggtcctagccaaatgcagtgcgcaacgttctctctcacttggaggccgccattcacctcgtttttttttttcctaaaaggatttttttttctgagtgcttttttcatttccctattttacctgctttgcacatgcctcccgccctcacccgggaggcggcgaagacgcccactgggaccgcgcctggccgttttctgggcgcgtcctgcccccacggcctctgtctcttagggcgactgggcgcggaagaaaagctggagagcccctgcggggtggcaggaggagggtgcctgagtcccgcgagaggcccgggcgaggaagatgcgcagcctgctgatccgcgtcccgcccggcgccagggaccctcagagggaggagagctcaaagacctcgccccgcgccttcgcgaggaccaacccagtccccgcgcctgccccagagcggcttagaaactcagggcacagtgagagcgcagggcgcctcccgaggcttcacaccgccggccgggccagcggaggctgtgaccggagcgccccctctgtgccgcgcacgccgcggccgccgccgggttggggtaggtgagcgggaggctagggtacacttcggggtgggggatgggcgcgcacatggccgccagcaggcagagttactccggtaaacacgccagggacggcggcgcgcgcgggaggcaacccagcggggcaacccccgcctttacctgtccgagcctgcacgcgccggcggccgcggcgccgaggggggcggagcttgccagcccgcgcgccggggcgggacctagcgggggcggggtccgcagtgattgggcgtaggagcggggccgccagccagagctgggctgcagggccgcgcaggtttcacttcgctccgcgcagccgcctggtctgcagtttgttggagctctgcgtccagcgccgctgccgctgccgccgccgccgccgccgccgccgccgccgccgccgccgccactaccaccacttgattcttgcagccaccctgcgaaccctgccacactgcgatcgcatcatcgcggtattcggttcgctgcgttcccgccgccaccgcctcggcgccctttcttggcccttgttcccccaaatgtctgactctgactctcggactgagaaacgcaaggtaaatacctccaaatcccggggcgcgggcctggcaccgaaggaagactagcgctggagcccgaacggcaccacctactgcccgcttcccgtgcacgtgcgagcggagacgcttgcatcggcgccgcttgtcgccggcgggaggtggggatccgtgtggatcgggttccctctcgggcaggttctctttaaagaaaagtcgttcacgcggaacctgcaggctcttggccgaagtgcggcttgggacgggatgctgcgcgcgggcctggtgaagggtcgtaggtccgggcaggaggagaggcagcgcgtgcctttcggcgccggcccgggagctgaggacctgctcgtagtatcgggctgtgcgcccagctggaaagtctcgccgccggctccggcgccctcagagtagcggccgcgcagtgtgagggtgtttcgtgtcttggttttttggggcgcgtgggcctgttgcggaggatttgcggaactgcggtggtgatttaactgacgagacacggcttttccttttactcattcaggccaaggtttcggggccactgctgcgttcgctttctcaagcgtacctggggcccctgcttgctctgcaggagtcctgcggcctgtgccatccgcacgattccctggcagcgagaaatctaggtcctcccctgaccacctggaccgcgcaggggactagtcgcggccggcagaacctgctcggtccctgggccgggctatcttagcggctcacgcatgcccgagcacacccgacccggttcgcggtgcaggctggcggcgccgtgccctctgggacctgttgccccagggttggcgctgctggtggagggcccgacggacgccagggcggagggtgtgaatttactcgatggtcgcggacgtgcgcgtccgcggccaggggtggctcttcggctttgactcgtgtctgcggcgcaccaggagagagaggaagttgttggaggagaatagttgccacagccagggcggtgacggccgttagggtctgcccccgacgggccaaaacaaggacaagtggcgaggactgggcctggggatggccctgcgggtccgggcgcggcgcaagtcctgctttgtctccaggtgactggctgtccaggacggcgggagctgctaaggcttgtgtccggaaggagcacagggatgggcagggtggccgggccagccggccctcaaatcctccgacgaagcggcagccgccacgaccacggccagagcagcgctcggaggcgagtttgtcaacaatcgcctcgcctttggcggcctgacccgtaggcgccgcccccaccgcggctgccgattggctgcggcgcggagcgaccgcgcgcggaccaattgggaacgcgggcacccggcgccagcggcgcggggaggtcggcggtgccggcggcggcgggcgcagagcgcgaggggaggagcgggaggaggcggaggatgttcccggcggctgcggccggggcagcgcgggccagaggcgcggcgtgcggagccctcggctgcccggcggagcgcggcggcgggctggcgggaaggcgcgggctttgcgctgcgccggggactctgaacccgagtcccgggctttgtctcctgcgctgctttcgtggtgacggtcagggggcgcccggtcggcgaagggcgcgggccggacgccgcggggcttggtccctggcccggacgctgcgctctgaagggaaggcgcggacgtgagtttcggtgtgattgccttctgaggggagggtctgtgggatgaaggcggcgcggcgcgcaccggtgtcgcctagcctgcggacctagttgtagaccttgcaggcgttcgcttcgtcgccctccgccgccccctccccatttagagatgtgcacctcacggtgtgcacctcagagaagttctgtctgattcggtgcggcgtgcggtacgggagcgggagggagggagcacgggcggagagagcgccagagccgggccgagccgcgctggagttacaaactctattgtgacgcacttactacgactgacggccgctgccagaccttccccagacttgctgccctcagcattttcggcaaacaatggggccggagcagggaacgcggccagccgcctgcaatcgctgcatctgcgcccgctcctgtgctccggcgtcctacctaaccccgggaagtcagagccgctgggagtttctgacttactcgaagaagtctgtcctgggcaaagagcacacacgaatagacttcagattagctgcttctctggaaacgcatgtgtgtgtgcaccagttccgcaagctgttgacattgttactgtattttgtttgggggtaccctctaccaaaaaaaaattacacctttattattttaggtgcaatttttttatttgggagattgtcagaaaagtatagaacaaagtatttgggattaaccctaagaatttttaatcgctaggtgagagctaatttgtttattcatcgatttttttttttgcttaaaataatcttagtttttattttacttgcagaaaaaaagaccaaatggcaaagcaaccttctgatgtaagttctgagtgtgaccgagaaggtagacaattgcagcctgcggagaggc

SEQ ID NO: 37847 - DNA, 2408 bp, Homo sapiens
tacttatccactactgagattatctttactgaactgctggccccttctgcctgttggccttgctgcctctgcccagcttctctctccacctgcactgcccattctcctcttgtccttccaagaaattctcctcttcctttggggcttgatgtggggattcaccctggtgccttcctgccctggctcccccacttcctctctggccagtggtttttttccctctcattttatttgcctctgtattgtccttactttattatcttgtttactgttttgtgctggcgacacagctattaccatcagacctagtgggtacacagacacgtgccttgaagtcaggccccccacctgatgctggtcagcaacagggccactggagccccttaccctgagaggggcaggggctgtcaggaactggttcctggagggacacacaaggttgtgaatgttgaaggagtcatcttctggacacatgggatggccacaaaaggcagttacctccaggtaacccagtcctcatatagctcttgatttaggctatggagattacagtacccaactgggtggggccctcctctttgtgcacttgtgattgtgtgtatgtgtgtctgcgtagagaaagtgagagaggagagaactgtagtatatggtcacttcagttgtaacttactagcaaatttggtctttaaaaataatctccttcacccaaatgagttgttatacctttctaaagtatttttgcaatttagactaaaacagagttacccaactctgtaagaaggattgttttcacttaaagagtgacagactgagagcatcagtgaaagtgtgtattagtcagctagggctgctgtgcagagttccagagactgggtggctcacacaacaggaatttatttttcttagttctggaggctggaagtctgtgatcatggtgcagacttagcctccagacctgtagatgctgtcatcccctgtgtcttcacgtggtctccctccgtgggtttctgtgtcctgattgtctcttaccagaacaccgtggattagagcccaccccacagtgacctcattttaacttaatcaccttattgatgaccctgtctccacttacagtcacagcctgaggtccggggggttaggactgcaacagatgaattgaggggacacagtgtacagttcagcccataaagaggaagatacccagaagtttcaggagggagtggagcatcttccctgattgtatttattttaatagttttttaaaaaacgcttgtaatcaggaaagacagtctgtcttttttatattacccagtttgggagtggcagaacttaaatgcacttttgattcacagatgcctcttccacctgattaagaaccactgtagcagacgcagacttattggacactaggcgggaggccagctctgcagacagcaggtctcaggaagacggtcaaggcatggctgctgatgatccgcttatgggtgtgtttattgtcttagcccatgttagatgcgaggaaccactcacactgcaaatgacagctcctggctcagtcttagtgtcatacttgcctttaactggcaactcccctgcaatacagggattgtcatctttagtcctgactttccaattccatcttggatgtgctaccctggccagaagccactgggtgtgcccttactttgacctttcaccagtaaattccatcttagggggctttctctaattgcttcagactccctcctgaccctttataccaccccaaaaccaaaggccctggtttaggagctgaattgtagcagccgttcctcagtatctagatcgcagggagatttcactggagctggctgaagctgttggcgctttgagcagcgttgagccatcagtcctagttctgcgtctttgccccactgcagcttttggccacttgccccagtttagtgtcaccaggccccgactataagccacagtaatttttatggctgcaggtattagagggcagccagtctacagaggtaggggctgcccatcctccagctgtcttttgcaatacgggcatacacttcgagccaacagcagctccagccggccgtgccagctgtcaaatgctttctgggctggcacggctctttgaatccgtggtaatggcttcctctgttgaatgtcgtccaaaagcaattgcttgtcagcttaaaagcgtgtgccatgttgtcatgcccgccgtctgagagggcaggcatccccgcacacttgcagactgggatgctgtagcatcttctcatgagtcagggattgggtgtaacttttgccaaaatttcctgcattttccccaccctctccaacatgtctttgaataccccatatcctttacatttgagatgaaagtggaactctaaaaaccttgg

SEQ ID NO: 37848 - DNA, 4602 bp, Homo sapiens
gacttcctgatgtggaaggtgagggaacagaaggaatcaaggattctaaaggatgatttgggtcagagcaattagcggggatggcgcttcctgagaatagaagcaggagtgggaagtgagatcggttggggaggggctggggtggaggaagagtgaatggagagttctgttttgctggaccacgaactcaactcaggggttatctagaaacaaagggctgtcaattcattttaaagggcttttttttaagttgagtttctggaaagaaactccaggaaggtggactgtacccactggctgcttagagaaagcctggagcatgaatatttagacatttgctttaatgaagcactctcataagccggggaaacagggccttgagcatctgttcatgagaggtggatgatggcccagtggcgcctatggagcatctatgaacacaggccagacagggcacaggagggaggtcctcaagcctagaggatgttagactcccccaggggcttttacaaaatacccataccagaggcccacctctctgagtctgtggtgggggtgcagtgtcatatttttaaagggtccctaaatgactccagtgtgcagctgggcttgggagctgctgaatgacagcttgctcaaaactgccagggatgactccagcagtggtggggcagccacagcagcatcgggtccagcaatgctccccagggacaatgctctgaaggacagcaatcagcaaggtgctttctgtctgtttaaatttctgttgtagttgcaaaatgatcaattctcttttctgtttccctttgccagtttgccctggcacaggcatccatgcctccagccaaattcaaggtgagtggaggacagagtgtgctgtagggcccaaggccaaggccaaggccacggcagggtggaggtgaggtggccccgggttgtgagcctggggagagcccagtcatcatcaggtgagtcagagccttcaactgacaaacccaaagaactcagcgagctcagagacgggaggcggagccatagtgtggaccccagaagggctagaggtagaaccgaatctgtgtgtggcacaggcagtgaacgtgggtggatcatgctgtgcttgagcctggccttccatagctcaggagagtgtagagtgtgaggggaatctcataatcatgggaaaagtgtcatcatcgtcccctgaaaaacaaggacaggaggacacacaggggcaggctctgagagagcacattcaggtgtgagcacttagaagggaaaatgatgatttgtgttggggaacagaccacaatgcacattgcacccggttagacaccaagctcttccaggggaacttctacttctgattgctcaatactatgcagaaatggcctccgtgggagcctccacaggcacacccttgcccgctccaagtccctcccaggaccagactctctgtccctgccccagccagcaaggctcagaacagtggctgctcccaggtaactcccagcctgattccgggtccagtcaccaagctctggggatggccttctgatggcttataggtaaatgctctcatccctgctggaagatcctaataacattttaaattgtgtctctctgtctgtggggctgctagcattagccagtgtgcctctgactcagcgggatctcgccgtacctggcacctagtaggcactcaacacaccgttgttggatgggtgtgtggcaactaaatgtctgacgaggactcaggtaaatcatcttctatgaaagcccagtcttttcttggcctcttgaccttcatcatatgtatgtactgtttgcactttcttttttttcttttttcttttttttttgagacagagtcttgctctgtcacccaggctggagtgcagtggtgcgatctcggctcactgcaatctccacttctcaggttcaagcaattctcctgcctcagcctcctgagtagctaggattacaggcgtgcgccagcacacctgactaatttttgtatttttagtagagactgggtttcatcatgttggtcaggcttgaactcctgacctcatgatctgcccaccttggcctcccaaagtgctgggattacagatgtgaaccaccgcgcctggcctgtttgccactttcaaaagagtagtgagaacatggagcctattcaaatgacagaacttttttaaacagcaggtccagccagccctttggcaaaacggctctcccttttagacgcccctttttgcctcctggtagccccctcctccttcctcatctcacctgtttgggccctggggccactatttctcctctcctttttaaaagctgctgtccagggccatagcgctgccaggattctgataaataagttcacctgaagaaaatgactgatcatgtcttgatgaactcactgtcactggctgctctgggtggcatgtgcatttcggacaatttagttgcttctaaacttggtggctggtataaaacagaagtcttcatgagtcataaaaaaaggacacgttggagaaataaatgtcaatattatgggctcttttatggagtatgccctatgccgttgcttagaacaacccaagctcactcccgcctaaggctgcagctgcccgctttttctaaatcgctcttctctctatagctacagggctggcctcttcagcagtcagggctgcttgaatgttactttccagtggcaccttccctggtcacccactcattcccaccttcagtcttactatctgggcagcaggctttgcgaacactctgggagcgccagctttaatgtgtgctagaacctaggattactagacctgggagtggctgtggaatgatagggaaggactcaggtcctaatctctgggggcctggactatgtgctccatgagaacaagggctgtgtgaatgccatcctcgcatccctagcactgacacatagtaggtgctcagggaatgtctgtgggatgatgtagctcttgcttctggaagaatgtggctaccctacaagcctggacaaggtaaagaagtactaagttgggtgggaatgagagaagcttcccatctccctccagacccctgatagcatccctctgtgggaccccgtcatatatggcctttcacagtacaccaatgggcagcacccagatggaggctgctcaaaacttccctccagaggaaatcaggcgtaaagtccttgcctaccagcaggccagggcagccctgggtcacagtggctgttttgcaatggtgtctgggaagaggcctctgggagctctttctcaatggaaccaggctctcacaggcatcacaggtcatatccctgttgcctcaacctggtccaactcacagaactgacctacctagtggggctgggaaggtttaggcagacagacagacagacagactgcctgaggtgtgagggagtacacttaccccctgtgaccaaaaccccatgtgtggccagcgtggccgattactcatggtctggggagggaggacagccggatccagaggtaaagtctaacccatggagtcctaagcaatgggaaaggagccccatgtggattaaataaacatattcctgcctgcagatccccttttctaaatgcataaggcagatgtactatctgaaggactttggactcagtgagttgtgacttatgtaaacaataccacactgacttaaaaataatccacaaggcaggaaaaaaaacctctttcattgttataaaactgaaccaagattacatttttttctcctgtaattgcttctcagggtccgtaaatagaccttattataaagagctggggaggggaacagcaaatcaagataaagtacaacctttttttagattatttatgggttttttttttttggtctgattctgaaccctttgaagaactgaaggaatatataaagtaagttaactggtttcattccaaggaatgtcaaataaaactccagtttcagagagacagaactctaccagtgttcccaaatgccaagaaccttctatgtcatgttttctgggacctaacgttattctccttaaacctgccatgattttcagttgaaaaatacccaaagtggatgcgagccttgcccagggagggcatcctgaatgtgtgattcccatttcccacaactcagcgagggaggaagaccctgaccaagaggagagcagtgatcactgcttagcagagagtagcttctcagggacttagcatttgaaactgacaagacattgacctcagttgatcagcctgagccacctacttttcttggctgcctcttccccattccagccactctctgtgtttagttcttttttttttttttttttttgagacagggtctcgctctatcacccaggctggagtgcagtggtgtgatctcaactcactgcagcttctgcctctccagctcatgcaatactcccacctcagcctcccaagtatattggactacaggcatgtgccaccatgcacagataatttaaaaaaaaattttgtagagatggggtctcaccgtattgcccaggctagtcctagaactcttgtgctcaagcaatcctcccg

SEQ ID NO: 37849 - DNA, 1722 bp, Homo sapiens
cagggcaaggggcaaagcctcgtaccacaagctgaccctggtttggtgggagtctcttctccccatcatcctctttcaaagatattggctgacagagcctctgccatctggagcattgccaggcatcagggcaggaagaagggaatgtgggaaattctgcatcagctcttagaagcactcaccaagtgcttcatgcctcttctgctcatgttttacaggctagagcaatcacatggccatgcctaacctgaaaagtgaggagaggtgggaagcagtgagtgcaatcctatgatgtggtcagaagaagcagcaatggaaacattggtggataagccttgtggctaccataccacattgaagttccaaaaagttggaggctgtgttacttgttatgctttctcttcactgcagtacttagcctgtagcttgggcaaagatgccaagtgaactaggaccacctccaagcctggcaaagacttcctttcctctaagagaggctatgatgcaagaggtagttgagaatttttgagaatgttggctgaagctatcaaaacgctggcagggctttgtataaaatttatgggagctgacctctccttgatctttagtttcgagtctcaaaccccttttctttttctgttagtattcaaccccctccaccttcacccccatcttctaggtctctctagaactgtccctggctcgactgttcaggttgaacaatcttctgcctgacccggagaacacaaagcaactcccttctgttggctgtaatgtgtgaacgctgagcacttctcaaaggccaagcactgagttcaatgctctctcagatcattggattaattattgtcacaaattagctggtggaagctccactgttcaggggatttcacagaggaggactctaaggtttaacaactgacccgaggcacttggctggtgggcagtgtctctgggcacctccctagctgactctcctatgccacctgcctcgtgaccgggcacatggccgaaggggtgagtgggtgccaaaggtcgaccttgaagcgtgtcacccgctccctggggaactaagtgttctgtgtgggggctgaagtgcagagataatagtggaatttacctctcaagactgcagggctaagtgtgacttttgtttgataagcttgggttttatgtctttaggagcaaacaaacaaaccataaagtggcagtctgttggagtgagtcccagctgagcttgcaggaagggagaggctctgggctctgcccctggggaagagcgagagaggcaggcacagtgcgggtgggggagactcatagagcttccctttcctcatgtgaaaagtaaatcggattctatggtaataacccaaagctcacttaaaaggctcattaatgaggaaaacaatagcagtaagaacaatggctatattacactgatgccgtgtgccagacaagatactgagaactttctatgtatcatctttttgaattaccccattttagatatgaggaaagtggggattaggcatttaaaatgtgcccaagctcatacagtcagtgagtgacagagctaggttagaagcccagcaagacgtccaggccccacgcccagccactaagctttactgtggaatgttgacagtgatgatgtaagagggggtggcgcggataaagatggccatgatgatgatgatcatgactccaaactctttgctagtt

SEQ ID NO: 37850 - DNA, 422 bp, Homo sapiens
ttgccacctctgccattgataccaggcacgccatattttgtagagccagctttatttttattttgaagtggcttccccctttctgaaaagggacttggcaagagttccgttctgtcacagtgaattagacaccaacttcccttgtcaacagaagttggcctgttgggctagacttgggcaccaggtgccacctcctgcttggctgccctctcagtgacatcatctatacctggaatgcccagtgggtattgcactaggaaagaatctggcctgcttggactgtgtctggtcacaggtcagtggaatttgaggagcaacacagtggcaaagccccacaaggactggcagcctgactcaagaaggctctaaaccattcatccccttcaactgccacaccaccatatctggcccatcagtgctga

SEQ ID NO: 37851 - DNA, 1128 bp, Homo sapiens
gcacttgaagggcaagatcatcttttctgaaaaccaaaggttagaatataaaaagcctcatgaattgccaaaacctttatagtaactactgaggagtagtcagcttctgaaatatgaaccacatgcctataaatctgatagaaaacagtggtagagaaactaaaaatgcaacatctcaactaaatacaaccaaaggccaaaatgttgggaaaaaatcattaccagatttcgaaactttctgtgaaacacatatgattacacattttgtaaataattactacaaagaagtttttagtgatttgggaatctgtgaaactggtcgttttgcaaattgatttttaacatagtggcttttaggcaattggtgtgacttttggcaaatgttcttgaggtcaggagtttgagaccagcctggccaacatgatgaaaccccgtctctaccaaaaaatacaaaaagtagctgagcgtgatggtgcttgcttgtagtcccagttactggggaggctgaggcataagaatcgcttgaacccaggaggcggaggttgcagtgagccaagatcgtgccactgtactccagtctgggcaacagagtgagaccctttctcaaaaaaaaaaaaaaaaaaaaattgctaacacagaagcattaagccagcaccacacattccacacattccacacatttaattcctgtggcttcctcctgccttgagcagtctggggatgcaactggggccaacccagtgggcagtgcattgaatgcagtgacattactaacatctgtttctgacccgtacttctgctgtgacccatatgtggcctcctctgctctcaggctgaagtccaggcacctcgtgggaccttccaggcctcacggatctggctcctctaccccatgagcccagtgaacacctctcgtgtgcagggcctggcgtccgacctgcccttgagatgcaccccgccacactgcagtcggtgtcttgtgcactcctctctagtgtgccacctctgaaaggtgggcaccagccaaccctggtcaccattcacagtagcacagctaaacgggatcaattagtgatttttaaagttcagtgctttgagacttctgcttctggaaagatggagtagata

SEQ ID NO: 37852 - DNA, 1513 bp, Homo sapiens
aaaatgtgtgcaaagtgatcagagcagggaggagcaggctggggaagaatctttccaaaggaggtgaagaaggaaggcacggactccaggaaaatcacctcccacccaccacttactaaacacacaggagaggtccccattctctgtatctccagcccacacagcaactctgcaaagtggatgattttgccccattttacagatgaggcaactgagccctaagaagctacaattttcacccaagttcaaatgctatcaggtggcagagaagggtgaacacccaggtctgtgggactctccactggttcctccttctagggccccgtgtctccaggccaaaggccaagtactttccagcctttaaatgcgacatttgcactcacaacagatgagatgggagatgggttttggttactggattccttttaatttcataagaacttggtacatctgtgtttcaggaaaaaaaacaaactattttcaggttccagtaaagctatgaaatccagggaagtgtaaacagtgcaaagctggcttaagccctgggtcagttctacaaaggctcctctggaacccagagatgccagagaaaccagaaccagacccagtttaacacagacgatgagtacacaggctgcagccgcatgacagacatggccccacggccccacagcccccagactcctctctttagataataggccacaaagctgcctctgtgcagttaacttcttgcttactggcttgctttttaaaaaaaactaaaatcaataccatagtgattaaaaaaaaaagtagtcttcacaaagcacggggagtccctgagatctttctttctcctctcacatctgccagaatgcaaataaatttccctagggtctcagattcactctccaaaaactaaaggtaccaccagtcactcaaacttccatgtaagagttcagacatcttagaggaaatatgcttttagaacccatgcataaggtggaaatgacatctgtcaaccaaaatctagtgcctcctcttcatgctgtggcgttgtggccaaaaactacacggcccagcccccctgcagcccgacatggccctaggtccagttctcaccagtgggaggagaggggaagcgtcacgggtctcactcaggccactctccctgtctgctggctgaatgccaaggccgccgggacctccgaggtctcagggaatggtggagggcgtgagatggaaggaaccagggtctccgaatcacaagggaaaggagagagcctgccaaccaggactgttccacgagcacgtaaggcactggtgtgctagggttcatctgtatagcttctggcattaccctatctaatgtatctgtgtgtacagaaatgtatttattcctgtatgtggtgtgtgcattgttttaagaaaccctgagatccaaatgtaggtttttattaaattaaatacatttgcagcacaggagggttcctcattgtacaaattattcactgcaggattcctttacaaa

SEQ ID NO: 37853 - DNA, 1931 bp, Homo sapiens
ccaggcaagattcttcttttttctttttcctctctggttgttttttttgttttgtttttttgtttttttttttcatttccttacattctctgtgcatttgcctatgcaccgtgggatttaaacaatagattgggaaaacagtggagagggcactgagggtgcccttttgtggtagaaattgattttgcagccctcccctcccccccatacacacgcacatacacacactgggtattttgttagtcttaaccaaagatcaaaacaacatagccttgaccttaactcacaaacagcctccagctacagggaaaaagtctctgagcagggggagtacaagtcccaccagagcccttattgatggcaatttaacaacaggtattttatttaaggcctgcatttttcatacagagacacagtgactcggctttcaggtatgtctcataaggaagtaggaatggagaaaagacttgggattttgaatattttacacagctttactgatgaacagtaaactggaagtgatcgccatgtctgactgtaaaggaatagttaaataaatgtgccacccatgagtagaatgcataccttacgcacgtgtgcatgcaccttctccaggcaggaagagtttcctgtgcacccctcacctccacccataggaagagctatgggacctacaggaactccagtgctcctggggcactcccagcctgtggcactggagtgtcacgtggacaacagagggtggctttgtggtcagaacagcatgggctcaaatccagcttggtcttgccttggcctgcgtagcccgggcagctcttctgcctcccccaacccagggaagtggggttgatgttctgaatctgcagggctcttggagaagttacagggtgcctgacacatgggagccaggctctgcccacagtcacccagccagcatgttgcagagccaggattttaaattagatccagccagttccagaatcattactttttccgttccgtatgcataccaggctgcctctttctagattatcctccaaaaagccctggggaggcggcagcagcatgagcggcagacaggcggccaagaagtgaggccccagacagggatctgagcgtgatctttgcccttgggacgcaaggcatccatccaagaggtcacagaaatcagcagctttcaccgggaagccccaagtcctgggattggggtgctgaagggggatccaaaaaaaacagtcattgatttggaaggagatgctgttctccatctcagccagctgttaaagggacatggattgaactcccaggcagggaggggcattttgtttcccttggccacatcagcatgtttttacagttgagagagcaggagatgactctccagcctgtggcagagagaaagtgcccttggcccaactccgtggaagatgttccccaccccccttccaggagaagctcctgctggtggatgcacgaacccagctggtggcgacacaaggccagtgggcactctctgccttgctgaggcctcagcctcctggctgcgaaggccccgggttcccctctgcagccaagtctttacttccccttcaccctgaaaaacgtcttcacagactatcattcttggtctcttgactgcctttctccggtttcctttcacaatccctcagagatgggacatctctccagaggacgcctgggttgtgaggatctatggtcagaacattttggtcaatgacagattacatacaccacagtggctccctcagattataaaggagctgaataattcctatcaccaagtgacagtgctatgccatctaagcttgtgtaagtacaccctgtgatgttcacacaatgacgaaatcaccattgttaagtaaatgggtttgggagaaggttcaaacagcttccacctgccccacccttcc

SEQ ID NO: 37854 - DNA, 2146 bp, Homo sapiens
cagggtgggtgggccacttgaggtcaggagttcgagaccagcctggccaacatggtgaaaccctgtctctactaaaaataaaaaaattagggggcatagtggcatgcacctgtaatcccagctactcaggaagctgaggcaggagaatcacttgagcccaggaggcagaggctgcagtgagccaagactgcgccactgcactccagcctgggcaacagagcaagactctgattcaaaaaccaaaaccaaacaacaacaacaacaaaaaaaaaaaacagtaaattccaaatgttgaccaagttttctgtcctagacttctgtgttgagcgttttaaggactgtctggggtctgcgtccacagcgtggtgtttgtgcgtacccctcaccgcagcaccactgccaccctgaatcctgccattgcttgatctcccatcaagcctttctcagccttacccactgaatttggacaacaaccctgagaggcaggtcctgtcagtcccctcaccttacttaggaagcatatcaggttctgagagggcagagcctcacccagcaaggagaagccaggatctgaacccaggactctgtgatgaacaaacttgtgctgtggtctcatcaaaatacctgtttgtctttgtccatggtttctggcacagagcttcccaaacccttcgcatttcctgagtgattccactgtgctttgttattcagaaacagccccttatacaactcctacctgagtttgcacaaaggaggtggccctcgcatagtttcaggggagaggctggccacgtcagaaaggccaagcacgtgattagagagttggaggtttcagccccacgccctgatctccagggagcagagggagctgaaaatttgagttcagtcacatgccaatgatttcatcacacatgcctacttagtgaaaccctggacaaatactgcaacagtgaggcttggggacttcctggctggtgaacataattgactctctgggagggtgcagcaccctgactccagcgggacagaagctcctgcacctgccgctgtccccgcccccacccctgccccagaccttgctgccctacatctctccatctggctgctcatttgtatccattataataaaactgtagttgtaacctgtagcacattcctgagctctgtgagtcattctagcaaaccatccaaccagaagggaggtcatgggaactctcaaatttgtagccaagttggacagaagtatgagtagcctggagacccaggacttacagctggtgcctgaagtgaggacagtcttgccaagccccttcacctgtggggtctgcgccaactctgggtagttaacatcagaattgaactgaggtgtgggacacccagttggtgccagagaatccgtgctggacggacaggcccttcacccctcccaggccctggaaggagcctcgcctttcctcctcaccagcttctccctgatcacatgcctgtcttttgatgcaatcaataacaataaccgcacactttctccagctcagaggcttcctgattgtgttccacatggtaccagattgttaatagagcatcaagaggggttgagacctcgtaattttaatactgaggggcagataatctagcctgcagtgggttgaaaatacacgatgagaaactcaaaatgcagttctctctccttcccttaaataaggtgttcacatggccagcataaggcataatgctcagatggaaatattttgaaacacaattctgaaaggcccatcatcagtaacgtgtggggcagaacacatgggaatccccactgagcagtgtgtgcccgacaatcagtgctagcataatcgtttcacaaaggtttaatagactaccttataaggtagcatacttaggcaattgatttgggactcaaagggcctactctttttatgtatgtatttatttatttatttttctagagagtcttgctctgtcacccaggctggactgcagtggcacaatcatgcctcactgcagcctcaaactcttgggctcaagcaatcctcccacctcagcctcccaaagcactgggattacagtcatgagccaccacaccaggcccattttgaaagctaagtttgccctagatgattccctccta

SEQ ID NO: 37855 - DNA, 843 bp, Homo sapiens
agactcatttgtgaagcagagtttaacatgtggcagctattccttcttctttttttaattaatggaataaccatcatgtttcaaaatgttccaagacacagacatgccatggagaagtgaagggtgggagcacatgagtgtatcttatttcaataagaatacagagccaaggtatttgagcataagtaaattaaaactcgaggacagccccgaataacaagagtgggatgatcagtgaaagagacccaagaggaaggaaaccaaagtcaatacgaaaagagctggccctggcctgaccttcccatggtaacggtcaaatgctcactgggctggtgacgtcaaacctttaccatccccttgccaagcttttcctcacagagttgcaacgcaggctggaggaagcggtgaaagggcaacaaaggagggacccagctgcctccactctcagttcagggccactggaaggcttctgccctggcaggcaagtcctcaaaaaaaaaaggcagtgagcctcagtttacccaggaaactctctggcatcaggccttccccacctcctctgaccaactggctccgctgcctggaggaattggcatggtcctaggtgaggaggcacaggaatcagacttggtacctggatggcgaccctcttctctcttggggacctgtcctttgtaggaggcctctgtggagtgggatagccccaacttcccagaagggaaaaaaacttttgtaaaagtgagaaacagccctctccctctccccggtctccctctccctctccccggtctccctctccctctccccagtctccttctctctctccctctctctccacggtct

SEQ ID NO: 37856 - DNA, 708 bp, Homo sapiens
gccgcagggtcctctgcctaggaaaaccagagacccttgttcacatgtttatctgctgaccttccctccactattgtcctatgaccctgccaaatccccctctcggagaaacacccaagaatgatcaataaatactaaaaaaaaaaaaaaaaaaaaaaaaaaaaaagtgagaaacataaaaacaactcagacacacatgaaaggaatctgtaaattatgaaaaatctggtggttctatttcattctgcaacagtttaaaaactgcaagataaaaaagatcgagataaaaatagaaacctactgttaccatgtctaagcaaattatgccattccacccccagccctgcaaacattctaggtatgctcctctggaggtcacgaacccagacgcaggcaggggctggtggttcaagggacaaataaagaggcccggcagccccagagacccctgccccatgtgcaaggggcagccaccactcacctcctgcccacttgcaaatttccaagagaggcagaagatccagattttaaatctcctgctttgaaatattaacaactaattttttccagcatttaaacactgccggccaaatagaacacatctaggggcagatttgtccagcagctcctctctttccccatttgcaccctgtattctaaacctctgtgctatttctagttgaggtcagataattgtgtttttctcct

SEQ ID NO: 37857 - DNA, 2270 bp, Homo sapiens
tgggtactgtactataattatataagatataaccaatgggggaacctgggtggagggtacccaggacctctctgtactatgtttacaacttcatatgagtctataattatttcaaagtaaaaatttaaaaaaacaagaagatacatagcagagagtcaatatacacattttcaacaataaacatgtagacctcctgaaaaaaacaagcttttttttttccttttcctcttaacaaggatgtgcacaacttttcccttggaaggaacttagacacacaccaattaaccccgtgatgcctgtcagtaatgttggaggaagagagacagggcctctcaggtgcaagaattaggatgtccccagcctgaatgccaagaaactcctgtggcagccaagcccccagggtgtcagacccctgaagggaagtctgagctcctctttctttccttaagtgatcctgggagaggtcacagggcagcagggccgggaaaatggcacgtggaaagcggtcacttcagaaccagaaggtgttcttttccatctcatcaccttcttaagacaaaccactttccctccttttcagttctatctgaaccaacagctacaaataaataaacaccactgtttgcaaaggccacagagattaatattattattaatattaatagtattaatggagtctaatcatagtaaatacatagagatgaaagatctttcccaaagcaagttattgataactattagggttgacaactgaaagatacatttgcaatttatttttgaagccacatagattcatttcagccgaccctctagttatgggactagaccacattcaagttgcctttcaaatagtactgtaaaattaaaatttaaaaagcatgtagacgtgactttaagggacactcaaggaactaccaaacaagagctcggcagccaacaccctttagtgaaaagggtaggacagtttggggttggcacctgggaaaatggtccacatgatgacctttgcaggggtgctgccctgtcctgttcccagcagcctcgccccctttcttgcccggctcgctcctcctcctcctctgaccctgtcagtcaggcgttaactgaccttcccagggctgggcaccttctataggagcttcctccccttctccccgtccatgggaatgagtcagcagggtttggttggctccacttcctgcctgtggttattatagctgactcatcagaccatcctgggtacacagttcagagtcttgatgcaattcacttcacgttagatcatatttctctccgtcattaaatattcttggaaaacatgattttcaatggctgcaaatattgccaggaccatctgcttgctgaatgctggtgtgcgagctggcagaacctccatgtgctccaggtctctgatccatacgtggagaacgcacacccacatgtggccatttgctggtattccgtcactcactaagtccccagcagagctactgctctgagtctaagcatctaagtatcaaaacatgatacacacacacacacacacacacacacacacagccctaaaacaaatgttactgtgatcctgaagccacttgtttaaagaagtttactttcttttccacctgaacagtgatagacagccagtgtgcaagttcaaggagataatattaaagaattattggatcatagatgttttgaaataattatgctcaccacacataagattcattcaataggcattacatgcccaaaacacataacaatctaaaggctttaaaataaggcagtttaggccaggtgaggtggctcacacctgtaatcccagcactttgggagtccgaggtgggtggatcacaaggtcaggagatcaagaccatcctggctaatatggtgcctgtagtcccagctacttgggaggctgaggcaggagaattgcttgaacttgggaggcggaagttgcagtgagctgagattgcgccactgtactccagcctgggtgacagagcaagactacatctcaaaataataataataataataataaataaaaaaataaacagaataagtcagttttctacctatctgaatagatactgtaatgttaaaattatcaccacaaagttcctcaccttttaggaactcgagctggtaagggtgaggtggacttttataaaccctcaggacagtggctgggcggagactttcttcacacagtccatcttctggactaaagaagagaggccgggcgcggtggctcacgcctgtaa

SEQ ID NO: 37858 - DNA, 1563 bp, Homo sapiens
gtgtcgccaagccagggcagcctcgtgactacagtgagttgctaacagcagggcagcactgtttcaaacagacacccaaacacctgtttttcttgttaagtaaaaacaagttaatagtcacagcaaaaccatgaaagaaaaccacaagtgacctaaggatttctgactcacccccagcctgggtactttgtgatattccaccaaaagcatcagccacctgcagctgccctgagaactgctgatcagcagtccttttgtctctccaagtcagggtaattacccatgtgtgccctgcccccagatggctcttgccttcagaaaaaaagaacagagaaaaaaaaacgaaaaccaccttccctctaagcccaagtgactaagaaaagctggcagggaccctccctcagaccataatggtgggaaacctcttgcaaaacagttttctctgcaagataaactgtctgttcccagcagccaagtgccacacccgagagagggtgagaggtttcctttaagaagcctccagaaaacatcatgaacagttgctcccctatgcactaggaataactgtgaagagttacaccctaataaagatttttttgttctttttttattttaagtgtagcctccaggataggcccagcatctgcactattctagaaaccagtgctatggagctccagctcagcctagacctggtaacctcctatgggcagagggacggccacacaccaggccctgtccctgtttgatcacttactgtcacaagtctagctgtccaagggggcgcagggacctgtcaggcctcatagccattctagaagaggtggcccacgtgaaagttgtcatgctctgtgtcacatagctcaggtcttgtggtcccacctggaaggaactgggactgggctgcaagccaaggctgccttctataggctgaaccatgcacaagcggcagtaggctatgagttgcctgttcccaaatggtacccactaggctgccttgccagggactgggaccctctgaccccaccagagtctccttctcagcaagggcaggcgaggggacagccccacttcatctgcccgcaatacccttgtgcctcctgagcctccatccacctgcaagtgctgtgccctgtgcccggctgggctccctatgagcccagggaacacctctgccctctaaacgaccgccagtgggcacagtgttcaggccatgctgccaaggcagcagctaggaattcaggaattcagagaagatgcgaaggacagaaatatgaagggactgctggggcaccaaggtgaggagggacagggttgccaaaccccatgtgtaggagccactgtgcatcctgcccgtgggacaagcaccacctgaagacgcaagaagacctccctcagttcgagggaaaatatctcccccaaaggcccccatacatactgaaaatctcttatgataatcacccctagtgattctaggtcactgcctctgctcctggattgctcaatctgtgggacgaggcacatggaaggtaacattcatttagcaactcccaagcttttctt

SEQ ID NO: 37859 - DNA, 494 bp, Homo sapiens
tccaaagtacttctcatgtgcctggcataataatgcaaacaaaactctataagaaagatctcatttcattctcagtgacttcataacatggtttcaactgttatccccactgatggccaaggaacctctgtgccagagaggttaagaaacctgtccatggtcacccagcaggtcaatggcagggctggaatttgagcccaggcaggccaactccattcaggattaccccactctcctgaaatgtctcagccgacagccacatcctaatgtgcagtgaatgcaggaatgggcccggtgcccaggctcaacactgagcaaaatccaaattggactggcatctcaccaaagggcttcttcactccaaaatgtcagcgacgtggctgaggatggaggtgaaccgcgcaacgggcattccgggcccctcttgccaaaatgtcaacagagaccctcatagactttgttaagtgcaaacccaacagtagctataactcctg

SEQ ID NO: 37860 - DNA, 1737 bp, Homo sapiens
gtaccgattaatgccacatatttaatactttttcagtaccccaaacttttagaaatgtttttacttgttaggtgcaacataaacagctacacgtaaaaatactattaaatttatatgctataaataacagtatcagcaatgattcctacaaacactaccctgccaaaaaaaaaaaaaagagacccaaatgcacactaacgggagcttaagtctccacaagagcttccccagcctttctagaggacggtgaaaacaggctgagagcccgaggctcagaaaaacagctcagaggggctggaggccagtctgaaagctgaggctgcacatgggatgctacgcacagctcaggaaagaggttggcaagcaggagccggaaggagcaccccagcccgcaggccaggagcgcccgcaggccccctcagccccggagcacgctcaaggccctccctcgggttcccagtaccccgggtttccagacctacggccaccaggggaggctcggcctcgggacgggtgcgagagtcacgcggcgcgcgacagaccaccaagtgctgcggtacggcgcccgcacctgtataactcgggacgcgtcaggcgcggcgagccccggctgctccccggaggcgcaggggccgaggaggcccgagggcagcggcggggtccttcacagtgactcttgggccgcagcagcttctcattccctctccctcccctattctggaggaagaacgggcaacagcagcgggctcgagtgctaatggcaggaaggcgtgcgagacgttcaaatggacgcgtccatcttgactttcccgtcttgcctcgcgccggggcggggcatcgcgggaggtgcgcggcgtcctagcagtcctggcgcctgcgctgttgagggaagaccgcggcgggttacaacttgggggctatttccaccttccgtgcgactgatgcgaaccccgaagccggactctgtctgctacagtcctggcgtccaagttctctttagctcatgtcactagggacctgaactgccttatagatctcagggttttttcttctggtttcgcttccgcctcctgaccccacgtggaggtaggcacctcaggctgagggtggggagcaggggttgctgattttctctacgtgcagtgaatgctctatgcctttttcggtccatactcttcgaagagtggatgaactgtgtgaaggtcctcacagaaacgttgcttgcaattcccagattcagagacacttcttaaggcgattcaaagacccaagttaagaaccccagcggccactcgcgcctgtaatcccagcactttgggaggcgaggcgacaggattgctggagcccaagagtttgaaaccagcctgggcaatatagcgagaccctgtctccacaaaagaaaaatttttttaattagcctggaggcgtggtgcgcacctgtagtcccagctgcttgggagtctggaggatcacttgagcagggagtttgaggccacagtgagctatgatcgcgccactgcactccatccagcctgggcaacagagcaagaccttgtctcaaaaaaaaaaaaaaaaaaagaatgggttataggagaaaggttagaaacaaagattcatgaaacagttaaatacaaatatacctaattgatattttaaacttttgtttgtgtgtgtgtgtgtgtgtgtgtgtgtgtgtgtgtgtgtttttcttgagacagagtctcgctctttcgccca

SEQ ID NO: 37861 - DNA, 1695 bp, Homo sapiens
ctctgctactgcctcttggaccctgcacaccttgtggaggcccatgagagtgacgtgctgtggttccccctctccccactcctgctctgcactttgtcattcacgttcatctccctccttgagtgtcacctctctctggctcgtcacggagccacggcaaagcgtcctttcccaggaacccctccccctggggaggtgagctcctcgccgccagggccgtgtcgcgcacctcgggccgggtacccaggcggcgctcggcggcgagcggaatggatgtggaggagcgctcggcagggagcgctgccgccctggccttggcctctgggagcggcgcggccagggttttctgtgtcagccaagcccggaatgcgggggcgcctctggaccctcctcttgggtctgggggctgcctcgggcatcctctactcctctcccaccttctgtccttccccatctcccacccacacgtgtggggccccggacccgcgcagcggccagagccttccgctgtggacctccagtccacccctccccttcacttctctttccggctccctccgggtctctcagccccctccccttcctctccgcccccttccccgccgtctgcccagcggcggccttcggcccgccccttctctccaaccccctccctttcccctttacgcccctcctccccctcgtcctcccgccccctcccaccccaacctgctgggcccgccgggactcgcccccctgcccgctcctctcctccagccccggccggcctcggctcggcccccggcccgccccttccagccctcggcacctcccgccggccgcttggctccgccactcggcactcactgcccgggccgcccggacagggagcttcgctggcgcgcttggccggcgacaggacaggttcgggacgtccatctgtccatccgtccggagagaaattacagatccgcagccccgggatggggccggccccgctgccgctgctgctgggcctcttcctccccgcgctctggcgtagaggtgagtgcgcccggctgggggccaggcgagggggtgggggctcccaggaggaagcaggggcctctggggagggagcgcgtccacaggggcgcgcctggctgctggacaagtttgcaaacaccctccacccactgcggtgccagaggagggggcgtaggcgaacctaccgtccactgaccgcggcgcctcaagcgtcccgagggcacccagcctggcttgcgggtgcgcatcgtggtgaagccgggtcggggtcggcgttgcaggctcccctcttcaccgcagaggaggaaatcgagctcggccgggcgcgctgcaagtcctgaagttccgacgagtggaacgtaggtagcaggtctggtctgggatgcgacgagaactttccactagagttgcatggtggggccccgctctggccggagtcccgggggccacagatccggtctcccgagggaccggcgcggggcgaacgaacgggctgcgggagtcggagccgcagtccgggagccgcgatagactgaggccgagcgacgggccagggggggacggcagtcctggctgctcccaatgggcccttacgggcattattagtatccctttttaggggcacccagagagtgtgggaaaaggggagcgttcttttcactcctgttatggcagaacagaacttacagt

SEQ ID NO: 37862 - DNA, 705 bp, Homo sapiens
ttttctcatacaacaagcagtctgacagcaaccaggttgggattagacagtggctccatgataaagtcaatgacctggctcttggctctgacatctatagtgtatgcttttagaacacattgttccttaaatggctgctgtgcttctgggcatttcatttgcattccaggcagaaaaaagcagaagggaaaaggacaaaaagtctcataccagctgagtctgtcctttttatcaagaaggtgactggaacatctcaacagcaaaaaacaagcaatccgattaaaaaatgaacaagtgatctaaacatatttctcaaaagaagaaatacaaatggctaacagataaatatatgaaaaaatgcttaacatcactaatcatcagggagatgtaaaccaaaattacaacctggtttcatttcattgcatttaggatggctatgtcaaaaaggcaaaaaataacaaatgctggcaaaggtgcagagaaaagggaactcatacactgctggtggggatttaaactatcacagccactattgtggcaggccaggtctcggtaacgcaggcctctgtaacaactgtttcagcactgagtggttaagttaaatattaaaagctaatagagccggtgccctcatacaaaggctggaatgtaatgaaagcccaccagaagttttgcccaggcctttcctgggccttgactcatgac

SEQ ID NO: 37863 - DNA, 573 bp, Homo sapiens
tgagtctaggagtggaaacactgagttgtaggttatatgcaatttcagccccattatatgttgccagtcctgcacatcttataggcaggttattgccatgggagatctggactaagatatttcttcccaagagtactctaaacagatctgagaatactcctcagggcaggttgcaactagattgtgaagtgagtgatgcaactggctctttcgccactcatgcttatcattcagtgccccatcctcacccttggctgtcacacactggagccttccctcagttcaaccctcagaaccacctgcaacccagggctcagtagctggggcttgtatgtggactgcaaggttagggtagttggtggctgtgagaagccctcttcattccttcctagccatggagagctgggcaagtcgtttagcatctgggaacctcaggatcctcatctatgaactggggacaattccagtgatacacccttcacaggattagagaagactgtctaggtaaaaggcctggcgaaaggtgaaaaagtttctgtgtgggttgatacaggtactgggtcctttgctttt

SEQ ID NO: 37864 - DNA, 1692 bp, Homo sapiens
aaggctcttttctggttgcattggtgccccccatggtagggacatggacattgcagtctgtttgggaagcttcttttgcaaagcaccaccaagaaaaaggcaaatgccccagtgaaaaagtgggggacaggctgaaagggatgatgagagggtacctaaagccctttggggcccttggggcttgccctgctaacatgtgtgttcaaggccaagcagagaggtacctctgctcattttgttttttgatgttttttctttttcttttctttttttttttttttttgagccaaaaggaatgtattgggccaggggcagtaggaaggtcaccccactgataagcaagccccttgtgcttttgctcagatgtctcagccccttcatgctgcaagccttggttcagagaggttggatagctttcctggtgtgccaggtccctgtttgcccctccagacccactctccatgctgctctaagccccaagaagcagcctgtgggaagggcaacaatgaaatccctagtgctgtggctccagctggttttgactaaatgatactaagttatatttgttcctctaagtaaatccggggtgttcccatattggttgcttatctgaaattcaggtgtaaagggctgtactgttttttatctggcaacccaatgccaacaccgtgttttacaggcaacttcacgttccttccaccgtgcaggcatttctgggctttcactggcacttgggcttttctcctcctgtggctgggctgtgacctcttggggcacacactgcccagccatttacttcctttccttcctgcaagcgccaggcctgttctctccagcactgactcagagccagccacccgctttctcttgcagggctttgctacacttagggcaaatgggtggcgtgatcgcctcttcctcctttaacattctccaagtggcccaagggtcactccagtgaagttaataattaccatttgcaatttaggactgatccatcaggtcaagtgagttctgattgaaggttgttttttttttttctttttcttctaatgaagtgttgctactctgtttgtttgtttttcttctaatgaagtgttgctactctttattttatttatttatttatttattttccgaaacagagtctcactgtgttgcctacgctggagtgcagtggcgtgatctcagctcactgcaacttctgcctcccgggttcaagcaattctccctgcctcaccctcccgagtagctgggattacaggcgcctgccaccaggcctggctactttttgtattttttagtagagacagggttttgccatgttggccaggctggtcttgaactcctgacctcaggtgatctgcccgcctcggcctcccaaagtgctgggattacaggcgtgagccactgcgactggccactacactttatcaatcaggaatcctttgggtattgcataaatagtactaagtagaaaatttccttttgtgctatgtttggcctcagctagctgtgggggtaaagggagtggggtgggagtccttaacctgggtgacagggcagctgctcaggacatgattcaaatatcagcctggtgtgtgcacacagaatgtggggtgggggcactggtctaggttctgcgttttctcctagagagggtagggaaacagggataccagcatttacagg

SEQ ID NO: 37865 - DNA, 429 bp, Homo sapiens
ctctttcctcttagccaggaggtgttttgcttttctgtttttgtttttttgcatcaggacttcgttgcgtgcacagttttagaattgggttggcctgtggttgttaaaagcacaaaatgaggtcagagccacacagggtggaagcaagagcctttttcctgcaatttctccactttggagtggagccttctttgatctgttacattttcactttctgtgacatgatacttggcaccatcccatactgtgtcatgccttttagtgaatcattttgtttccttttcagaaaaccacctcacaattaccacagacctaactactcaggttagtgtgccaacacttccacaagatgtgcccttttttttacattttttcccccaggttgtaggcttgcttagtggataatcccttagcctccaggcagaaaat

SEQ ID NO: 37866 - DNA, 1393 bp, Homo sapiens
cacctcccttttctactttatcctgaccttccttgtcacaggctttagagcaggtgattagcttttcagtcagaaacatctcccactgaaagtctgctatgctacccattcttttgtgaacctgaaattgatgcccaccaatgtggagggaagcctcagggagcacagatggaaggaggaggagtgagtggggaagacagaggggagggggaagagactccctcagaggagtctcttcatgacctttgctctaggcccatcccaggctggacagctctttctcagggttacgtcaacatcagccaaagagggggtttcctacatttgcagctaatttgggaaaaaaatatttacaggagattttatttgtcagaatcccagaaaaatgcccagagcaggaacatattaagtccaaacagagtttcaaaaaaaccttgaaacaggataaaagaattccatttcacataactgccacgtcattcctgctggaaccagatctgtgagttcccaatccccaaaagaacacaattagctggactcgttatatttttgaacacctgccccaaatgagtactgactggctttctctgagcttccttgggaccttgattttggaaagtacggtagatttaaggattgtaactgcaactgtgtttatacagttttcatgagaatttgctttgaaaagcactcagccttatacaaggctgtggattttaaaattccttatgacccatctgaaagtcacacacataatagaatgtcttcgtaccatggacagatctattacatagctttgttttactctgcgtttattttggtaagaaatactgaaaacctgccaactagtcagtcccaggagtttgagcaacacctgatgtaagaactgcctgtggcctgccttctggtaaaaccagttctgagtcactatttatagcccctttggcaaagcatcctagaaagctggcttaaagtagactggcaggaattagcctctgtgctccttcttatccaacttaaggaggtgaaaactgattaatacagacctgcctgaggctgtagataaagaactcttgtttgccaaggctgggcgcggtggcacgcctgtaatcccagcactttgggaggccaaggggcaaggatcacttgaggtcaggagttcgaggccagcctggccaacatggtgaaaccccatttctactaaaaatacaaaaattagccagacctggtggtgtgcgcctgtaatcccagctacttaggaggctgaggcaggagaatcacttgaacccaggaggtagagattgcagtgagccgacatcaggccactgcactccagcctgggtgacagagcaagactccatccccacccgccccccacaaaaaaagaaatcta

SEQ ID NO: 37867 - DNA, 1358 bp, Homo sapiens
ttgtttctttgaaattcaagtttaactaggtgtcctttatattctcttgcagtcccactggggttaatcagcacaagctctaaaagttatcttttctattctgtcattaacagtgtattcccagtttttgaagggaccaagtatggctttgtaaaattataattttaaactctgactcgggaccaaatgaatgttttggatgagattcagatccatgcactagcaggacacaccctctcacttcctttggtcctgatcttagctcttttcttcacccatttttgggccacacactccatttctaattttagctctcccatgtacttcttgccacttcatgcctgttttccctgaggacccactgactgagaaggactgttatagaaactctgttttcctctaggaacgtgctctcagacagtgtccctgagcctggaagtgctccccacatgtctctggaagtggggcggggaggagagccaaaggtttcctccaccttcgctttggtggttggtcaccaggaagtaggtgcacactctaaagtgaaacaaacaaaaagtgatgtctgccaacagccaccaccaagacaagcgtctgggttctcgtttctcctctggtggctcctcaggccaaatgataccttcttgtcacccacggggtctgagtcagaggtgaaactcaacccccacaccgtactcctggtatctgccaggggatttggaattccagaatgtttatttctggttcattgacctaagattcaagcacacatagcctgaaattacagtactgtatatccagagcccagaactgcaagcccattattaacagtaatacattttgtggcctgaggatttttcccaaattgctctcagttgcatgttttacccgatatcattttgtctgttctgattttataagtgccacatattacagaaattttgaaaaagcatgtaatggagaacaaaatcccatactctcccttatccccatacccagacaggaggtatgcgaggaaagagatggaagtttcgcccaggactagacttgtgctgggaatcgccctctcttgcctatgtatacagagatttggagggggatgtggagagactggtggagttatggagggaaagataaggcagtatgtttaaaggagatttggagaaaagttttctgaaggaggggcaaatgaccctttgctatatctcctcatcaaaaaaaaaaaaaaaaaaaagccaagaatctacatttcctgtgtgtgcctctggaattcaatttctgttggggtcgaaggggttaagaataaaggacacactaaaattagcctcaggatgagtgcattggctcacgcctgtaat

SEQ ID NO: 37868 - DNA, 1649 bp, Homo sapiens
gcaccctgcctccgcactccgccctggtcccgagccccgccccgcctccacagtcccgagcccgcctccaaccctgccctgtccccacacccagcttggccccgagccacgcctcccaccccgcccccacactcccgagccccgcctcgtctccacactccggcggcgcctccctacccggccccgcctccgcgctcgggctgccagccctcccttgcacgttccggctcctcttctatcttcacgcccacgctaggccctgagcccagcctccacgtctcgccgccaactccacatcctggctcctatctctgccttccaggcatctcccagctgcacgctcgggcccggctcagagccctaagccctgcctcccggtcctggccgggtttcccagaactgcacggcgcctctccgcccaggcccaagcgcgagcccctcctccacacccgagtccgagccccgcgtcccggattcggacccgcctgcctggggcggtgctgcaccaggtgcgggtgtggcaggcgtctcggagcgccaggtgcagcttcctggtcaagatggtcgccgcctgccgctcggtagccgggctcctgccacgccgccgccgctgctttcccgcccgggccccgctgctgcgcgtcgccctctgcctcctgtgctggaccccggcggctgtgcgcgcggtccctgagctcgggctctggttagagacagtcaacgacgtaagtggagtgtcgggacccaggcgtggcacgtctcgggccgtcagggccgtcgtgcggcttcgcttgaccccgggcttgttcaccctgcctctgccgggtcagcaccgggtcccctgataccctccctgagccttttgtctgttacagccggggagcggggagcggcccctcctccggcccgacctgggctgcaggcaagagccgtcaggattgcgcatgggacggccctcgggtccgagcgctcggactgttactgagggtcaccatgcccgacgccgtggccctcattctgctctgacatgttttggctggatcaggaatctctcggcacatctagcagcatctttgggattcgactcttcctgtccggatgcagccacagtgggccacacccctgaggccgcagggaggacttgccagcgcttcagtttctgcataaacttagaaagcgggtctgccgcttccttaaaaaaaaaaaagaaagaaaaaatttaaatgagggggaaacgtgcagtagtcaccctacctctatttctctcttcttgagttcctgaatttctctacagttcctgtcacagttccgggagagagagtgtgtgtgtaggtggggcgggacttgtgattagggagtgcttgaaaggcgaatctggaggcatgagtgggtggaaactcttctttccaaggcaggctattagaaaacttggcgtctggtaattagaggagatgatgtgggagagatgcaggggcagaattatggaaagtcttgcaaaagagagacaggaagtctggaagaggcattatctccggcttctctggggtcagatgactcatccagcactgtttgggatgggtattttccacatgcatgaaataatgtccaggttctaaagatgagacttatattttgatttccttaaccag

SEQ ID NO: 37869 - DNA, 1205 bp, Homo sapiens
agtttgttttgaggattaagtgatttatttcatgtaaagcacaaggtaaagctctggatgatcagttaaggtaaaatttgagatagagtgaacagctgaccaatatcgaatggtaaaatcaatcacaactggaaatatatctcagttgagggaaataaaagacgtaggtttaagaacaaagatggtggtttttagcatttcaaatcactagacactgctccaaaaatataatctacaaattagggccatctgaccaagagtctcacttgcttttccaacctaatggaaatattaagtccaaatgacgtctgttgctttattgtggtctttagggtctttccatgcaaatcagtggactaatggcagagtattgcctattctttacctttcaataaacttgtggtttcatcctttctacagaaaagaacctaggaggtgtcagtgaaaaaggtcacatcagtgtcctctgggagtttacggtctcgtggaaacaggcaacaacggtaaagacagacgctacgggaccacagaggcgggctcctcacccgctgctgtgcagagaaaggggcgcatcccggagccttctcgcctccaccccgctcccccgcccaggctctcgacagccccggccctgacggcctaagcctgagccccgcgttcagcttctgctcccacccggaccccgcacgacctctataggtcagacggtggcgcccggccggcccacgtgctccccacgggccctcgcgacgcggcccggacgtggccccggactgcctccaatccagaagaaactaagaggcggagtcccgctgagcccctgcattcaaaagatgaaaagatatgggatcacctttcgtcagagtccgtggccgttttgccgagggccgggttggggggttttgagaaaagattctcaaaatccatgacccagacaggtcctccctttcgcgagccgggaagctacagagtaacaacccgagagagtgacaacccggacgcgacgagacggacccagagccgcgccagggccacaggctccgccccgcgcagcctcacctgccccgcgcatgcgctgcaccgccctccgcgactctgggcaggccgggtctctccctgcctccttcgcctcggctctgcgcaggcgccgccgtggttgcccttctgtaagctttttcgtcctttacctcagatagtagaatttt

SEQ ID NO: 37870 - DNA, 760 bp, Homo sapiens
caaattttatatttcttttaccaaaataaaataaagcagttggcatgttaaaatggtgaaatggcctgtgataactcagctccagtatgagctagatataataccttatgagtatgtgctataaatcaacaatcaccaatacatggtgctgtttctcccatagccagtatacacagggtctgggaatcaaggcttccaagtgggagtaggtcctctctgtattattcctagtgatgccctagaataatgtttgctgcctatctccacaactttgggctctgctggtttagagcagactttttcaaccgtaacattattgtcatttcggcctggataattggggacggtcttgcgcattgtaggaagcttggcagcatccctggcctctgccgctaggtgtcagtagcagctgttccccagttgtggcaacccaaaatgtctccagacattgccaaatgtcctctgcggggagcaaaatcgtcctcacttgagaaccaccggtgtagcgttaatcccaaaagtaggaatgtttgcatcaaggggcgtgacaatgagtccattaaacttgaggttgagactgccgtttggccaccttaggatcctcatgccagtgaattaacaggtaaagaaggggcttactgtattggcaggggtgattaatcctaactatcaagttatcctgactacataatgatgttaaggaagagtatgtctaggatgcagctgatttcctgggcgggagactaagtaatcctatgct

SEQ ID NO: 37871 - DNA, 2528 bp, Homo sapiens
gcctggccaaaatggggaaaccccatctctactaaaaatacaaaaattagccaggcgtggtggcgcgtgcctgcagtcccagctactcgggaggctgaggcaggaaaattgcttgaacccaggaggcagaggttgcagtgagccgagagcgcgacactgcactccagcctgggcgacagaggagactccatctcagaaaaaaaaaaaaaaaaaaaaaaaaaaaaaaaaaaaaaaggcatgcctaatagtatttataaaatactcgcatacattttacatgttaatattattacgaaataaagtaacgtttatataattatttcaatagctattcctatttaagtaataattgggtaaatttaacagcaaatacaagaaaaaactgcatggcaagctattttccttaaaacatgattctgaacactaaacgttacaaaaacagatacttgctacaactgtgaaggagaaactgcatttccctattattacaagaacaaaggttttcacaaaaaaatttaaggactctacagccgccttgttctttgttatcccacccctgcccgcctcggctaacggttttggggcccgtttgcttggtgcgtctggaactcctcgggcggcgggcgtctcgcaggaaaaaccgcggcccgtactgcgccgggagcagaagcgctggtggccctcgtaggtcccgtgggctgcctccccctcctgcagacactcgaggagccatccggccgcgtctctcgccgcccggccccgccactaggctgccgcctccgccgctgcacagagaagggcgaagacccgcccctgcaggtgattgacgggcactctcctccaatggtcaacgcgctcggccccggcgggctgggcaagggccgcggctcgcggaggaatctctcttgccctttagtcccgggcaaggtgttgcggccggcgccattttctcgagccgcctgtttcgggtgccgccatgttggtgaggagaaatcaccgttacggccactgtccaaatccccgcgtcgctgcacgccgcccgcccgctcccacgccacagccaccggcggcgaatagagactagagcggcagcgccggcagcgcggggccgttgcccagtgtttgcagttagagccccatctctctggcgtggttgttaatagactggaaagtctgtgtctgtgtcgctcactagtaaccgtgagtttttaccacttcgtcacctgtcggcggcggccgggagcaggttcccgcaggcggcgcggggggtcttccccgcgccccgccgccgccggcctcgcagacctgccctccagccccgccccgttcttgaccaaacatgacagactctgaacatgcagggcacgacaggtcgggaacccttcttgtctgtctttctgtcggatgagaggaggggtctggggcggcgggagcgggccggggccgggcgcctcctgcatgacctagacgtctctgtgtggctccgtcagttccatgacgcgcactcttatgtaaactgctggatcgcggccgcgggggaggtcggcccggccgcgcccgcctccccgagccggggtcgctgctcgccagcgccggccccgcccccggccgggcacgtgcgagccccccgccccccgggcgggctccgtgtgcgccgggcggctctcagcgtcccggctcggtgctgaggtcctgcttctgcccgtccaggtgtcggtgctcccggccagataggaccagccaggaattttcaggaatgggtgttttgatatttgactgcttcccgagaaccgagaacacctctaaaaaaataaacatttggttttcagggaagttttaagcagcaccaaaaggccatctgttgtatacagtcttatcccttggaatttgagatggcaagtttcaagtttaatatgttaacacaaaatacttaggctttgcagaaacttagtttagcacagttttaccctaacgtaaaaactccatggattattccggctagcccaattttctagatggtgtgtatcacttgaatattgagattctgattttttattttttgctctgtgccttaagaggcacattcttgtttccattcgagtttggggacatttacaaagtatactgtagcatacttaaattttggttataattcaaattttcattcgtatatatctttaataatgcgaaaggggggctttcattcattaaacttactgaaacaaaatccattgcatctgattcttacttagaatattaatttgaaaatctagaacctcacaattactcctttgtgaatagaagtaagaaaaaatatacgttttactatagactatatacattgctgaagttttatctgtagtaatgtgatcggcttggtaaagcatcctaaacacgttttttaaaacccagaagcaaaaatcacaaacactgctgaaatttgaaatatctaaatacctagcaatcttgagagggataaaaatggtatttcaacaacttcagtattgtaataataaaagtagattccc

SEQ ID NO: 37872 - DNA, 967 bp, Homo sapiens
ttaaaacaatgaaacattatttggaagtaatgtatacagaaagagtaagttattaatgaaacgctaagtacaacttgttgcatttttcagggtgtgtgtgtgtgtgtgattacctaatttttttactttttaatttcagagttatattcctcaggttgctcattgatttttgcataatttactttctttggctgtttattttattttataacagccatgattctttgtatagaatgcctatgtgagctggtcatttatatctgcttattctaaacgaatctctaaacataaaaatgtttgtgaatcaaatttatatagatttgagacactttaaatgattctgtcatagtatattataagcaatttcattgtgttttcctggggtaaattaggtatgtttatatttttaaaacgaatctctaggattatctgtttactttgtattcttgtaccttttttagaattcttacagtaaaatgtgatttgagctgtgaatgctggggatcagatttcaatttagacatctattgcctcaatgtttgctgtgaggcaatctcttgttttcagtagattgaactttatgctctatcttttagcaaattaagagaaaagggaaaacagaaatcaaatcagaagagtaaatagtcattgaactcctatgatatacagggcacagtgcatgccaggtgcatgaaaaataatgttgttttttagagttgatgaatgtaactcattacatttagcatggctaagcatcatactctgccttgttacttaatcttatacttaaagcagaagttgaataggggactcaggagaagtaaggaaaacaagtagggctataagatttcttttcctttaattttcttaagtttttttcttaactttttatatttaaaagttaaaagtaatacacgccgcctgtttgtttgccctttttttcccctaaagaaagtacaaaataacc

SEQ ID NO: 37873 - DNA, 2059 bp, Homo sapiens
tcttgatcactttttgtagtcaatttgtacttttttccagatcaacttaatcatacattttgatacctattaatatttcatatgctgcattcaaatggaatttttttcttgcagtataataaaccagggaaaaaatggaaggttatgactcaggaatttattaatcagcacacagtggaacacaaaggaaaacaaatctgtaaatacttcctggaagggaggtgtattaaggtaaatttatagaggtatcataagtcattttaacttccaaaataatctttaaaattaaagtcttttgggggatggttaatttttttctcttctcatatagttgtaataaaactgggtctttaaaatgtatcttgcatggaaataccgtacattagagctcatttaattatgttctgggacaataacataatttgttgaaatcggatttgtttaaaagacacataatgctacgtggcaagtactgttcaaagtacaactaatattaaatgatttaatcctacagtgaccctacaaagtagttaatgttattatccccattttattcatggcaccaagaggttaagtaagttcccatggtagctcagcaagaaatggtgagtgctggttgccaattcaggcagtatcctgtgaggtcttgctcactgtgctgccttaatgcatgtagctacatccactgtcttgggcaggaattctaaggggtcatttgagttattatttgttcattattaaagactgaagataatgaccataattttaccatgagacaccatgtagaaaattcagctgttgtttctttgtttctcattgtttcttacctttttttcttttttcttttttttttttttgtgaatagggagatcagtgtaaatttgatcatgatgcagagttggagaaaagaaaagagatctgcaaattttatttacaaggatattgtaccaaaggagagaactgcatttatatgcataatatcctttatttaaaatgtatgttaaataaaatgctggggttttaaagcatcattgaggttttaaaaaataataaatacaccctataaagcctagtttggttttaaatttaaaacaacacattacataaacccagtctagtcaaactttgtacttcaaaagagcaaactgacctttattctttagggaaatgagataactgccctttggaaaaaattctgtgaagggaaggtactttaatataatcagcttaaagtatttcaagagattgtgcttcctgaaggagtagttggcaaaatacttattttattccataattattttacttaagttcgggagtaaaaaattatcattgtgaagattataagtcttatcaaatcttaccactcaatgatagatgctgtatattcttccccactctcccttgggaaatatatacatttaaattgtattcctgctcctacccaaattggaatttcactatatatagtgttctggtcctttaaaaaaatgtattctgcaatttttccatgttaattttcccccaaatatctgtcaggttgctcactacgacttatgactaatgaagctttcccccacagaattgaaactctatcacagacaaaatgtttacatatatggatttttcttctggacttcgtgtttggctccatggatttgttcaccctcatgtctgtcttgctttgctgtgattatttctgccacaacagccacggtaatatttggtagattctgatgtttatttttccagataaatttttaaattctgttgtcgtgtttaaaaaatgtgaaaaaaaagaaagtgaataaaatgaaaaatgcctgttatcatagatcaaaatgtcaaaaaatggaacgatgtaattaccagaggaatacatgatgaattggaacagaaaaatttcctgtctcaaaatccagaagcaaaaagggaacagattgaaattttgactccatgaaaaagcttgcatttgcaaaacaaatacatataacatgagctaaataataagataaataatgaagtgagaaagattatgtgtaatttatatcacttacgaaga

SEQ ID NO: 37874 - DNA, 3119 bp, Homo sapiens
aaacatcggtagtcagggaaaggaaggaagccaacagaagatgccctgatgagcaagttgcagctgtggacaaccgcagccgtggcctacagaggaccaccgcaatacgcctaggacacacgcctccccgcagggcacgtgcggagggcgagagggccagggcattctcgaccaactctatccctcgtggagggagagcagctgggaaggagtgcaagcacccagcacctctaagtctgccccatttctgctctgagcgggctctccacagccagcggttgcctgcaggtggagccggtgcgcaagacaggcgagtgagcgcctggcggccccgtggaatctgggcaacgatgggaaggagaagggcgcttttacaatgtgctcgggtagataccgtgagcatcgggggacaggaaggggagaggccccagggtgttctttatctacaggagagtaaaagatgcaaggcgcagggctgatgtgggtaatttatgagggactgtaggaagtttgggggagctctgatgatcattgccttctctttgtatctcaaatgcagcagcacagtcttcagagtgggctatcagaaccgaagggacttttaagagccactctccgccgctcataaggggaaatcgaggtccggagaagggaaagcaagtggctgaatgccggtaaaaggcaggaaaagagcggagcccagggctccagggggtcggtttgggacctgcttccaccagcagagtctaaggtcatccccttggccgtgcgccaccctgggctcagccgaaggaaggagcactcgacacaaacaaaaccgacgctccgggtctccgtagtcgttaagcaaagaggaagaggaagcgcttcttcattaggccacaggaccgggccttagaacttttgggttttatccattaaaggtcctttggcaatagaagaaaaacccagatcgagccctgcaaactgggatcttccgccggcaccgccccccggctgcgacccggggctcggaaagaaccaccccaggcccgggctccggttccaccgcacagtccgcccgctgcggtaaagccgcgcccaccgccgcgggtctccaaccctgcgccgccgccgcccccgggggagggtacggaaagggcgcggcgccgccgcccacgggctcctccagagcgcggcggggccgggccgcgcggaatcacgggacagaggcggggccgcgccggcgggggcgggcgtgcgagcggcgctttcctctccggcacccggcgggcgcccgggcgcggcgccgccggcacccgagaggcgcggtagccggcgcgggcggcgggggccgggccgcggcgggcgcccgggcggggtccgcgctgagccgccttctcggccgcctggtccctgcggcggctgcccggcggcccgggcgcgcggcgcttcgccatgtacaccttcgtggtacgcgatgagaacagcagcgtctacgccgaggtctcccggctgctcctcgccaccggccactggaagaggctgcggcgagacaaccccagattcaacctgatgctgggagagaggaatcggctgcccttcgggagactgggtgagcccctccccgattcccgtctgccctcctcggagcggccctgcgcgcctcccgcggcccgttagaaccggcgcttttgtttttaaaggtcatacattttctcctctgtcgcttgtcgggcacatcagaaacggattcggaaagatcgaaacctgtcgtttttaatgctttcttgtctcctaacttggatttagagtcggagtcgcggtgcggccactcggggccgcagctacctcccgacggtgaccggtccctgcagcccgggagacgctggccgccggggctgggacctgaggcgcgagtctagcggctcccccgggccgaagcccccagatttggcgggtccgccgcgctgggcgcggctccgcagagcgggcggctggagtcatcttttgcagctcgtctgcactgaggatttctccctgcttggcgtgggcgcgggcgggggagccgtaggtgttgaaacccctgaggcttctgccccccgaaggcgcggaggagcgatcagaggatttggaaaagacccccggattccaaaagcaggagctgcagaagagaccctagcccagggaagtgtggagggatgtctgattataaacctttccttagtttcaccaaataatgtgttttcgcagttctgcattggattaagatcttacacgaggctgcgttcgccctccctgtcttccctgctctccccgagggaattaccttcatccacatggttgaagctggctgggcaccaccatacccacatgtccacgggtaggaaagcgcaggagataggaggggactagcggctcctttgtaagtgatgtcatccagaagttgcccagatcggttcaactcacatcctattgacctgagcatagtctcatggcctccctctctgcacagtcatctgggaattgcatcttctctccggggagccatgttccttgccagaattcaccagaggtgggggccaattgtattccaaagacaaggggagaatcgatacggaggaagagtcacctctaccttggagggcaacccagagagagcaatgttctatgtccaggagagaaaacagtttttagaaataggtgtggtcagaattcaaatgggtaaaaactgaatacgggccatttggaattgactggtcatttatgagcttccatagacagagcctttgggagggggctgtgtaaaactcaaatcgttggaggaatgaagagctgcagtgtaaagttgctggattttcttcttttgaatagtacctgggacaacttttcattggtatacaagtttatgatgtagaatggtgactccatggaaggacccatttgaacacccagaaatcttagaatatggagactgtgcctggaggctccctttggttaaccggtgtcaggaagaccctagcaaagagaattcatgatctgaaaggagaggaagaattgcttatagttgagaacaattatttgttccttgcattgtccacttccccttccagacttcctgacttccctctatattcttg

SEQ ID NO: 37875 - DNA, 2032 bp, Homo sapiens
aatcccagcatttagggaggcaaggcgagaggatcactagaggccggaagttcaagaccagcctgtgcaacagactcccggctcgaattttttataaaaagtgatataggaatgaaaagtaccagctgaactaggaaaggggaagttgacagtaaggagggactatcaggggcaggaggatactgggtagtggtggtttaattcattgttttaattgtggtgatggctgcatggttgtatacataggtcaaaacttaacgcgtacactttaaatgtgtggtttattgtatgccagttataacgcaatatagctgttaaacacaaacacaataaagttgaaaaaccagcaggcattccctgattaatcagtattctggggaggtaaggggctcacaggaacgcaaaagaaattcaggctgtaaatccagttggacgccccgctgccccatcccctccatccgggaccgcccgactcctctcccacctccttccccaggcctcccccaggcctccagtccggaagatgcgacgaggttagcggggcccgaccactccttggcttcccaggggtgagcctcgcgagttaggagttgggtagagagtcagcccggggcccggcatccgctttttcgttgaagcaacgactttggccggatgactccccagggtcggcatcagcgtgggactgggaacaggtgaagggaaacagaagagagcctgagaagaccgctctcctccgatcctaattgactgagccaatgagagccaaagaggtcacatgctcaactgggcggggagcgggtttccacctgcggcatctttcgcgagcggggagatgagtggggcggaatatgggagaaagggagggcccgccacgctctggctggacacggccttaatcggcccgttcactcgacgtttttggttctacgttgaccccgagaaaccgaaaccgcagggcctagggcgggtggaacgagagggaactacatttcccagcaggctgcggaaacgggactgcggccactacttccggcgtgtaccgagagactggcgtccggcgtgtaccgagagactggcgtccggtgtgcaggtggccacatggatcctggcagccggtggcggaacctgcccagcgggcctagcctaaagcacttgactgacccctcttatggaatcccgcgggaacagcaaaaggcagcgttgcaggagctgacgcgggcgcacgtggagtccttcaactacgctgtgcacgagggtctcggcctcgcggtgcaggtgagcgcggcgtccgccggcgcccttgccgcggcgaggccaatcccagggaggtggctgggaggtcacagtatgaccccagatgcatgtgctccttgatcctgacaggcttggtgggtaagcgggagagcacaacatgttaaacaggacgcggtactggccttcgtgagacttggagtcgaggcgtcttaagagatgtattcgtgattctggagtgaaaagtgattgtgaaccgtagtttggacagtttcggggtgctgtgagagtgaggaagtggcttatctggggatgtgcttcacaatgcacacggctttatatcacttgaagacttacctctccaaaacgtacctcgaaagatcccgaacgtatttgtaggtacagtgtaatgttcaaggttatccttcagtttccttctcttagagctttaaagagagaaactactcgtcatttgttatgaattaagcaggtgccgaggaaggtataaatgagtcatgaaagcaagattgaatcgaaaagtgtaattgcattattagcgtagagtaatggtagcagaattcaagtgagtatggtgggggaaagcttcgtttagtaagcatccccagtgtctccaggcactaggctcagaggatgtggaggaggcagtcccgtgtacgagacagttcatgcatttaagtgctccctgtcgtgtttgggggttgaaggggtgaagataatgaaagcagtgcatgccaatgttcttgagaactgctctgcc

SEQ ID NO: 37876 - DNA, 487 bp, Homo sapiens
aaaggaaagcaaaattgtagataaggaggactactatacaggttattgtgtaaacataagtttcatttccctgggacaagtgttcaagactgggattgctgggtcatatggtagttgcatatttcatttaataaactgccaaacttttcagagtggctgtgccattttacattcctaccagcaatgtataagtgattcatttcttggcattctgaccaaccagcatttggtgatgtcactttttttttaaggctagtcaagtgaagcagtgggagtggaaaaagaacaaataaatctgtaagtggttgtgatcaatttgttgcaacaccattgcacttggaccagcccactatttcttattttagccattctgatagatgtgtagtgatatctcattgtggctttaatttgcatttctctaatggctgaaaatgttgaacatctcttcatgtgtttatttgccatctgtgtatcttcagtgaaatgt

SEQ ID NO: 37877 - DNA, 2263 bp, Homo sapiens
gtgctggtcctcggatgtcaactgccaaccagggtagctcatggttacaacctcccgtacagctctcacttatccagaactactgaggctccaagctcagtatcaaactgttcacttgcactatgtcctctatgatgtcactgtcatcatcattttacagacacactgcgactccaagtggtcgttactagttcacaatcaagtagctctcgttcatcttctcgttcatcttcaactctatgattaactgcaaaatgttctgctcattttgactagagtcttgaaagatctgcaaacgaaacggcaggactgatgctcagttctctgaccaggggatatccagtctcttatgtggggaaactcacgcccaggtctaacctcacacttttaagacagatgagaaggaagggggaaatgttgctacattaggaggaattaattacaaagagaggaagtaactagcttgatagtctcatggagtcaggattaaacgccatgtctgtcctggcgtacgctaagggatggggaaacgtctgggtcccaggctgggtaaatggcaggcccaagccgaattagttcggctcttggtttgactccctcttccctcctgttccaagcgctcgcatgaacctgggtgccagggggattatcagcgtctgcgcaaggccgatggtggcagcgcggcgttaggaatcaggccccctatccctgagcccaacagcctaccgctacagcacccaacgaaaatgggaacaacatgttgagacgctgcagcaacagcaggcgcttcccaccagctacagtcggagatttggagcgcttgtgtctgaggctcaatcccgtcaggtgccgcgcaactcagcggcgcattctctttggacccgaggcaccaccatactttccattgcttacttccgttaaaccccgagcgctgccatggcaagccggaaatagggatgaagcaatttagccagaagagggcggaagtggctactcagggcgccgccatgacgagccgggccggaagaagaggtagggcgccgccgtgacagattagtcctaaagggaacggggttgttagttcaattggctaccggaaaaaaccaggctgggctgggcgccgccatgacaaccgataccggaaaaggcgggtcgttccccccggacagccctacgccggcaaaggtctcgagatgtgagtagtgagagcgcctaccccatacgtgctgccgctccccttcttttacccagtgatctagacctagtctaggacctcgggaactaggaccagcctccctccttcttggagatctgaccctcaggattcagcgccttcgctcacgagctccaaccctccgcatgcccaagccccgccctctaagcgtttaggcctcgccccctctcgcgctgcttaggacttcggtccagtcactcttcacccaatctctgcccccagtaccccaggtccggccttcacactgaaatcctaagactacagacttatttagggacctctatgactcctacacccatcctcagagctccaggttcctcccccttgatcaccaaactttaccttttgaaccttccagatctgcctgggaccccagtcctcacctatagggtccacagacttgttcctagaccactctgaccttgcccaggattcccagagcaccaacctcatccagggcttccagacttcacgcccctgggaccttgagtcccgcaccagggccttaggtttcatcttgaagactctttggctaagacactcttccccaggacctgagaccccacctcttggagctctaaacctcacttttagaacccccaaacccattaagggctctcaagctctccctggaattctagatctttcttctaaggccccaagtcttctgtgcatgatccccaggcctactgggggatgcctggatttcaaggcctgtcttctaggaccctgaaggcctaccttacattaatcagactttgttttagaacctccactctctccccagaagctcccctcctgctttacaagccccagggctgggcctcacctctccacttctttggcaccatctcaggatccttcagattcccacatctgccctgaactcctagtcctacttcagacccagaccagaactccctttctttgcggagcaccatagcttatgcctgtaatcctagcactttgggaggtctaagcagggggatcgcttgagcccaggggttcaataccagcctcggcaacata

SEQ ID NO: 37878 - DNA, 923 bp, Homo sapiens
tgtgcatagaacttcgtgtaatgtagatatgttgccttccccaaaagaggaactcaggacttgaccatcggggaaggggcatttttcatcttgcaccattgtcctcaccaatttttcagtcttttgggagctcatgattacagtgccctcaaactttacagaaaataaacttatggcaccccaaatacgtttgaaacaaaattaaggctaagcaagggcgtttcctagcatggaagcatgcatggaattaagatgctggctctgccgccgaccaggaggtggcgctgtcccacacagaccagaggcagctgcttccacgtgaggcctccggctgggaactgcgcatggagattttggggtgtgtctttgctggaaaccctaaggtcaagtattacttcttacagtgtacttatttagtgtgtttttggggagtcattatactgtaaaaagggagtcattacaaaaagtggcataactttagttattaactgaatggtgctatgtgcagataagtccatagccctgtattttaaagataatagtttattctttctacttcttaggttggacattgattacacacatgtttattataatatttttaagaacacaaaataaatgaaagcagggtatgtatagaatggtgatgagagtgtattatgaaacagattttgatctatctaagtctgagctctcttgaggtacaaaaattagaaggaattagtaaaattaaaacctgatgtgaataaaacaggaaataaaaacaaggcaaaagatgattgaaaggattaatctcaaattgcttctttcaggataaactatatgcacccttcaggagactgaatagataaagaaagtaaaaggttaaaaacagatgcatttagaaatcagaaaggaatgtaatcagaaattgtctggaggct

SEQ ID NO: 37879 - DNA, 1153 bp, Homo sapiens
gtcaccaccaagcttcttgctgatgctggtggccccattgaacagcacattcctcctcgtttggataaacagaaggtgcccacggctcccctgtggactgcggtgacctggtgggttttctttcctcagtagcatatccactccagcatgcctgcttctctgagccacctcattcctgtatccactattgcacggcatttctggcagttctgctttcctgggggatattgctttttccaggcttccatgagaccattgagtggagtgttagtactatcttcacctccttgctggggtgtgaatcccataccccacagcagcactctcgcatcaataaacttccctttatccaactttgtcccacttgatgcagcatgaggagagccagccccgtgtgtctccccagcacctactggacatttggccacgtcctgtggttccttcatgtatcattctttcctcccttagtagaccgagtatcttcctgtcagatggccaagcagcagcccctaagcagcagcccctaagcagcagcctgggggagccacagctgctatgtatcaagcacaaggcaaggcctggctgacatgcatggtcaggaaagcaacaaggagccattttttagatcaggcagtttatattactcatacagatggtgaaagcgcaagtagacagaggtgccaggtccctgtgacccttgcacagggcggcaccaaaacaacaggggccaaatggcagcaacatgagtgccaggtgaagcccataccacactgcagccaagcagctttatagctggtagctatgcacatgctctcagggatgggaaggcataattctaggtggtccccaaattcccactccctcatatacatgccttgtatcatcgcctcccgtcgagtgtgggtgctaattctaagctacagacaagcattttccccttccttcctaagctacagccaagcctgcctgcctgccttccttccttcctaagctacagtcaagcctgccttccttcctcccctccctccctcctttctttccctcccctcgcctcccctccccttctctcccctcccctcccttcccttcccttcctttcccttcccttcccttccctttcctccttctccctcccctcccctccccttgcctc

SEQ ID NO: 37880 - DNA, 635 bp, Homo sapiens
attgtttttaggttattatcttggttgtaggtggccctttcaaggattctaactgggcattcccaccatgacagaccgcattcctcggataaggacagcaaggctggcaaaatagccacacggtgtgcctgggatcctacctgacccactgtgaggtggactctggccaagacctgtctatcccctgacctccctaagcctctctccaattgaccatagagattccagggattaggctcagataataccagtatctacacatgtggcttccagtaaaatgagcacagactgagattacagaacccaattcctggccctctctgctgctaaatatctatcaggaaagatcctccctgagcttgcttactcatctgtaagttggagccaaaaatgttctttggatcgtgtgtcatttgtgcagatgtgataagattacacacgtcaagtgctttacacattgcctaataagtaccattcaccgtttcttctgcagagtgtaaagaggaagataaattatctattactatttagcagtattttaataacttttatgcacttttaatttatttccaaattttttcttttcttttttttttcttttcttttcttttttttttttttttttttcagtagag

SEQ ID NO: 37881 - DNA, 3909 bp, Homo sapiens
ggctttacatatattcattcatttggtcctcacaacagcactgtgagttagaagtctcaatctcacccctttacagatcaggaaactgaggcagataatttatttgcctatggtcacaggactagtgagtgacagagcaggtggtttggtcttacagtctatgtgtttaaccactacaccaaaccacctccctaagatgctagagggggtttgtgccaatgcctggattctaagagattagattctctttaggatctctgacctgtttcctcagcattcagagataaggccagaaacaatgccatttgtgcacgaactgacaactgacggtcctcctacctcctatttctatttaaaaggcactgtaacttctttccacaggcagatccctacctctcctcccttaggggaggacgaaggtgtcccagccaaggaagatcctggtctccaagggctgtaccctactgatccggaggcaaagcagtgagggcccaccccaattcctcacctcccattctactcttcggcagaagcatctcagtgttggaaagataaggatttcttcctaaaaaggaaggattacactatatcagagtctgaagatacagttttcatttgcaacgcaagggaattcctttgaatctctaccttatgatttccctgcaaacccactccgatggggctggagagtgctctctcactcagatgaatctctcaggggttgtccagcaggtgtttgccaacttgaagagctacctactatcacagacctataaaagtacgcctgtggacagactgaaaacaaacaaacaaaacacacacacaaacacacaaaacaaccgcacactgggagaagttctaggcaatttccttgcaaataactgctttgaaaattactgttttaaattggcagaacactaaggactttgaacagatcatcccttttactcaatgttttcataaccttgaagtgaaggtggagggagcagtacgttttaaggtgccaggattacactacggggtcagtgctcccggatatgaactttctttttcagaccgaccttgggacctacagctttgtaagttactcatacaactccatcaaatgttacaggtaggtcagaggacattcaggttgtttaagcctctataaatgactcaggcagcaacaatttacaacgtctttgtttctgctatgcagtgccctcctgctagagatggcaaaaatgtggggagggcttcagagcattctaagcctggtatttctggctggaatttttaaatctcactacaatcctgacaagagaccacgaccttaatctcccacggcatgactggttagtcttgatcgtaagccatataatcaacacccaaatgtgcataacacatctaaataatgtcaaaactacactatataccacgcaggggaccagaaatcaatctttacctcaaaaggataagcttccaggatgcaataacatccccttccacccttttctacaccctaaaacagtaatattcacggtaacagcaaagcggaaatcagcttttcctgaacatgtactgaattctagtcacattcacacacgttaattcatttaattccagccacaaggtaggcagcctctgttaacattttacaattgtgagaacgcagagatctgggactggctcaaggtgacacactgcagcaaggagtcagaatttgaatccgaagcagtgtccttccccctcgcaacagctgcggcgttacaaacacaggtcagccacggagaaattaatgacccacagccatccttgcagctctgcgccataactggggagacaagctggttcccgtgactcttcagtctgttttcacccaagtgcatgactgcgggagcaaagcgaccacgtgagcatcccccccccacccccccgcttcccccaggcgagggacagtgccaggccaaggacaagtcacaggtgcaacaacgtgccagaactggatccggagccccagggcgcaagatctcccgcagcgtcacccggcagagggacgggtgtggccaccgggcgcggcaggtcctgcgtgcgctgaaagtgcggctggaggcgcggacggctttccggagccccgagagaggagctaggaatgactttggtcgcagcctctgtaaccccgcatgacggcctctagggggacagcgaggtccccctcgatctctggctgtaatcagccggcggggccagacggtgccgagactccagggcgaggccgcagggagggggctgtcccgccccacgtggaccggctccccgctgggggcgtggccgccgaagcgggccgggccaatgagcgccaccgtcgggctcacccggctgggcacgccgggccgaggagggctgcgtcatgccgggggcggggcttcggggccggcgcgaggcgcggcggggtcacgcgggtcgctgcgcgggctataagtaggggccggcggggtgctccgctggagtgatggctgccggcgctctctgcgtggttcttcttctcggccgctgaaacccccgcggctgcttcctgggaaggtcgtgagtcccgctgagctgtccccggtgccgccgacccgggccgtgtgcccgtggctccagccgctgtcgcctcgatctcctcgtctcccgctccgccctcccttttccctggtgagtagtggcgccgcctcgtaaaggctctttcttctccccggggccgggcgcggacgccgtggcgctggaggcggacgccgtgggcggcgcggctggcttctctcttcgccgctggccgcctccactccgcccgtctgcccgcccgcgggcctttttggcggtccccgggcggcgcgcgcgggaacggcccttttccgattttcgcgcggagggcgcgcgcgggctggcagcgcaggggctgggctgggcgcgcgcgggccgcggaggacccggagccacgtgcctctccttctcgcgcgtcctactggggatgggggtctggagtagccggcagaggctattgcgggaccccgggcgcgtgggtagagcggggtgccccactggccccccaggggcacgcagctattgttatttcccccctcccccgcaggatgaacttgcgtcctttctcttctccgccatggaattctgctccgtgcttttagccctcctgagccaaagaaaccccagacaacagatgcccatacgcagcgtatagcagtaactccccagctcggtttctgtgccgtagtttacagtatttaattttatataatatatattatttattatagcatttttgatacctcatattctgtttacacatcttgaaaggcgctcagtagttctcttactaaacaaccactactccagagaatggcaacgctgattaccagtactacagctgctaccgccgcttctggtcctttggtggactacctatggatgctcatcctgggcttcattattgcatttgtcttggcattctccgtgggagccaatgatgtagcaaattcttttggtacagctgtgggctcaggtgtagtgaccctgaagcaagcctgcatcctagctagcatctttgaaacagtgggctctgtcttactgggggccaaagtgagcgaaaccatccggaagggcttgattgacgtggagatgtacaactcgactcaagggctgctgatggccggctcagtcagtgctatgtttggtaagttctttttatgttttgtcctcttcgtggtgggtgagcaaatttgtatcatgggtggttccatttttgtgcataacctttccgattaacctttctgaatgtgccacttacataatggaattttgatatttacttaataaaactttactatgtttcaggttctgctgtgtggcaactcgtggcttcgtttttga

SEQ ID NO: 37882 - DNA, 740 bp, Homo sapiens
cagcctcccaaagtgctgggattacaggcatgagccacctcacctggcctgctttaatttaacactcatttgctttcacttatttactctttgcaataactcaatctggaagtttgatcttacagatgagaggactaaggcattgtagaggtaaagaaggcaatccaaggtcacacggccagaacattagggaatgtaccagtgcagtggtggggaaagtgaaagcaaagcggagacagtttaccaggtgcccacacacagagaaaacttccaaccagtaaggtgggagcatttccaaatctaagacaaatgagactactagatgccaattggattgctcctcctaaggagaatctgagtgcatggaaaattatttacggaccattgaaaccattttggtgtgtgctttggcaatagctcctcctgaaaagcatgcagccggcagaagatctggataccacagagactgagattctacatgtgttcagagaccggagtccctaccacagaacctgtgacctgtgcttctagggtcttcaaagtcaataaaaatcagcaggtgattgaaggagaaggaaaataaagcacaagggaggtgatttggggctttgtagaaatgcctctgttacccatttctggggttttattgctggagccttgtactcttggtgagatctcctaaggtgaagtgttggatttaaaacagtctgataggccaggcgcggcggctcacacctgta

SEQ ID NO: 37883 - DNA, 2839 bp, Homo sapiens
gcgcacaacacacatatatgtgtctcaggatttgcagctgtaagcaacggcaatcactgttttctgttagacaatactggtgctcatagaatctctggataactcacagctaggaggctctgcagacgagaccaacccccagaatcatgtggcagattggtctggttagaatatgaccacagacataggcactggtggctgcagcttgcaacaccacgacacccactctgggtcctggttgctggctgcgtggaccgctccaactgccacccaggagactggaggtattgccaccactgccacctcatggactgagtgggttttacagagtgcctcatgtgactaatttctttttctttctttttttgagacagggtctcggctcactgtagcctcaacctcccaggctcaggcaatcctcccacctcagcctcccaagtagctgggaccacaggcacgcaccaccacgcccagctaatttttgtattttactgtggagacggtttctcaccatgttgcccaggctcatgtgactaatttctgattcagacacagggtgagtacatttgattggtggagtcacgagtcccaaccctccctgcaaggaaaactgaggacatgagtctctggcattttcagcttctgctgtgaagggaattctgccttctgaagacggggttcctttaacagacagaggatcagacgctgggtggctcgaaagaatgaaaattgccttctacaataccaccctacaaagcttcctaaaaaaactgttttttctctgacccccaagtgtcttcctctctctttctcttaggtcccctctctccttgactctccatcctaccgtctgctttttctactgccttgtggagttccctgattccttagagggtggtggggaaactgaacacttcggctttatatgtgtgctcatatacatatgagcaggcctaaaatatgtgtgcagtttttacacaagggatgtcgtagtctgcccaatgtttggcaccttactttgaacagcacagataagggatcactccattttcatacagagtgctgccttattatgttagatggctgaacagtgaatgaaccatgatttcttcttttttttttttttttcctggaagcatgctagatggctcaccatgatttatttagtacatcttcccctgatggccattaggttgttgggagcctttagtaactgaaacagtactgcaccctggtgcatgtgtattactcgtctgtgttaagtagggatgttgcttagcccagctggaggagaattctagtttttaacactcctgggtgtgaagtcacagtgggctggatgggcctcccagcgcctgcttccagagaagtctctatatgcctcgtgggtggatgtagaacctgggagtgaggcttggcaggaaatctgcagtgagaaatgtcacaacccaaacagtaactcatacacagagcttcgcatgtctcattccacaaggatcagcagctggaccattacctggagctatagacttgatgaaagccccagaaatggctaaggcagaggaagtgcctgggagttgtttggcaatttgacacaatatcttttagatatttttaaagccactgagcaaatcaaatcctcaagtttagggatggattcaaaggccagtcctttcactatcggactggaatgatttttagtcatcttacctctcagcatttactccttttcccagatgcagcagccccacctccttccagggagtcacctgtccaggtcaggtgcctcctcaggggaagcatccctcacccgccagattgccagggcgtgtgactctatctgggccaaccacatcctctctcctggactttgactgctgcgaggagtgaggctagaaccagagaaacctagctgatgctgactcatgctggaggttcctgcggagtgagcatcagagctcatgagctcatctccctagaaaccagcatgcctgaacttgacctctggcttctgcagccaggcggcaactgtaacaacagcaactccctccctactcctcagggcccatatctgcccagcttctcctgccttggtccagtgtggtctgtactcctcctgtgctgtcctcccagcccctccaccattctggcttcctgttaggtagagacccccttgacccatcccatacctccctcacttccatgcccacctgggagctgcaaccagagccagctaaagctctgcatcccccaacccaagtacaccttcattgtccctccaaagccctgtctcacctcaatgagatgcctcactgagatgctggaaccatttcatcctcagtaattggggtcagtttctccccagtcctgtgacttctgcctcttgtcaccctgagggcaggcaggagagccctggtgtggcaaagctggttggggagcaaatgggcacaggagagaagagggaaggtgtgggaggatgagtcactggcagagtgggcaggggcgctaaggaagggaatgagtgcatggacctgggcttgatggttcagctactgaacaccaagatgctgcaatttgagagttccagaaagttctccctacttagcactagctattttaccagcctgggttaatataggatctttagatcccttgagaagatgaaaatatttaaattgtgaccccattaaaatccaggcactatcatttggatttgttcataactcagacccagcaaagaccaagcagtaagaggatgagacaccggcctgctggctccagaagaagaaaaacaaatcagaaaatctgaatttgaggcccggtttccaatttactactg

SEQ ID NO: 37884 - DNA, 1433 bp, Homo sapiens
ttctttatttgtccattgatgggcatttaggttgtttccacatcttggctattgagaataacactgccacaaacatgtgagtgcagatatctttatgaggtgatgatttcatcttttttttttttgagatggagtcttgctctgtaacccaggctggagtgcagtgacgcaattttggctcactgcaacctccacctcccgagttcaagtgattcttctgcctcagcctcccaagtagctgggattacaggtgcccgtcaccatgcccgcctactttttgtatttttagtagagacggggtttcaccatgttggtcaagctggtcttgaactcctgacctcaggtgattcacccactccaaagtgctgggattacaggtgtgagtcactgcgcccagctggtgatttcatcttctttgggtacatacttactcagaagagggtcagataacagttctatttttaatttctttaggagcctccataccgttttccataacggctgccccagtctacacgcccacaaacagtgtactagggttctcttttctccacaatctcatcaacatttatctcatgtcttgttaatagccattcttatagatgtgaggtgatagctcacagtggttttaatttacattattcttatgattaatgatgctgaacaccttttcatatctatacctactggccatttcttatgtcttctttggagaaatgtctgctcaggtcctttgcccatttttaattattagtttttccacaattgagttgtaagagtctcttattgaaagtctgctggtattacaggtttatagctcagttttttgagctttattataaatctgactttcagaaatagatctgcttcccttaaaaaaatctagttcctggatgaggctgatagacctttgatcaaagtccattctccttggtaatgaatgctccttgtttcttaggacagccaactggtatatccttagacaaactcctaattctctatgcaaagccattatcatggttttctataataaataagataaacaagcaggaactaatagaaatttaatgttgttttaagataatacttaaatattaagaaagctaaaatttaaaatgtgttgactaggtttttctacacaattatatttacataatgactaaggtaaaacctttccacaaatagttgcccaggaggaagaaaaagcaacctacaacagtctctggggcttgcactgccttctcaggccagctataccctagctgagcaaagaactgaagaagcaagtgtccactccccacccctctcccctgccccccttttgttacttgaagtgtttctgagtaacaaatgcaaaactaggtttgaatataaaagctagacgaccatgccaattcaggattgtgtttcatctgaggagacctggcatagaa

SEQ ID NO: 37885 - DNA, 516 bp, Homo sapiens
aaaaaaagaatggcttaatacagaaaactggtactgaagaatggggcatatagctataaagatatctaaaaatgtggagtcaactttggaactgggtaatgggcaaagattggaagaatttaaagggctcagaagaaaacaagaagatgagggaaagtttggaacttcttagagactggctaaatggttgtgaccaaaatgctgatagtgatacggacaatgaagtccagggtgacaaagtctcagatggaaatggggaatttgttgggaactgggcaaaggtcacccttgctatgactcagcaaagaaattgggtgcattgtgttcatgtcctggggatctgtggaagtttgaatgtaagagtgatgacttacggtagggtatctagtggaagaaacctctaagcaacaaagtgtgttgcttagaaatttctttctttcttttttttttttttttgagctggagttttgctgtgtcgcccaggctggagcgcagtggcgcaatcttggctcactt

SEQ ID NO: 37886 - DNA, 2095 bp, Homo sapiens
gcctgctggaaaatgtttggatcacggggacagatccctcatgaatagctcggtgctgtcctctcaatagggactgagttctcacaagacctggttgtttagaagtgtgtggtacctcctccctcactgtcttgctcctgctcttaccatgtgacatgcctggccctctttgccttctgccatgattggaaacttcctgaggccctcaccagacacagatggtcgtgtcatactttttgtatagcctgcaaaaccataagccaaaataaacttcttctccttgtaaattactcagccttaggtatttctttatggcaacacaagtatggcctaatacagtgatgaacaggactgcttcctctttttcttcttttttggagaactgtccttctttccctcttcatggatgccctttaaaaatcagagttcctcagagagcttccggtgtggcagtcatgtctgtgcccgtctctcacttttcttactaattctggttatctcatcaaaagtgcatttttaagaaattccctttccttttgagtcattttctttagtggagtcaaggttatctctggtctgagcttgtttttcaacttccaggaatagcttgtattacttttttcagattctaaaacatgttcattaaattttgctgaggaaatataaaaatataaagaagaaaagaaaatccgcaatttaataactagagataatcattgttatgactccattgtcttttctttcagtctttctttttttcaaggcatatatagatttgtttttagacaattaggacactaaaaactttttttgatatttggtttcctgaaatctagagagcatacatgtggtaggcagtgctcaccaaatacctgctcatttgagagattactcgattaatgtctgtcttaatttcctggtctcccttgcagtttagactggggacatgtgtttttttctggccagagaactgtgagaggaagtgatagatgaggtgttgcgtgtcttggctgatgcaatcaagggccagtgtatgcctgtgtcacataaacttgccctgatgcagcaactttggaagtcacgtgttctagagaatgtgctacaaatgaattaggtgtggttgcaaatgcatgagaatagaacgacctgtattagatgtattaagtcactgagatttcggaatttatttgttactgtagtataacctttatctcaaattcctctttcacaaatcattttcttcttggacagaaatatgcctagattagcattcctctgtcatattctctaccttctgggagatgaactttccaataagacaaacccagaaactaatcagatgctttcatgttggccaaatttggattccagattaaatataaattagctgtgaaaataaaatggccaataataaagttggtactgttaatatcccagatacaaatcatgtaataaatatattactaatctaacatttatatggtgctttacagtttttcaaagcatttttcataaacataaatataagcattcaacctgatacaaggctttttatccattgcaaatagtcaacagtgaagtcctgtgccagtgcacagttctctccttcctccttttggtgtgaactcctggctgcaggggaggaagggaccctggttagggcaattgtggcctcagactgggagtggcaggtgtggcatacaatgtggctggagacgcaagagacttggatcctcatcctggctctgatcctaatgagctacgtgacctccggcaattcccacatgtctctgggctttccttatctatgaaaggaggagattggactggctaactactggggttcttccagccctgttcattcagtatttcatgactaccctgaacatgaccatgttttgcttcatggcacctctatgctcttgatagattgtgtttggttgctcaggacccatgctagacacattctcctcaatagatctttgtctcatgcacagttgagttacatatacatacatgctacgctctttctgctttacttcgatggcaaatttaacttaccaccctgagtataaatataaattttttctagtat

SEQ ID NO: 37887 - DNA, 1362 bp, Homo sapiens
cttaggaggagagcttgccagcccgtgggtaatggagaggtcttgcagagataaaagagatgctcccactcaatgcaggatggtgtggaggtaaatggggatatgtctggcatcactcaggaatgggccttcctggcagggaagagaagggaggggaaagaggaagggagtcaaagatgaattgctgaatacggggattccagggcctggagccaggaagagaactttgggaggtgtgaacctggagggcatcagctgatgaggagcagcctgaagtccggggaggacctgtttttggtggccaggaagaaagtgccttccacacacagggaggccacaaggctgatgggctgggggttggaaggacagccctaggacaggcttgggaagcaggctcaggtagggactgtgaggttcttgttgagtctttttcattcctggtcttagaaaatagaatccaaggcctcttgagagtggaaggtgggttgggaggagggcagatggggcttaggcccaggacacccgtagagctactgcccagctgtctctcagggactctgctgaggtcactccaaggatcattcttagccttgctagacagtactgacagagggaaccgtagtatcgcacccacttccttctctttcaatgaaagtttaaaggtcaccatttcctctggcaaaggaagttccacaaatattccatttccggtcttagaaacagcaaggtatcaagcaattgcaaacttcctgtgctggggaattcccaaggaagtaggggcagagttctggtggagacaaagtgaattccgagtgattagtcagtagcagtagcagtagcagtagcagtagcagtagcagtagcagtagcagcagcagaaccagaatttccccgcacgtgtctcaggctctcatttgccaactcagtctctaagtatttttattggcaggaaaaataaaatagctatgagtgaaataattcattagacctgagcctccatcaattttgtgtttaaaggcctgactctctttacctttccctgggatggaagatgcaaatgttcctgatgtcactgtcaaaaaagaagaaccagtgggtatattgtatgcttgagttccagccatttgtcacaatagatagagatgactgccatgtgtgtagactttctatagactgtgtgctaaacccgacctgccacttccaaggagtagatgaggaatgtccatggttctggggagccctaccccaatttggggcagacattccaaagctcattttctgtggagggggttgatggttaaaggacggcctgggagtaactcgtctgtactagggcccaggagagttacatgctgcttccca

SEQ ID NO: 37888 - DNA, 755 bp, Homo sapiens
gcaataatattaatttgttaaaaaatgaagcaaagttacatacaaaacaggacaataatataacagttgggtttatcttttctactgaacagaaataattttatattctggtgaataaaaattacttgccactcatcaatcttctgcaagttaacaagtaactctacagagccttgtgttcaatcaatggtaaacagcaagtcaaacaaaaatactttcctttacagaaggggtcagcaaactatggcccatgggtcagctctggcctcttgcctgtttttgtaatcaagatttactggaacacagccacactcatttgtcatgtgttgtctgttggctgctttcatgttgtaatggtggttgagtatttgtgacagagacctcatgctcttcacgctgaaaagatttactatctgatcttttacaaaaaaaaatttgtggactcctgcctgagagcatcagatgccccttgggcaggcagcttagacactaaaaaggcacacctactctctttgccttttcctcacatttggataatttttaacacagtgttttggccttttccttcttatgtctgctgtcataagggcagttctgccttagtcagtctaattgtttagacttttgtgatgctaaatctgtaaaaatgcagggatccagcctgggtgcagtgcctcacacttgtaatcccagcactttgggaagccgaggcaggaggatcacttaagcccaggggttctagaccagcctgggca

SEQ ID NO: 37889 - DNA, 1013 bp, Homo sapiens
cttcttgccatgccacatttgtgctaagcccacatccaatctcggggcctttgcactcgcatttcctctgcttggcatgctgtaccccagatctttcatgattggcagcttctgtacattcagccacctgctcaagccaccctttcagagggccttccctggccacctcacctgaaatagcacctccgattgcacccatccggttattctccatcctgttctcttgcttggtgattttccatcactgatgaggaaatgaaccatggaatgctagggctgatgaccagaactttcccccacccccacattattacagaggaggaaatgaggtcggaggtaagatgggcccaggatttctactcccgcctggactgcaggcacagcactgacctcagctgtgctcactcttggcattcacccaacccttctatctccaactgccccatttaccagaaagtgaaatgttctcagagacggtgagccacctgacttggacagcagcccagggcccctggcaccctgctttcttcctccctgccatcctttcctctccaagacctacctttccctgtgattcttgcccacatgctgcatttcatggttttatgacctgatttctgagagggatttgaattttcatgattatttatgtaagcaaatcattatgcttatacaaatgagaaaaggagtgcttctggacttcccagggacaaaatcttgtcacttggcttgctttcatattgctaattaaggacccaggatgtgggtgagatgtgctaaaagctgagaggaggctctggactctgactatgggcccacacccctgggcaggcatcacactagtcctttaggtcatcctcaacccagcttccagttgaatcagatgtttgtgaataactcagcaaggctgtatgggaaatgaagaatgaggtggggaagaggcctgtgcagaagacacactgacttacccctctacctctaactagggtgttgtagcagccacccacccacca

SEQ ID NO: 37890 - DNA, 547 bp, Homo sapiens
gctcactcagcaagtattcaatttttctacactgttcttttttttcctttttcataacactgtctcataggcattctgcaaatcctgtgagagtactttttgtgaaatgttaccactttcctcttattcagagaagctccgtattaaggcttcactgaggttgccttaaggcatgataatggttcaaaggcttgaaagacagttaaagagacctgtaagtgcacaaaagaaagttgagcaggagagaatttcctgcctggagcagagccaagctgctggaagaggcaatgggggcaaaggccaggcagacaagccaatgggctcctcccacagctgcagccaacaagttatgccagtcttaaaacttctaaagaaatatgtttttaacaagattgaggactggattatgaggctaggggaggctatcacaaactggaataaaataaagccagagaaaagtggctgcctcccaacctgcacaactgacctagctaggctgatggctgggccacctaggaaggctactgagcatcatataaaacagaag

SEQ ID NO: 37891 - DNA, 1201 bp, Homo sapiens
aaggcacaggacgagagtggtctgggtgatgcttcctgtgggggaaaaggtgatgagggtgcatctgcacacctatgttcataggtaagtctgggaggaggtgacctcccctttggttgaggtgctgaggcgtcttgttagaatggcactattccatttatctgatgcagtctgtgggaattttgtggtatggccaccacaggtaccatgctgggaacaatgccagatactgcctgctaagccacagcatgagtcacatgagcatttgtgggctttgggaactaaagttattgaacgatagttatctgaaaaggaatttagggaaaggggactttagtccagcgaacagtttgcaaaccagggggaggcagccttcagcgtaaaatgaagacgtgtgtgccccaaataacaaagggagagtttgtcttttagagagtaagtttccacccaggttccacttaggcaaatgaaagatgcaaacttgcttagttctgatttgtttacatttgctgaattcggattggtccgtgcaggcttttctgggaactccaaatacatgtatgacctctagtcatacatggcaaatggccgcttggctctaatttgaatttaggcccagttagtcactcaggattaacctttttcagggttcacagctctgaacaatggacttagacctgcaggacatagtctgttcctaactctgggactacctgtgccttttgactgtgcccagtgagcagctgtggctctgggcccagacccacagggcgataaggcacagaggtacgcatggagcaggctgtccttgctgagtgatcatgaagatacacttacatagagcagcacttttccttccagtctttgtgatttaactcattagatccttataacaagagtcagtcctctatttaacccatgaagcacaggtggagtccaagcttagtttgtgaaggatgagccaaaaggattcttctcttgtagacctcaagctcagctctctccatgggccctggagtaggtgagaaggcctctgtcttccagagcccactgccaatcatctacattttctgttagcccaattctaggacattgctttaccaactgaagggtgagaactatcataagttataaaaatcaattgaaaaacaaaaaggtacagaacagaaaataaaagatgagaatctattaaacatagtga

SEQ ID NO: 37892 - DNA, 1109 bp, Homo sapiens
tatactggcacaaagcatgcagctgttcctcccatctccaccaccctctccatctctttctcacgttgctctatccttaattatagcaaaacccataggaagtgttatagagacccccctttctgtaatttctcctgttctattttaaacttgcccccaaagtacacttaccaaagtggctgtagtctccgccactgcacctaaacttcccttgctgaggtcatcaccagcctgcacgtggccaaacccactgctgtctctgctctcctcttatttgacttttgagtcatgtgagcacataaatgatccaaacggcaacactcctaagaaatggttgtacctggacaagaggcataaattggggccgtcttaggaaagcagatatacagccatcctacctttaggcactcactgttggatgcaattggtcactcttccttgggacctttccgccattggctccactatacgcactctcctggtttcctcccctctagccgctgtctttggtctcctttctgattttgctgcgtcctctgtcccctgaatgattgcttctccactacggggtgattttgctccccaggggacatttggcaatatctggagaggtctatggttgtgtttgagggtgttgctactgccatctagtggggagaggctagagatgctgttaatgcccaggacagtccccataacacagaattattcagctcaaaatatccatggtgccaagatcaagaaaccctgctcaaatattagcatgtgctgaaggcccttctctttcctttagcaatatctgcctccttagggatcttttctagtctcagtggtttaacatttaaaatcccaaattaggcaataaattgggccccaaacttcgttagtataaaatgtagaactgtgttattagaaggctaataaaatgacctggtgagcatctgcagctagcctctgagcaattctggggaccacgtgcaagataaatccatctgttccctctctgtaatgtggcgctaccttgtggccgatttttcctcgggttaaatatctctggggatgcaacttgtcgtggttaatggctgtgtgaggccagcgcgtggtgataa

SEQ ID NO: 37893 - DNA, 996 bp, Homo sapiens
ttttctcagccgaaatgaaataagaacgaaaagcagtttcatttaataatagtgggataaagaatatagagcatttttcttcccctttgtgtaaacatggttaagtaaagtgggtgtaacagtaataagaaccaccacttcacaggcttctatggggaagactgggttcactcatgcactccaagcccttagcacagagccaggcacactgaggtatgactaagtgactgaggatgactgatgatgtgagagccttgaggagcctgaatgggacacaaagcaaatgcagagggactggccttgggtaagagtgggctcctgcttctattgaatgagagagaagagagaaagcataaagaaagtttcaataggttttaatgtgggctaatggggaactgagaaagtgtccttctcctagcttctattactttgctataagtgaggaaaaaggagatgggctaggagattgaagtcagtggagtaggctggaaatattttctgtggagatgggtcagccagctcattatagaaacatgaaaggtttgctaagcaaacatggggccagttagttttggatatcatcagtgtggggcagtggctttgggttagtctgggagggtggaccttggacagatccagagctttccacacagtgcaatgggagggcaaaggagccaaacagtggagaatattgatgaaagaatggtccaagtgagcaactgaaggaagtgaagacctccaaggaggaggtggtagagcaaatttgagcaggttaaaggatggaaggtttctgtgtggttgaaatgcctgagcaatgggaataatgaagaatgagaaagagagagagagagaacaagactgctatcggttgtggtcagagggtagtatagtaatttttacagaaaggtcatggtgttagtcatccaaatggacattaagaccccttggggattaggacaaagaagagagctaggttccagtgacaaatatttaata

SEQ ID NO: 37894 - DNA, 4833 bp, Homo sapiens
ggaaatcctagaactgaaagatgcaattaaccgatgttgagaaatagccaacatctattgaacacttcccatgtggacagctgtgctaaacactttacaggcatcaacataagatgtgtccccttacagcagtgcagtgtccctcctaagacatggacagcctggtttccctatctctctgcttcatcaaaacccctttacgtggggcttagacactcctgttgtctctagtgtctagtagcacagggctcagcacatggaagccactagatacaatttgatgaccaggacctccgatgaaagccatgggtgctgattgggaaggcattgtcttttatgtgctatggtcttaaagcttcatccaggaagcagaactcggggggtgctgaggacccagaaccgagaataagattagtcagagatttcctgtgggcagaaatcataaggacgccaactgtttgggtgagataagacgaaaccaagagtggacttgtggccagaagcgtgaggaagagggagagagcttcccttgtcccctttcttcctctccctaagccacagtgattgacagccccccccctttggagtcagagcaggcttgagactggactgggaaaggagggtgggtcaggatacagagcaggaaggctgggagtgcagggcaggagcaaggggctggggcattcattgtgcctgatctctcccactttacctggggtaaagaagcatatgcaaaagccacggtgtgagtatttcccaagtgccagggtcagggcatgattcatcacgtgcagcatttcattcaatccttatagtaaccgatgatgtggcttctattattagctctatcagataatgaaactgagaccaagacaggctctgcacattgtgtggggtaatgacacagggggattcagacctagactccataactcctgccccagggaccacccccaccctcaccctgtgcatgtcgacaaaggacagactgggccacttctcaggacacagcggggaaatgacacagagcagggaggttccaggagccccgagcgtcttttctccaggagaatactctctgaattcagactggggtcagagaaacatttacccaggagccgcagtgtgggtggggctttttacttgaaacgctgtctgaaggcagtggccaggatggaactctccaccctaccttggcaagccacttctcttctgcaatctgtaaggacattgttgagagaattatggtcttccaattccggagggttgaagaaagacaaataggagagaacctatcatagtcaggtgctagctgccttctctttcagagagtgtgagaataaagtgatacacttgattattagcaaatactttggaaattttaaacgctaatattcaacacactctggaagaggcaaataagtagacaggttcatatacatcatctccttcagctagtcctcacaaaaacaaacaaatgaataaacaaaattcttctttggccctcataggaagacactgtttcttgaacgtgtttcaaaaaggatgggtgactcactcaaggtcacactgtttatgaggacagtacaggaatacagacatgccattttgcctgaaaaaatccatcacccagggaggtgacacaattttgcagaaatgttctatttcctctgaaggatacattctttaaacctttgggaaattcattcatagtcttcctcctttgaaggattaactctctggacacaaagtgtttgattctgatttgttggttggaagatgtgttggttgagagaaagattctgatttgttggttgaaaatagactcatcaagatcaactgctgtagtagtaaatattttgacattttgtctgtattcctgtgctgccctcacaagctgcatcaccttgagtgagtcattcatacttttttgtttgtttttgttttggagatggagtcttactctgttgcctaggctggagtgcggtggcgtgatcttggctcactgcgacctccatctcctgggttcaagtgatcctcctgcctcagcctcccgagtagctgggattacaggcacatgccaccatccctgctaatttttgcattttcagtagagacggagtttcaccatgttggtcaggttggtcttgaactcctgacctcaggtgatccgcccacctcagcctccccaagtgctgggattacaggtgtgagccaccgtgcccagcccagccatcatttttgaaacacgtttgagaaatagtgtcttcctttgagggccaaggagacattttttttgtttatttgtttgtttttgtgaggactagctgaagggggtgatgtatattaacctgcctacttatttgcctcttcccagagtgtgatgaatattagggtttaaagtttctgaagcatttgttaataaagcccggggctggaggtcagaagacctggatttctctgcatacttttgccatcagcaagctgtgtgaccttggacagatcccttttttgtctaaatctttctgagtcttcttgaaaacaatgccaggttgggacaggatgattgccaagctcccgtccagctctaaaacactgcaacgtatgcttctgcaccagcactgtccatcctgtagatcatgcagaaattctcttcaactttttcctacccataaaataggagcatgcttacctttttcctaatgttccaggccccgggtctagaatattgtaagtaaggaagttaatgtgtatcagagcccattatgggccagaagttctcctcttccttcctacacctgcttcctccctccctccctccctctttcccttccttccttccatccatttgtgaagaagacatgatcaccctcattctgagagtgaagagacagaggctcaactaatgaaatgatttgttcaaggtcacacgggtggcacaaggcaagtggcagaggttgaatttagacccattcctgtccaaatgctgagtttatgtcatcgtcccgagaccataactttaaagatgtaagatagtgggaaaagagttgatttcaaagcacctctcagaaggactcactttacatcaggggtcagcagactcaggccaaatccggtccattccccgcttttgcaaagaaagttgtagtggaacacagctaggcttattgatttatggattgccaacgtccttttgtgaaacagacagctgagctgagtaatcgtggcgcacaaaacctaaaatatttactatctcgtcctttacagaatgtttgccaatctatggtccggagtccaaggctgtccatttttcaaagaacacaaagtgacatgagactgtcccatgtgcagggagccctatcattttattatgaaaaaacggcctttctgctcaaatctgttttttaaaaagtcaacaaacagactctgggtacctgtcaggaacagtagggagtttggtttccattgtgctcttcttcccaggaactcaatgaaggggaaatagaaatcttaattttggggaaattgcacaggggaaaaaggggagggaatcagttacaacactccattgcgacacttagtggggttgaaagtgacaacagcaagggtttctctttttggaaatgcgaggagggtatttccgcttctcgcagtggggcagggtggcagacgcctagcttgggtgagtgactatttctttataaaccacaactctgggcccgcaatggcagtccactgccttgctgcagtcacagaatggaaatctgcagaggcctccgcagtcacctaatcactctcctcctcttcctgttccattcagagacgatctgccgaccctctgggagaaaatccagcaagatgcaagccttcaggtaaggctaccccaaggaggagaaggtgagggtggatcagctggagactggaaacatatcacagctgccaggggctgccaggccccagagggcctgagaactgggtttgggctggagaggatgtccattattcaagaaagaggctgttacatgcatgggcttcaggacttgtgtttcaaaatatcccagatgtggatagtgcgaccggagggctgtcttactttcccagagactcaggaacccagtgagtaatagatgcatgccaaggagtgggactgcgattcaggcctagttgaatgtgctgacagagaagcagagaggggcaccaggggcacagcccgaaggcccagactgatatgggcaaggcctgtctgtgctgacatgtcggagggtcccactctccagggaccttggtttccccgtctgtgacatctgtgacatgagagtcacgataactccttgtgtgccttacagggttgttgtgaaaattaaatgcacagataatagcgtaacagtattccgtgcattgtaaagagcctgaaaaccattatgatttgaaaatggaatcggctttgtgagaccatcactattgtaaagatgtgatgctgatagaaatgacaggactgcttgtgcatgccctctgcagtgtgacattccagcagtgaaatcatgttggggtgacttctcccccactctgacctttatgtttgtctgggccgaggctgcaagtcgggctctgtgggtgtatgagtgacaagtctctcccttccagatatggggactgtctgcttccctaggttgcctctccctgctctgatcagctagaagctccaggagatcctcctggaggccccagcaggtgatgtttatccctccagactgaggctaaatctagaaactaggataatcacaaacaggccaatgctgccatatgcaaagcactttggtttgcctggccacc

SEQ ID NO: 37895 - DNA, 3993 bp, Homo sapiens
tgcctagcactcaataaatattaggtgttatcatggttgttgctgcttgtagagagcctggtcagcttcattttagcagcatcaaatcaagaaatggacctctctaggttgccaattcctaggggagctaaaatgttcactagatattgtgaataaatgtgaactttcaagagccaattcttcaagatggatcctgagtggctaactcggcctaaatctgttttattttattttatttttccgtttttacatgtcaaataactggactgtattggtctaaattcaaaatagagccaagtggtcacttgctgactaaaggtcacatatgctgagctctctggaaaccagcaccttcttgtttctgggattttcagagctcacctgaaccaaccaatcagagctcacctgccttggccaatcagggctcagctgtatcacccagtcaggactcagatgtattgatcgatcagaagttggccttgtaaagcaatcagaactaagcaaatttcaaaccttcatttgcacaggaaacctgtgtgggaccatttgctatgaaacccgagccttccctttgttctttggaagggcacctttgttttacaataaaggttgtgcctctccagtttacaaactgcttactggaagattccttctggagaacttttattcacaatatacaggaaatatggaatcatttaactcaaaatgtcattatacggtgccttacatagttacagaaatagaaaccagatagtgccatcaagggtgatattgaaaaataatagcgtctcgccaatgacaacctgttctgagcttatgtttgctaaaatagattgagtgtaaaatcacagctatttgcttctgtgccaccaatccccaaaccaactagtgaatgttcaccgtaagccaacagttacagacaggtgaaatttggaaatcaaataatgcaactttttcttgtgcccagtgaatggtaaatgaacaaggggtttgtagggactccagacagtccctgtcaaggctcacgcgtatctggggcgggcctcagtttccggttcaggtactggaaaaataaccggagggctttgcagagcctgcggcccggtagcgcacaggccagacgacggcgccgtgcggggcgcgcaggaggtacccggcctgcccggcggcccagcccggcgccacagcggtcagaccagtcccacagcttcgcccccgccacccccaaccccggcccggcctcagcccgcccctccccgccctgcgccgccgcccgcccgcctgcgctcccggaaaccgagtccctcctgcgagcgcgcagagccggactggcccagccccccgcgcgcgcagccgaggccccgcagctctcgccgcccccagccggcgcctgggcgcggggccgtggggcgcgcgggcccgcgggaggccggagcaggagcccggcgggaaatgggtaagggaccacggggaggcctgggccgggcgggggcacccccggccgtcgccgccctcgacggtgaccgtgtgccgtgcagcgctctcgccacgccggcgagcacctgcggagcggctgtcgctgagggttagggtccctggagccggagagagggttgagagcgagcaggggaccctgaggatccagcctaaccgagcggcggagactgggacggcaaggggacgctgtctccactgaaggagtcagcctgggctctctcgccgcgggcgactccagccgcgctgttggatcctggctccaagccccgctggctggcgagcaggaggagcccttaaagccatccaggtgtcagaatcaggcgacactgagggctttgctcctaatctgtcatggccctgtgcctcagtggtttctggtgctcatgaccaggccaggctgtggccccggcttggtgggagctgcccccccgggactgcactgggctagaggaccaggcagctcttctctacccccttgggtgctggccctcctcctaggtgtgtctagcaagaaagtatgagagatttctgggaaggtaaaaagtgtctgcacagctgacaaactcatatccctctaggatttctttttggctctagaattgtctagctcatcttttctgtaggatgatggagctaagaatgtgagtgagttctttgctggatttttccacgctgcaggatggacttgctgctctggtcaatgcactcgccagacctctgtgtccatggtccgcatgtctaggtcaggggaccagtatcaaagtgaagactgggcaagtaagccccacctgcccttgaacctcaggcttggcccctcccgaggcccagagctgattgaatgttaattagcaactaattggatgtccatgagactctctacataaagaacacaccaaggtcaggtttagacagtgtgtagtgccaagtgattcattcttttcttccagacgtgatatttcctgtatgtgaagcatataaagaagagtcattcattcactcatctagcagatatttactgagtgtcaactacgaatcaggcatgcaggcactgcgaatactactgctcttatttgcatatgggttggaaagagaaaataagcaagtaagctgttgaatgacattatttcagagagcaataaatgctgaaaacacaaaactgaaaaattcccaaaaagagggatatggggcatgacagtgaaacgtataagagaaattgggccttaactagaaagtgtagcaaacagactttctaaattaggtgggaaaatggtctcatgttcaggtcctcaaaatctaggggcacagaatgaggtgccctctgttcctatcagcagggagttataagctgcttataaaggatcagtgagaaatgaactagtggtgagtagcccctctctaagagtatgtttcttattgggaagcttaaatctaagacagagattaagattcccagaaaacatggtctattgactcactcactcatttgtatatttattcaacaaatatttattgaaggcctgtatgtcccaggcactattccaggttttaaggatacatcagtgaacaagacaatcctgcatctcacagagcttatttcttgtgggagaaacagacaataaacaacatagcaattttaatgtcgtgtcagatgaaggatctgaagaaaagcaaggcagcttaaggggttaaagttgataggggctgctgtgttcaacagagtagtcaggacaggctgtgcttagatgaaatttgagcagagacgtgaatgtatgtgggacatagccatgtgactgcctgggggaagaacattccaggcagagggaacagcaagtgcaaaggccctgaagccagagcgaggcatgaaaatgctgggcatgctggacgaacagggaggaggtcagtgtggctctggggtggggagcaggcatctcagagacttgtcttaaaggaggctggggtagggctcagccttgaccaaaggcacccaggaaagcagatggtgtccctcactgctgtggcaggaagatttacaatctccaacttatggacaggcctggtagtttatgccaagtagggcaagaagtgatcaacagagatggagagcatgtcttttgctaggagaggtatcatttgcttttcttactcacactctgcatccttcaaaacattatgggcagcctaactaacatggtgaaatcccgtctcagctaaaaatacaaaaattagccaggagtgttggcgctttcctgtaatcccagctactcgggaggctaaggcatgagaatcgcttgaacccaggaggcagaagttgcaggagcggagactgtgccactgcactccagcctgggcgacagagtgagaccttgcctcgaaaataaaataaaatataataatcatcataataataacattatggggccacacaatgagaattaagtgggcagcagaccctgaggttttcaaatttagtattaggttggtgcaaaagcaattgtg

SEQ ID NO: 37896 - DNA, 1327 bp, Homo sapiens
tggagctgtccaagaggacgtatgaacatgccaagaacatttagggaaggacccgttgcctgctgaggccataggtcagggtgtggttgtgtgtggtcataggagaggctggagaggtctcagataacagcgttggacattccctaaagcaatggaagagagaggcagttaggggcattgttagagaatgggggacgagggtgccaggtgaagattttctaggacaggagtgatctctcagtggagaattaggcaggcaattgctgcagtcctccagaaaagcgaggacgcgctctgtgagctggtggagcccaggggcctgcaggggaggaggatccagcaggactgggtaccaaagccatgaggggagagggacctgggctggtgccaaggttgctaacttgggaagctggtggatgtgatgccagtctagacaggtcctgggaggggcaggcacgggcatgggatgggaaggatgcttacaggcatgtgagcaggctgcgaagtctgatgctctgctgtacatccagctagaagattcctgctggtaattaagacgctgggctagagagggaattgtgagcctttagtgagtaggtgggaggttaacatgtgggactgggtgaggtcctcacagaagaatgtgagggcgagagatgcccatcaggaacagagcatggggcaggtttacagggaggagctgacaataatatgtggtgcccttttgaactctggcctttcctggcttgacaacctctggaaattatcctcttggcatggactctgtgctgctgtggagcctgggcaggggagggatgggaggtgggtatatacaataaggcccaacgagtggactctgcctttctggagctctcagtgcggccttggaagatgcatagatgtattgagtcagagaggagggaaatggccccaggaagcttaggtgtgcgggctctcctcctggggtatgagctccgaggccccagcgctcttcctgctaggagctgccaaaccagccgtcccttttgtcttctgaagatgacaatggatagagtgtgggtcagctcctgctgctgcagagggcactgcgaagctcacggctttgttgctatgggcagggttaagcatgagcctccccaggggaacacgtgaccctttacaaggcccaggaaatgtcctgctctgagtttgtcttcctccttcactttgtgagagcatacctgttctctgtttaatgacagagctttgcttttctgcaaatcatacccgcttgaattcgtattcagtgattggtggccaatcagggctaatgagcattataaggaag

SEQ ID NO: 37897 - DNA, 2180 bp, Homo sapiens
cagctacttgggaggctgaggcaggagaattgcttgaatctgggaggcagaagttgcagtgagccgagatcgcgccactgcactccaggctgggcgacagagcaacactccatttcaaaaaaaaccaaacaaacaaaacaaaacaaacaaaaaaaaaaaacttgggaccatagtgaaattataaatagttttcttatttaacaaaattctatgagcatctttccatttcattagatactctttaaaaacaaaatggctaaaggttgcctaggttcaccatatgggtatatggttacccagtaatctatccatttatctcattctctattgtggatattgaggttatgagcatttttgccattataagtaactgcatgcacatgtgtttcagcagatgttttgtgggtgccttctggtgccaagggggctgggggagagaggatgaataactacagtgcccaactcactgctcatgtgaaaaggacagacctacagcaagtgggcttatctaaaaaagagctgggaaggagcccaagagaaggaccttgagagagagagtctgagccgagcttttgtgctggggcagaggagagccagggagctgtgacctgggtggccctgtccctggccgtctgtccacagacactgggtgtgcttcatttgactggccacgggcgggcaaggacagcctcccaaggtcactgcgttggtacgggattgggcaaacaagtgcagagatggaggcttgtcattcacttttataatcacttcctgcccttctccagaacacccagggcagcaccagcgcacacatgtgctcagaggttggtgatgtcagcactgggctgggctgttctccctttcctcttttccctgcctctaggagacttctccctcccactctaaggtcacaggcggcaaggagaggcacctttggcccctgccacgtgcccagtcattggaagccctggcccagccctacctacgtgctctgatcctgggagcccacagctgagctggccagggggactgtaaacatccaaccaggcagaggaatggttggagaggcaggtgttctgtctgcccttctccagggccgaggcttgtggaggtcagacagctgggagggaagagggccttttctggagaaaggagcatgtggccgcctcactctcagccttctctaaagtatggagactttatggagactaatttgaagcccatttagatgcttcagtcctcctttctcaccctgccccaggacaatatttcagctccattagcacaagggttttcctgaacttccagttgggagacgtgagtcaggcttaccgtgtctagctctgctcgtttggaaagaagccctgctccccacctgggttttcatttctgcagcatgcagtggtaacggggtacagcagaaagtgcattgggaaggttccacaggcctaattccaatcccagtcttaccatttcctgcctgtgcaagcctgagtgactgtggaccctccgtctcctcatctggtctgtagcctggagatgataaagcccctaaccctgacctcagacccccaggaactagagatgatgcatggagaggacccggtaagtgtcaacacattggggtcctcaggaaagtgtcatggggtttatgtcaggtgccatttctttcattggtggcctctctcctctctcccctcgcctcccaggaggggctgtatgctgaaatccccagggcccctctcctggaaggtgggctccactccctggtctgtgctctgtgtggagaagccacctgtgctgagcagcttcttctgcaggcaaacaggaagcatcttaccttgagggaggcaggagagctgcctggctgtgctgtgtgtctgctgtgttgtgtgtcctctgtgccgtggggaggaggaaaggctggggagggaactcccaacacacacacacacacacacacacacacacacacacacacacacacaccccgtacatatgcaagacccactgcgtggaagcaacggggagaggcaggtcccattccctttagtacagtcttgaagagaggctgagcaacctttattcattcatcaaatggctgtggagcaattgtgagccaggcactccgctgtaaagcacatgggccagtccttgccctggagaagttcatggtcaag

SEQ ID NO: 37898 - DNA, 684 bp, Homo sapiens
gtatccagggctcatgggaatgcctttgcctctctcaacaggcctctctcagccctgagggctggcagagaggaggtcctttttggccccaggtgactcttaactcccaggacagaggtgagccctaataagggggtttgggaaattgggtcctgggaggatttggaatttggagtggggacaaagatcattcttggatccatggttgccattaatgggtcccattatattgtgtttaagccagacagacttggggttaaatcctgcctctttaaaattaaatgaaggaaacgtacaaaaggaccagcatttcttaccgctgggtcttaatggtttagcaaaggtcctgagcccttagttgcctggaggcttgagtcctgggagcccgctgtctgctgcctctgcaagtgggagaggtcactgcccgagggaggacagggcatgctgccaggctccaggggaggagccccagggagggagcctctggaggtggtgcccaggccgttctcctgcctcctgccctgtgcccgcctcacttcatgttcttcctcagatgagagggagggtggacacccccaggaatctcttccctgcaccttggccccctgcccctggaggagcccagcttcttctccagagcctagcagcccagaatctgagagcagaggccctggtcccaggccc

SEQ ID NO: 37899 - DNA, 2979 bp, Homo sapiens
ccctgccctagttctctctcccctgaccctgctgacacctgaggcttgtgggccccagggggtcctggtgggaatggccgtatgatcagaaattcttagaaagcggcagcaggaagaggagctggggaccagggatgaagcccaggcatcgcctacttcctccccatccttggccaactttgccagcacagtatgccttttccttgtcagtgggataaagcctcccagttcagaacacaggattccgggaagttgctaatgattgaccatatctggcatttgttatgaaatctgtcaccttctcagattgtcctctttattttttattgtttatttttgagacagagtctcgctctgtcgtcctggctggagtgcagtgactctcacctcggctcactgcaaccgccgcctcccgggttcaagcgattctcatgcctgagcctcccgagtagctgggattaaaggcgggcgccaccgcgcctggctaatttgtgtatttttagtagagacggggtttcaccctgttgaccaggctggtctcgaactcctgacctcaggtgatccgcctgccaaggcgttgccaccgcaccgggcctccaaattttcctctttattgataagaaatgccacggtcagaggtcgggtgcccggctagtggcagggctgtaactatgggaggctgagttctgagcagctggccagctgtgcaagcagccacaggagggggcgggaggagggtgacaggacggactctgtgtccccggggaccaacgacctcctttgccccagcactgccaaggagatgagctcctggatcgcgcgcatcaacttggctgcggccacgcactccgcgccgcccttccccgccgctgtgggctcccagcgcagattcgtgcggcccatcctgcccgtgggccccgcccagagctccctggtacggcctccgggaaggggtggggtccggcggaactgggaatgtgcacctggagccccaggactaactcggggaggctggaggcgggctgcgcacttggcctgggaaccgaggcggccaggggggcggcgcgcccgggcccggaaagcggcggaggggacgcccgggacagcgcccctcaccgcccgctgctcgcaggaggagcagcatcgatcccacgagaactgcctggacgctgccgcggacgacctgctggatctacagaggaacctgccggagcggcggggccgtggccgcgagctggaggagcaccgcctgcggaaggagtacctggagtacgaggtgagcggccgagcccacctccccgccgctgcgcagcgccctctccgccctctcgtggccgcctcggtccctgcagccgtcactgccctgaccgcgccggggcggggagaggcgcttgcgtgcgggcggggcccgcgtgcgccgtctgcaaaggggcgggggctcccacatggacacccgcgtgcacgggcgtgcacaaagagtgtgtgtccccacgcacttaggcctgtcgcctctcgtcctgggggcacatagcagctgcttgtctggaaacacccatagcagatgttattttacagttttcttttctcctaagagtatatttggcttttcccaagttgaagggaaaactgtatttcagctcaactgttccttctaatacctaccaaatattaataggtagtatggatggagcttgtcttccttgcatggattgtctcattcaattaacagctctgggtaggtcctgttatcctcattttacagatgaggaaactgaggcacagagaaattaaactactcttccaaatctggtaaatttacatgctgctctaaatgccccgtttatggtcttaactaagaaatgaccgtgtttttttgtttttgtttttgtttttgagacaaagtctcgctctgtcgcccaggctggagtgcagtggctcgatctcagctccctgcaacctccgcctcccaggttcaagcgattctcctgcctcagcctcccgagtagctgggattacaggtgtgagccaccacacctggataagttttgtatttttagtagagacaggggttcaccatgttggcaaagctggacttgaactcctggcctcaagtggtctgcctgcctcagccttccaaagtgctgggattacaggtgtgatccactgccccggccagtaatgactttgttgactctacagcccatgttgaaatgttttatcccttagtctcccccaaccctcacccatccacccacactccccaattctgctttggtgtgacgtcagttcatctgggatcctaacactgggtgcctgcttcagggatcctgggtgcctgcttagggtgagggcccactgggcaggaagggtaggtgaatgcaatgtgaaaatagagggaatcagaggccacccagaggcagagaccaggaagtgggagtcaacatcgcctcctgcctgtccccgctgtgcccgcatgcagccctctgcctgtctttcaaggtcccaggctatcccttggcttgttggttgtatccatggctgtgaactccccacttctcagaggcctcagggtgtggctgtgaggacccaacctcttcctcccactgaccagctgggacctttaacaagtcaccagccctcccttccgcaatgatttgtcccctcccagggctggcatgaggatccaatgggatggagggtgaggaagcactttgtaaactggaaaccatatcccaaggatgctagctgcaggggcctcaggagtacagtgttaagtagatgagggtagttagcatcatgctccacagatgccaattgttaaaatgctatttagacccaattagggctgtacagatgtgagctgtttgtgtgtagggctgcaaagatctcaggcatagtgggtgacacatcttttagtgcctcaaagatggaacatggcatagagatgttagttacagcactccaaggggttggttatta

SEQ ID NO: 37900 - DNA, 1162 bp, Homo sapiens
agcccttaccaggttcccattcatacctggctctaattcacaccttacaaatcggcgtccaccccacctttgcctgaaatggcacctcctagggcaattgatggctgcagtcatcaactctgatgccttctcagccttcttccgccatcacctctcagcgacctttggccttgatagctatgtgatcatctaccagaccctgcacccaggctcagcctgatcttgccccagtggccaggcccttgagtgggactgccgggaattgagtccagcttttctagccatctgaccgtggccagttagcctcttatgttctgtttgcttctctataaaatggggataataacactacttatgtcacaaggtcctcatgaagattaagtgaaattatgcacgtaaacatctcagaacaatgcctggcacagaagggacacctgtgaggttagctattaattcatagcctcaccagacttaccccacgtctgctcccctcctcctttgggctctggcttaggctctgccctcatgcatgccatcctgcttggatgctgggtagctttgcacttggctctgccttggcctgcaaataacaaatctgagctcaaatgagctttagcagaaaaggactttgattggctccaatagctgaataatctgtatccaggtcaggtgaggcttcatctcgggcttcactctgattcaaggccccttttctctcttgttcttttgggggctccatctcccaggcctatgagcaggaacaaccctcatgcttccaagatggccccaggaactctcaagatccattttcttggtgcaaatatagcagaaagtgactctctgcttcctggaagtttcaaactcaaatccaggaatagtctcctgtagcagcctgccttgggccgtgtgcccatatctgagccagtcactagagccaggggtttaaggagatcagagtccacttctggagaggatgagagtgaagtcagcaccaccaaaacatagggaccagctgtggagaaattgtgagtactggaaggacaggataggaggaatggatgatggggagaaaaccgactaatatgcagatgccctttcctccaagaggccttccctaagtcttcctccttcagtttctattacatgaaactctgtaactctc

SEQ ID NO: 37901 - DNA, 2190 bp, Homo sapiens
ttagaaagaaggaagcttgacccaaacaaagtttcatttacagtatatacagtcaggccttgggggcaggagctgctggggagcagagagggaccctctatcgctggcttcagggggtgccttgggtcccttcagtagctggtgggcgtgagctgcaggaagcacatttggcttggcaggagctgtcaggaaggggaagcgggtttcctgcgattctgccttgttctgccctgggtgaagccgcacaccacacctcacctcccaggggcccaggccctgtggaatgtctgttttaagctccctggggctggcctggctgacggcagctgccaaggggatgccgcactgcaggaggacctggggtggtgctataccttcacagcagcaggcaaaagaggtcagctgacagcctggtggaatttctgagggactcgctccagccctcagcccatgcccaagagggaggtgtagaaagagccaagcaaatggagtggagaaagaggacagccagagcctccgtgtggggcaggcgggaggctgagggaggtgactccctgggtggctggtgaggagagcctcggcaccaggctgtgacttgtgggctggagggaagtgcttatggtccataattgctagagttgtgttaataatggagccatggaggtgccctgtgcaccccttgggcccgggcaggaaccattcgccatccccccaagttcctcggctattgcttcttctctcctttggtgggtaccggctgggggctacatttcttcttcaattttgtctttttcagcatggcatggttctctttccctgggactcctgcccctcattaaggagtcttggaggacagtttggccttgtccaaggtcatcctgtctttcatggttcattaaattaaccacacagggagtgtgccgcaatgctggacttgtggttatttttcatgtaataaataaagattcctttgtgtgactctctggggcctgtcccaggctgagtcctcctgttgctcagtcgctcccactgtccccatggcaactacagatggtcaaaggccgtggcagtggtgggcggtgcactcggccttgatgtggaactgtaataatatggggaacctggacacattaaaaaaaaataacaacaacactgctggtcagaaaggaaaattgcaccatagccttccctgcatctgctgacctttaagacaacacaagttaatcattcatttctctggcctatctgatcatcgaagattaactcctctccagccctatttcctccttctctggcctcacctttgagtttctggccagaatgagaacagtggcttcttgccccttccccctatggctgctttgaccttcaacaccctcgttgcaatagggagagggcaatagaaaacaattgcatgtggaaccccaaagaatcaagtgcactgagaggtcattgggatcctccctagccttgcccaaacagtgccaggacagagagtcttctttcttaagacccagggagattagactgctgaggggtcaaaggggatctgggcttgacggcccttaaggtgaggctctgcacacctgcaggatgggcagcctggggaggctcagtgggaaggtgcctgaaccctggcatgtctcattgccctcgtcttttctggctaaattgaatggaaagctgggttggagttgaactcatctggcaaacagggcccaggtctgccacctttcaagttatttctggaatacaaagaggtaatgggaggagagggggtcttggggaatggatggttcctagcctgcaatggtgcctgtggggttggccatccttggatcactgcttctgtctggctccggtttgctctgatacacccaaggccaccactcagggaggctctagtgggatccctcaagtccccccattggtggggttttgctttgctgaaaagcttctcttcccagttcaggaccccaggacaagagaggggtgaagagaagcctggaagctcgctgaagctcactctctggacctcgaccctgaatactgtcttcatctcaggctaaatatggggaatgtggtggaacaaaagatttctgtttaagggtttggtgctgaatcatgagtatttctgagccacttagatggttaatgggggcaacaggatggcattcttgaaactggctc

SEQ ID NO: 37902 - DNA, 3833 bp, Homo sapiens
gctaggattacaggtgcacgccaccaggcctggctaatttttatatttttagtagagatgggattttgccttgttggccaggctggtctcaaactcctgacctcaggtgacccatccaccttggcctcccaaagtgctgggactacaggtgtgagccaccatgcctggtcccccacttgttgattttgcagaaaagatagctgtgttacaacctgtcctaaggtcaggtatgaatacttgtgcttctttcttggctccccaagccagagggcattcctatgcccaggtgagagagcacggagtgttactttggcagcacagtcagttaccagaggtaggaaaagcaaaggccaggcaggacatgaggggcccttgcactggctggttctccctgccttcaccaccctccaggtgaatgactgggtgaataatgattgactgaggaggtaatgaataatttatggacactgctggacctcagtctcctcatctgaaagatgagtggttggagaagtttaatggttttcaaatgctttttttttcagtcttcaaataagtgtttacgtagaagcaccatatctgaaacaggtgacagtggaccagtctgaatgaaatgagggttggcaggcctgagctccaaaaccttctgattgcccaagccctccttgtcttgcttggattatctccacacaaatggagaaactggacaaggtggtcatggaggtccctgaaagctcaaagactttctcattccaggattccccatgttcatatgccagcatggcatgggggtgctctgtagtcaagcagggtcctttggggggcttagggatggagccaggaaatggctctgggactcagcgggtgtccagagtctcatcagcagggtttctttactttcactgagtggctggtgcctgcacactgagttttgcaggcttactctcacagagtgagcttcctgcaggccccccactgcaacccctttccttcctggagctgtgtgctgactggtgcgtgagcaccccaggccctctccccatgctgctgatggtcagctttctctgcacgctcgtggttgccacagtcaacgctgataaaattgctgatgcagattgcctgcccagctgcgagtgctggcacgggaccagcagcccagacggtcactggaagtggttgggctgattattggcatcatctccattgtcctactcggttcttaaaggcatatggacttgcctcactcctacagcaaatgacggcatgggcaaagaggggcaacagacccaccctgaagacactcctcatctggttgacttggcagggttaagggaaaaagatgtgatgactaggagctgagagcttagtggttctgccagagctgcagagtctttgttggcctcagggtgggacctctcacatctctgtcagcttttcacggacaccaacctgttatgattcatttcacctgtcctgagcactagcaagaaaaattcgctgtagcttgtgatgtattattctggatttctcaactcattcatttgttcattcattcactataccattactgtctattataaggggggcacaatggtaggtgctgggaataaaaacgatgtttaacgtttcatgaggcttccctgtccttaaggagtccgcgtgtctttgtacctgtctgtctgctagattattaagtgacactgtgagaagctactgagagcagcatgtgggacatgcagaagggcaagaggcaggagagatgattcatgtcggaggggcaggggaggactgacggagagggtgatgtttggctgagtcatgaaggctagtggtatttttccatgcagagaagtgggaggaaaggcattctgtgtggagggcacacagtgtgcaagggcagagaggtgtgagcgagggtggtgagctcggggccatgagtaatgcaagagcatggggtgtgcaggatgagtggccaaaggtggggctaggaaatagtggctgaggtcattatgtgaaggctttgtgctactgcttcagagttgtggaacgtgatgttgcaatctgggaaagacgctgatggcaagggatagcatcatcaggttgtgctgccatccctgaaaggcccaggctcaaaggttttgggtgaaggaagccaggagggttagaaagggaggaagatgccagggcatctggtaaaataaagcatgtgtcaggcttggagttgcataaggcaggtgccctgagcccattgatgcaacttccagctgctttgatggagcacaggctcatttggagaatagaccttctctggcccttgcccaccctgttcacctcccagggcccagcttctcacctgctcgcctttggtgtggctgggggaggcataggcctctgggtagtgctgccgctcaaatgggcactcgagcggctcgaggtggtgctggctgaaggcatccgtgcgaaggtgctttcggggtccgctgctgctgctctgtgagtcaatgcttagtcggcagctatcctgatcacctggtaccccccgggaaggaagaaagcttttaggggacctatctattcatgctctaggccaaagtagaggactgactccaagctgactcactgtggagggagaaaaagggccagccacgtgggcccaggagccttggccaactgagggacaggacatgtgacagtcacatgcagagcccctacaaagtcccatatcataagtggaagggtttctgtccccatcaaagcctgagcaaactgctctcgtgcaccgcccgctgccctcctgtcccagcactcactgtcatccattttcctcttgtcgctgccaggctgagcgatgcccaggagcccattgatggagtaggtggagcccagggaatccgactggggtgactccgggggagttacagctgagctggggactgcagtgggggagagggagagggtcaggggtgggagtgacacccctcacagccctgggtgactctggggtagttacagttgagctggggactgcaggggctgggggagagggagaggagcaaggggtgggacaccccttacagccctggggtgactctggggggactgcggtggtgggaagagggagagggtcagggagtgagagtgacacccctcacagtccctgctgacactgtgcaggaggcagcaagccgaaccatggactgagccctggaggggctcaggtccttcctccagggggcctcctggtgggagggattcttggagttagagctgtctcaagtgtttgcacctctccatagttcagtgaatctgccctgggaacaggccagacttcgtcgcagtggcacaactcagtctacacatgggtttgtgaatggtactgtgcacagctatgtctgtgtgggtgtgtctgtgtgtgcctctgtgtatatgtgggtatgctgaaggggaggtgtacacgagcatgtgtgtgtatccaggtctctcagcactcactcagcgtgtgtccgggactcagggacttggtggccacgcagctgtccatagggaggttgaatggttgctgcactttggtccggatgattctgtgatgaagagaagaaaggccatgagagagaagaggaggaaagagaactcatggctgccccagacccagtcgcctttttgacaccccttttgggtatctccaaggcacttgaaactcaactgtccacagtcaagtctgtgaccctactccgcatgcctagtcctcctcagttgtccgcatttcatgattggtaccatcagtcactcaaggccaaaacagagatggggcttaacctctgcttccctctctt

SEQ ID NO: 37903 - DNA, 1097 bp, Homo sapiens
aatgcaatgggacaagcttggctcacttcaaactctgcctcccaggttcaggtgattctcctgcctcagcctcccgagtagctgggattacaagcgtctgccaccacacccggctaatttttgcatttttagtagagacaggtttcactcagttggcctggctggtcttgagcccctgacctcaagtgatccgcccaccttggcctcccaaagtgctgggattacaggcatcagccaccatgcccagccaatgactgactattttctttggccacctagaaagctagccgaggtcactggaccctctgctctgtcttgctggttcacctttgctccctgccctgtccaagcctgaggcatatccctcacccccctggtcactggttttctatcaggttttagcaggttcaagttgaagcttctcctcatggactctggaatcctgaccttgcttggatccccagccaggtccaacttgttaagctgagcctcctcttctggggcctccacccttcccctccctctatcctccaactagttgctttggcagatcaaccgcctgtgtcagcatatcctcctcttcttgttgtagaaactctctgctctcatctgcatgaaaaagaatctagctctttaaaactccattcatctgttacttccatccaggactcatctcttctgggacaccacaacccatcacaggaatcccctctccctagcccagcaaaggatcatgcctttccctaactacttcaggaggggagccagggcttttcacggttcaaagaacagtccaggtccctttaccttgtccaaccagggctcctcctaaatccacctaagggtcagagcagggggacaggcacacgtacacagagctgactggaagctgtggcacagaggcatttttaatggaagtggctttgcagactggaatctgtgactgcatcagctcagaagcaggcctttgctgctcctggtctcttctgaatctttgggtcagtggttctcaaccctggctgcagagaattagagtcacttgctgggggcggatgggctggggagttatatgccaaaacttgcgcctatttccctaa

SEQ ID NO: 37904 - DNA, 1142 bp, Homo sapiens
aaaagggaggtgggggtgctctaagcctctgccctgggcagtaagtcaggaggaaaagccctctggccaaacacccagcaagaaggatgcaatgacccatcttcctggtggacacaacgggtgagcttgggcacagcttccacctatgcctgtccaggcaagtcttcctagtgactgcttctccactagggctggaagagtgcttggagggccttcaggagagcccagatggtgggcagaggggcctttgcccagtcctaagcccattcctctggtcctcactggccagagtgccatttgtgaattgctgtagccatttgccctcactgcatcattgttgccttccggctcttttgggtccaggcactgaacacaagggggcgccagacagccacccaaacacagacaagaccttcagcagtccagctttgtcctcattttccagaagtttccgggccgtatccacccaaacctaggtgtttaggctgggacctctatatctgaaagcaaggtttcttagaggtggaggttcttcacctctacaaatgtgaagcaggtttaaaaaaaatgccattctggggtggcatgaattgggtattgtgccttttttttaaaaaaagaaaacgacgctgtaagttgtgtgggacattgctcttaattattatgaaggactgactcgcatccttagaaacccaaaccctcaggaagccacctgagaggttatttaccgttatcagcaagcattgtagtgctgggaaagatgcattcacatttctggcccctaaacggtgaattctctggtgcttattttatttgactgtcttctgaatgactttgtgttactgtggaaagagtcttgggcctgatcccttctttgacactgcctgttttagtcttatcatttgagaaagtgggtttttttttcaaccttagtgtttttatctatcgaatggagcttaacaaaacttatgcctgctgctgacttaaacccctataagaagataggggggctgggtgtggtggctcacgcctgtaatcccagcactttgggaggccgaggtgggtggatcacgaggtcaggagatccagaccatcctggctaacatggtgaaaccccgtctctactaaaaataccaaaaatt

SEQ ID NO: 37905 - DNA, 3909 bp, Homo sapiens
atgccttcctatgatgatatttgaaattttaaaataaatttgcactgtgactaatagactttcaatgggacttttagaactcttttttttttcttctagacttagtctcactctgtcacccaggctggagtgcggtggcatgatctcggctcactacaacctccacctcctgggttcaagtgattctcctgcctcagcctcccgactagctggggctacaggtatgcatcatcatgcctgactaattttttatattttggtagagacggggtttcaccacattggccaggctggtctcgaactccagacctcaagtgatccgcctgcctcagcctcccaaagtgctgggatcacaggcatgagccactgtgcctggccaggccttagaactcactttttaaaatgaatacctcatttgccaacttttcttctcaggcttgaggcccataaggcttttgtggcaatattatcaactggcaactagttataatttttttaaactcagtgtttttttgagaaaatgtaattcattgccaatatcaaaatacagaagtagagacgagagactaactctgccttgcctttgaaaatgcaagagatctggccgcagatctgagcgtttctttgtggaaatgaacattctttcaggtttaacattccaacaatcctaggtaattgcctaactacagtggtttttgaatttgcataatatcccacaatttgtttaattctatgctgatctgctgagccttcaaaagatgttctttcttttctggactcagctgtaatgcactgggctggtggtagggtaataaagtgccctggtttgccctggacgaaaaccaacagtgttttctagatgcgagttaaaactgggactttcccgggcaaatcaggatgaattggtcatcctagctgattagagtgtgggagtgggatggtttgggggtcttttataagctgccgtgtttcaactgactattgggtgggtgattgtttgcacacttgggtcattctacctgctggctcaggtgactgagacccttgaactccagtaggtccatgagctcttcctcttactcctatgtaccctggtttctctgggcacaatgcccagagaccagcctcgagggaagaccactgctcccaacaatcctcctggcttacttgccaccatgccacttcccctacgtaacgaaccattgttgggactaaagtacatcccttcaggaagaaaacagcagctctctactttgcatcagaggtgagtgttccagccctaattgtgtagaatgggatgatttcttctgcccgaacctcagtttccccttctgcatgatgtggatatagacggggggctggggagggtcagacccacctcgtagctttgttgtgaggacgaataaaattatgaatgtgaaggccctttgaaaactacacctctgtacaaaagttaattattattagacaacaaaggcagaggaatacatccaaagagggcaaagttaaaatgtccctaaagttttgctgtggaagtcggttcctttaatcctttcccaaaggagccttggagaggaaagggccagtgagcccgtgcctgtgggtgcaggcgtgggtgcaagggtagcagtggggcaggggtgtctgtgagggcagcaattaacattcgttgacccagagagaggggagagtcaatggcagaaggccagcaccccagcagaacttccagcagcgacttcatcattttgcagagggcagaagtgttcagggcactggcagttttcgctccaccctctcccctcacagacttgcccaatcctgccgaagccacgtgggatttcaaccctgtccctgcactcaggaaatggccgacagcctgccctggggcctcctggtggcagtgcctgaaaatcaatcattaattattccaggttctccacctccctaggctttgaaaactcagaaatagaaatataggtcctggcaggtgaaaggaaaagagccactggttgggctgccgagggcagtttggaagaaaccactggtggcatttgtccagttggtttgggtagggatgtgtcctgggcacttgtcccttgggctctttgcccaccccacagcctttggcagcagttgcctgggcttctggaaggagaccctggtacttacaaatgggtggaaaaaaaacttcctggggacacaaaaaggaaggtgacagagggagataaaaggattgacgtacacagctcaatttttttctctagtaatcatagttttttttttttttttttttaagttagaaaaaatgagctagacccttttggcaacccatcttgcagatgaggaaactggattctagggaaggtaagtagagagcaaggccacccagctagcagacagccaactaggtggccaaataaagcaccagtgactcaggctttgccttaaatattataaattctactcacttcagcctagtttttgctactctccacacctgccccttcccctcaggaaggaagtttctggaacccagggagtggccagggtgaggtcagacccccaaggctggaaaactttcctaccacgggagaggagagcagctcaccaggcaggaatgccctcccctcagctaggcccctgtggtccagcccagagcagcaggagtcaggacgcaggaatcctctcagaccagtgccagggccctggagtggctgccttcctgacagctgttcttggggaagtgccaaggaaaaaacccaggcccagggcttttcatcagattcagggttggcttttgttctttatggccttggaatgccagcagttcctgctgtgggcacaaaccacggaatagggcctatcctccccagctcctggcagtgcccaggggcctggtgaagggaccagagactctgcaggtttgagtggggcaagggaacgaggttgaggcatagagaagattcaagagatctaactggccttttgcttaccccaggagggcttctggcacattctgagtgcagtaaacttgggtgcttcgcccactccttcatggggctaggctcactacagggctgtgtcctcttgtgtcatgttgtggaccacacagtgcctgccttccctgcatctgaaggagcagacttgagggcttaggggtctggagccccgttttcctttctatgcttcagtggctatccttgctactcatggcccccacaccagggtggacataccattaccccaagagaatgctaagcatggtatttccttctaataacaacagttactactactgttatttactaagtattacttaatgccaggaactgtggagtgccttatacacagccccatttatctttcacaacacccagtgaagccagggctttaaggcaactgggccacagagggtgctctgggtcacccaattgctgagcagcagaagcaggatctgaactcaggtccatctaacacctgaaccagcattctcttcactaccctatggagtagctccaaggcatggacaactgtaataactccaaggaagcattagaataaactagaaaataaacttaaaaaacagtgtcagtgttaggggccactagtggactgttgagaagaagcttgaccccagtaacgagacgtgtgatttttaggcccacagggtgggtaggtaactgaaaggatgtaaaggaaatcaaaggctgggatcatggtgaatcccatcgctctccgactgaactcctactgtgcttgcaaagcacagacacagaacacacttgtggcaagaatgagtgagtcatccatttacacattttctaaacttgttttaaaattctttctatttttaggcctaccatattttatgtcacatagcgtttcctattatttgttccaaacaccact

SEQ ID NO: 37906 - DNA, 7356 bp, Homo sapiens
tcaaagcttcccgagggaggccaacagcaaagcagaaagcactggagtgtgcttgtgttgacagctgccggatcagagggcctggcttgggatcacaggctgcgggggtggtgaagcagtgtgcagattctgaagcctggcacccccacccggggccccaggagccaggttcacccacacagaaactcaagggaggctgcgtttcctaatcaacagcctgcaccgtgtggtagatgcttttcctgtgggtcatctctttaaattctcccaagcctgaaaagagagattattgttcccattttcgagatcagaaaactgaggctcagaagagtgaagtagcctgcttaagaacgcatgtcttcatcataatagttggtatgcaggtttccctccctgtctccatcacacacacacacacacacacacacacacacacacacacacacacacactgcaatgactgtctctctaggccggctaacagtggaccaagatgagcccatccttgcctgcatcctgcatcagtccaccgggagcaggcagcagggataaggatggggaggacgtggtcaaggagtcggactacaggcacccctgtggctcagggcatagagggggctcaggacacatggagcaccccctcgcccacattccttttccgggtctgcctctctaccagacatctctccttcctccttttttgcatcctctttggattcattttctcctctccttttatttccccttctctgcttcctgattcaccccttgctgtcttttccagtcttttccgttcctctcttcagtctctccctctccctttgcttcctttctctggactcccctggctccttctccctttctcatcctccctcgtgttttcctctctttgtctcttcgatctccttccctccttttccgtttgtctctccctggcctgcgcccctccccgccgctcgcagcctcccgcgcgctcctccctcggcgccgccaaccctccctccgccccctcggccccgccctcccctcgccagtctccccctcccctctccgctctcgctctccgtgatttattacttgccctgctgcttctgacaaactatttgtaggaaaatgagatttggtccgcgctggatggctcctctgggaggcaggcgtgggggtcgggtgtcggaggccccgtgcgcccccccaccccccaccagagcccacggcgctcacggagctctttaagataaatgagcaaaattaagagactcactgggggaagaaaacactggatgggagcgagcgagagcggatggtacttggtttcctcccagaaatgcatccacgtgcgccccactggggcctcccccatctgctgcagactccagggaacttcctcccctcaaagacgaacttccagccctggagcatgtttcttcctttcctgggatgtggcgctgaaaagggcagaaacctctagtaaggcacaagcaacagattgggggtggagcagcaggtctctttggaggtggcctggaagaaaccggacagagaggatgggaaggggagaaacagaagagtgtgacgaggtgggtgtccaagggcaatgggacaggcagtccgggtgggagagtggacctgaggaagtagctgcaggcccagactacttcagccacaccctgatcccctgggaccctcagggcacaggaggcagtgctggctccaacctcagtccaaggagctgtggaagcctcagaggtccttggcagagatgagccctcaattctcacctcaaaggcagcgattgaagttttctcttgtttgggtggcagaactataagttgtcagagggcaggtagtgggtctttggtttttctgcagtgccacagggctagcttaccttagaggccataagtattatttgttgagatgcatgaatacaagaatgtcttataagctctaggctcaattttcaactcccacagatgtgcaatgaaaacaattttccagactactttttttccctcttattttgaaagcaatacacttattttttccatcaaacattaagacaacagagataagcaacatagaagaaaataataatcacctgttattctactacgaacaatttggaatttatcttaagtctcaaaatatatatgtattaaaacacaaggtcatattgtaaacattgttttgacctgctttatttcattcgatgttaaattgtaaatacctttttttttttttttttttttttttgagatggagtctcgctctgtcgcccaggctggagtgcagtggcgcgatctcggttcactgcaggctccgcctcccgggttcacgccattctactgcctcagcctcctgagtagctgggactacaggggcccgccatctcgcccggctaattttttgtatttttagtagagacggggtttcaccatgttagccaggatggtctcgatctcctgacctcgtgatccgcccgcctcggcctcccaaagtgctgggattacaggcgtgagccaccgcgcccggtccctttttatatcatgttaaatatttcttctaaaacaaaattttaagttgttacagtgattttttataggtttgtatgctctatggatgattttttttaacaaggcacatatttttgttcattttgattgtttctaaatttttgctattatcaagatttcctaacttttgcattattcagattttttttttttttttttttttttagacggagtcttgcactgttgcccaggctagagtgcagtggcgtgatctcctctcactgcaagctccgcctcctgggttcacgccattctcctgcctcagcctcccaagtagctgggaccacaggtgcctgccaccacacccggctcattttttgtatttttagtagagatcgggtttcaccgtgttagccaggatggtcttgatctccttacttcgtgatccgcccaccttggcctcccaaagtgctgggattacaggtgtgagccaccgcacctggcctagatcatcccatttttatcatagtcagtgtcttagtctgttttgtgttgctgtaacacaataccacagcctaagaaatttataaagaaaattttttttgttcttactcttctggaggctgggaaatccaaggttgggggctgcatctggtgaggaccttcttgctgtatcatcctagccgggaaggaggaaggggaaaagagcaggaaggagcaagagagaaagcagggcagactcatcccttttatcagaaacctgctccatcaataactaactcccatgataacaccattaatccattaacgaggacagagcccaataacccttaaatatccatcctcttaacactgttgcattggagattaagttaccaacatttgaactctgggggacacattcagaccatagcagtcagttataaaagcgtgatttatgctttttcctagtttcataagcataagatgtgacatattttaatagctgacaattctacagggcctgatctgagttcctagcctagatcagcctttctagaactttgtagattttcaaagatgaccagttctgcaagccagggtaatctggcatgttctggaagcaaaggaagtggatatggcttcagccataggaaacaaaaaagatatgatatttaaagaaaaagattattcagttcaaatcttcctaaaacatttacgaaacaaatgtgcaccaagttttaatactgggtgaagttacctctgattggtgttaactatgttatgtgaggataccaatttcaaagtatatgaaaatgtaaaacttgaaaatggtggagtcatcctaagtattacttcataaaatacaagtagagaagaaaaagaagatttgacatataaagatacgagagaaaaacactcaaaattatgtgacctcacacaggtaaccctttcaagtgatggggcacttttcaagtggaagctttcctccctgccttgaaaacaagaatgtgtgactggtgtccatttgtatgtctgtctgtcagtctggagtgtgtggtcttaggaaggctggaagatgatgcaaaacactttgatcatttgttctttgcgtttctgctgctattagcacttgcatgtgctgtactgagacttctactgacacaactcctccaatcaatgtatttcttggaggacaccttactcacttgttctaaacttcagtgtcctgggtctctgagtggctctctagggcagtaacggtgggagggcagagttcacaaactatgttcaatatttggaaaggactgattacctacagtaaagtgacttgggctagtaaaatgtcaggtttctttgctttgggttgatttataacaactcaatttgggaatacgtactatctcaatggattgctctgattggcatttttctaggtccttgatttataaatgaaagggagaactgattattcaataaatacagtctatttttcctaattatgtaggaaatcatgtctttgtaataaaaggagtgtttgatagaatgagctcatgaagaagagtgtagtgttcaactatagttctctctactccccagatgccattggggtaaaagttacccaaacaagagaagattctgttgaccctgaagttgaagtatggtggagattttctagaaaaatccattcaaatctttttctctcccagatcatgaaggaaagaggaggcgtctactgaatgtaaggtagagccaaaggcatctattgatgactgaagaagaggcatgaatatgacaaaaacaggaaggtaggccaaaaaagatgattcatagatgattcaacatggaggccccaaccttattttattagtaaaaaaagatgtggtggcaagtgtatggggagagaaaagaaattaaaacaccatgatccttttaatacagtccaagatttactctgcataatccagtcatatttttgacagtaaattcatagctcctctgtccccagtaacagaacggtgatctttatggggccggcgtgaggaagctggcgggcacggcccccgtcacattaaactgtctcagtgaagaggcaatttgtttgatattaagagttataaaaatatcagcacagagcggttatgccagggatattgcacaagccaatctgaattttaatgtagtgtgagcaataagcaccgcattcctgagctcctgccacactccctctgcaaatatttgaagagaaaaagacagaggttttgagtgtcttgctcttttccacttgtgcttcatgcgggcttgctcatcaccagatgtgtgggagctggcaagggtttccaggtgcctggaaggggggttctcaggaagccccacacaggagatccaatggcatccctggcatcgtgtgcagagagaatggggtcggcttcctagcacctctgttcgtgcccctcactcactcaaggtgtcatctagcagccaggactcagctcctccacccagtgtctcctgattttcatcccaagtattctttagtgtcttattccaatggaacgccattgcccaagcatcccactcccctccccatcctctaagtccaccataaaatgcccttcttatcttcttactgtgcccccatcacaccccgtctctttagcccataggtgtacactctgacctctcccctcaggcccttccatcagttttctcattatttccctttaccgccattcctctcccttcacctcccagtcacctcttcccagcctcttctcccataaatatccatttaaccttacagatagatctttctgaaacatgctaaccaattaatttcacttccacagggtgcctactctgtgtcaggcattgggtagtggctgaaggagacacaaacatgaacaacacctggtggtctctgctcttcagggactcacagtccagttgtgaaggggaagagggggtgccagaggtgatgggggtgccagacaaggattctggtcatttttactttgaggacagagtgagataagatccccaggagaggtccaaacacaggcagtaaagggcctaagaaggagagatgtgtctgaagaggggaaagagagaacatatcatggtggcgactggctatgccttcaagaaggggtacagttggcaggtggcagttggagaactgggcagagaagagtctatcttaggcaaagcagagaaatgctctgatgggggaattcatggggaattgttaagaaatagtgagtcatccagcttgtctgacagggctcagagaagtgcagggacatgcccaagctaatgaaaaggtgagtccgatatagcatgctgtttgtctgattcccagttcagaatgctcttcattacaccacagcagtaattctcaaggtgttagcctgagactcctggactccttgagatcctttcagggtgtctgagaggtcaatgctgtttcaaggtcgtttgcctttgctttcttatttacctccgggtgtacagtggggctttttactgtgcatttggaagatctttgtaactcagtgatccaacattttccaagtgaccagtgcatgatattacaaatcatgcatgggtgaatcatccgctcaaggcctctctctctctcttcttctctctctctttctctctctcctggctcttgctctcattctacccacctccatcacatcaggcttatccttgaatcctttcatctggaagtttatttccttcccctttcacccaacttcctttctgcagcaccttccactgtactccctcactcccttccttcccagattccagatctaggctacttacatttctcaagccagcctccatttctccatcttctgttatccctcaaactccctctccaatgtttcataattctttcacaggcatggtctccgtttcttctagagtttttggaggctatctatgcttcttaactttggtcaccagcttctcaaaagttcttatttgttgctgcaatgatagataagtgttcacatttgtgaattatgctcatcacttttgaagttatgagagactcttctgaacctcccagcccagccctgggtccaacttagtgcaaacaaggaggggtgtcctggctctgatggagggagcatgggcttggagacaggcagacctgttgcagagccagctttgccacaatctaacaatgtcggtttaaccaagccactccatccctctgagcattaggccccgtgtttattgagtgaagataataatactcaccctgcaaagttcttatgaaaattcaatcagaatatacacatatggcagagagtaagtgctcatgtagattcactattattatcag

SEQ ID NO: 37907 - DNA, 4617 bp, Homo sapiens
tgcctcatcgggttgccgtgaggagtgagtaagtgaatgcacataaagaaattggcagtgtctgccatggcgatggcttagtagctgttagcttcagttattaaggtttacagatgaggaaactgagggacactttccctaaatcccaagcccggagagttcagactgatctctctctccttctcctgctcagagcctggctccctggagccctttctgttgtttacacatgtgtgtgggaagtgctgctggggagggtgtgtgaacaaggctttatggctaaggagggattggagtcatgtttccctgtgggtctcatttcccaatctggcaaggcttattcaactccccactttcctcactgcccctccctgccatcctccctgtcgctccctttgtgaagggcctgtttcgactcctggctaggagagtagcagttgggaatcccttctttttctaaatttctaattttattatagtcttttataactgtctcaagagtcatcctcagggacgatatttcccctattttgtcacagactcaaactaagattcttaaaagtctctttaactttaactttgaaaaaagatccatggaattattttaaaggaaggtgagtatgaataagaaaatgtgaaagaaagtgttaggaatggggagagagagacagaagtttctacactggttgatgtaagatcaacaagaccctatggaattgagccatttgtggagaccctcaggagggagagatggcccaggacagtgcagaaagtgtggggtaggtggggtgtgtgaccggggtcctaggtcttccagtagtttgaccctggtactttccacagaactgaaatatgggtgtctcaggaacctactaatatgaagggtttgagtggaaatctcctgccatagtggcttgagaagactccagggaaaggtaacccatttactcacagcagccattaacgttcagacccagaggagtttagcagattagctctagatttataagacccaggaaagtggatactgggctgaccaggaagggatggggctgagggaaaagaggagaccaagcctgctggaccgaatttggaggcaccggtgaccccctgggggagaggcagattttgtagggtcttcattttcttctggggccagtccaattatcttgggtggtgggtctgctaatggaggtgggttggcttgtggaggacatgagaagggagagagatcaggatattatatttaaggaattatgttaaagggtaaaatctagaagccatagtctaaaagaatttatatttagttggggaaaatcaaaggatgcagaaaagaaaacaagacaaggaaattctggttgtgcctaaatcccaggaacaggtgctcagacctaaagagctgctgccaaccagagctcttggtggactgactgatggcaaggtgtccgacttcttagggtctcttgaaattcctttcttttgatgccacacagaggctctaagagaggaggtccttgttctgacaccctgagggtgggctttgaactctgcctccccttcactatctcatccttgggagcaccccaggcttcctggactctcagggggtaaagccaagattcccaggtgggacctctcatctttggggaatgcctgccccacacaccgagcctgaacttagagcacacagctgtagggtgtcctgagttgatctaaggtatgagcatctgctagggttattttattatctcctctggcctgaatgattactctctgtatttaaacaaacataaaaaggtaaaacaaaaataacaaaacaatgtattctcagtcttgcatctcaccagtctgtaggttcggataatgacatgtgaatcatagctttgagccttgctacctttgagctcccacctgcttcacagtgtcttactgagttccctcctcccaaacattcttggactacccatggggtagttgctagaggctgtgcagtccgagctaccatttgatgctggcttctgttactttggcctgtcacctctactattgagcaagagtctttgtttgtcccaggattgccacgataaggggctctctctgtcatcccaaattgctgccaactggctcaaccactggtgttcgtaggaagtgagaacattgtgtccccggtgcttcattgaggaagatctcaaaatagctttgtctgtacctcaaagggtcacaatttagtgggacaaaatttagtcaatttacaaacgcacagacgtttcttctctttgtgtcttttggatagctgaatggggacgagttcctaatgttactcaaatgctgcacacagagccaccgtcaccctaagccccagtcctgctgctgtgtctggttcaccttggcagactttcttactttcagtgaattatctcacagggttcatatcattcctttctgcaaatgggcttccataaggaaacaccaagtagctcaccagacatgtctacttatgtgcaaactcctatagaatcagtttaagattttttttgagcaatatctcatttctgctgtaatcaagggatcacatagatttttgagagaaaggtattttccagctccatctagcagagtgttccaggggctcccttctggcccagctgggacacctagttattccaattagcagcaatacctaggcagaactttcctgaggaccgaatctgccaagagttagtccaacacatccactaccaccacaaagcccaggaccaacttcccactccactatggctgaataaaccatactcctggggcaagacatgctcccagatccctgcactgaattatctcatcatgcaagacctccactattttgggaaatagttactgtcttctgtcttatgcaacagggcacactaaagacccagaagggagagaacatttactttaattagtatggactgtaatgcagagaacctgtagccatgaatcaagtatattcagaccagagtggatctgtctgagagaaggcaaagatctcctttttcagactcatgaagcttcatgaaatgtcttttcttggtcacttattatttatgggccaggttaatgtgccttattggatccttgtcataacatctccactgcccataacatcttctcccttttctttccttcttttcttttctgtatcccttcctcctttcctccatttccttctgtaccttccctctctcctgccttctacctatacacctcacacgctgctgggtactagagggatgagggttgggtaaggcattgtccttgcccttgaagggcaagcacatcatatgacggggaaggcagatgtgtacacaattaactataataaaatatggtgagcagtgaaatggagatctgcccaaagtgtcctgggagcacggaggaaggagcaaagaagctgccttagaggtcatcaggaaaagctccactgagaaggtgatttctgagctgccttttgaagaccaaataggaatgtcgaggtgcgtaaaaacgggaagggctttcgaggcagggagactgtgaaaatagtgcatggcatatagtctgatttggccagcggatagagtaaggaatgcaggaacatttgaacaggtagctcaggatcactatgggctgggatctgagtgtcatgcttaggaaatggcattttgttcagtatatggtggagagccacacacagaatttttatttgggcaacacttcttgactggcaaggctcacacagcaatactcaaggtgggcagtgaaatttgtgtgtaattgtgtttaatcaatcaatggatcgagtttttattaatggccagtgtttgcaaggttctgtgttagctacagtgagattgcaaaagatacattatgattcatatactataggaggtcagattcatcctcacttagaaaaagttaagggtagggagggggagtacaatacaagattgtgtggttgaagggctgagcaaagaagagagagcagaggagtctgagtaggtctaccagaggaggaggtctgaaggatcagcaagaggccattcttcatagggaagccacatgggcaaagacttacatggagtgtgtgtggacagcgaggtgcagcatcacaggacctctgggtggggaggaacttaaaaacccttctagaaaaactatgcatgccttcccagtcctacatgtgggtttcttctgtaatatccctacacgtgatcatcagtctttgttggaaatatttcaagatgggagcagataatttcacctttagatgtctctgttggaaagtcctgtggagcctagctcatggtttctggtgttcactgatttcagatatctccctctctgtcatcagtatctctccctgtttgctgcagagcagcccttctgatttcctaaacaagctcggcaaccttttaacttccccttttccaggttggaaactcagtttctccaactgttgttccacaggttcagctggtgaaaaccctccctttgattctcctttgaagtaggatctgctcagggctgtgtagtctggacacagttcagtgggtggcgactagcctctgtaaaatgatgcgttttaaatggtattttgtg

SEQ ID NO: 37908 - DNA, 869 bp, Homo sapiens
cctcctcggcctcccagagtgctgggattataggcgtgaaccactgtgcccaaccaacttcactagtttgttattattaaagcccatttgtggtaaggagtgtcaaagtttgtttatacttagtagttactgatcaactattacacaacatgtttgggcatacagtaattgatcaataaatatcagtaagccagagggttccaactctccagccttagctaacttcctcttaaaacacgggttttatcctcatcgtcaaaagtatttcaagcactttatttctggaacatgtggaatctttccttttaaagtattttgtagccagttgcaaaatgatgctgatattttggaagaatattaatgtgcccatcataaagggagaatagttgaggctaggtaggggaaatttgaagtcccagcttccttgtctggcttgatggctggtcttcttagcatgtgagttaattagacagatatggaaggatggaaagccagaggcgcctcacgttgacgatttctctccgagtgctctcagtgcgcagcacagaggatctctcgattgactggacgcatgctcccaccttgtggtgagatttgatatcctctggtcttttttcgtctgtacatcctgctggggaaaatgcaaccatttagtcagtgaatgtttgctgagctccaggtgtactcccaggcagtaggtactgggatacagacatgaaagaacagacagaattgtcctcttgaggcttactttactggatatgtgtgtgtgtgttggaggggagggggatgtaagatgggcaataaaaaatttatacagataaaaaacaaagtaatttcagatagtgcgaaatactatgacaatgaag

SEQ ID NO: 37909 - DNA, 459 bp, Homo sapiens
tttaacaaaattgaggtaaaaatctgcattaaattacaccaagaaaaacatttctaaaacattgtttccataactcattataaatatttcatcttccgaaagtactctttgattacctctggccttctgggtctggtaattaagttgacttaatatttgcacatagctactgattactcaatacaggcctatcagataaaactaaaatgctgcaacttaatcagaatgatgcaatcttgtcttatataaatatacaaatcacagtatgctgacactagataacttcagctttatttgccaaaggggatttagaatatactacaaaattgtatataaaataaccctttacaaggatttactaggatgactgcaaagaaaggcaaattaaatatacctggtcccatataagaattgttgcctaacctcatatactaatttgaatatgaagactcacttttt

SEQ ID NO: 37910 - DNA, 2095 bp, Homo sapiens
ttcagtgtgaaagttacatagaggataaacgtggaatctaccttgtcttaagagcccttctgagatcctcaagagcaatgccggaaaacttggcagatctcagtctaaaaggaggtgaagaactcagcacccctaaaaacaaccatgaaattatgctatgaaaacgtgaataactcaaggtaagattcatcacatcgttttttactcttcatcttcaaactcaaagcaaatcaatgaaaaggaccaaaatgtgttaaacatacttgccacctttctcagtactttcatggtatccactgcacgcttcagattatacttagagagatacgcgatacggggcgggcagggagggggagtaatatacaacatacggcacatttaagaacagttaactaccagaaaatagcttctctgagtttcacaaatacggaactccattcacctctccatccagaggaatccatccctggggacagcgtctagacactgtttctaaaagtgtcttttctgtccctgatctgctggagtggaatttggttatcggagagtaagtgatttgctgtgggtcttgaaggcacctttccaatctcttcaagtggtaaaagaaaaggattctccatgctcctccacccacctctatcaaaacatccagtcattttaaaagaaacagctgggaaaagaaatcatccttctgttttggagcggggaagacagttaaggcagcgacgcctccccggggagccgaggcgagggcgcacgcacggcttcctcaattgccagcggtgggcgcagggctccggcgcccctgtcagctcccgctccctccgcccctagagaccttcacggtttcggtcaaggcgctcctgctgccaccgagggcaggaggtggtgctgctggtgggcactccgtcccggtttgggctccggtgatgtcggggcccttccctgcctgcctacctggccttcctgccccgcgatggcgtcgtggcggcaccatgagcggaccggtcaggccccgcagccgcccagcgccacggccgcggcctcggactcacagagctgtcaccgcgcctgacatcgcgccgcactggaggcccagctcctgaagacgcggtgcccctcagggagaggctcccgacaccacccaactccactcggcccaggagggcgtggagcgggtgaggggaagggacggcacagtcagctatggccgcggaggcccggagatctgctctggccccggccccgcccccggcttgccctccgcgcggccccgcccccagtccccagcccggaagcggtggcgcgcgggtgacgtcataggggcgcgacggcggactgcgcgcggtcgcgtatgcagcgaggcttggcggagctaggggaagtaatgcgaggctctggtcgccgagcgagggctcgcggcggcgaggcgaaagaagagagaagataggaagaagggaagtagggcgaggtggaggaagaagaggaaagcgagcgtgggtgtctggggcagagcaaaggacgagggagtggctaaacctccgcccgccttagaacgaaagctggccgttccgtttcacaaactgcgaacctgaaacttcggatatccctttctcgatgacagccgaaacgcaaagtggcttagagtacttttgattcttgaaaccttttgtatataaacaagatctcagctctaggagttacaacctacatcctaggccaagctacttcaacttctctggtcctcggtttccttgtctacgataatgatagtacctgccacattggttttttgtgtgtatgctaggattgcatgagtttacatatgtgaaggacgtagatcaattcatggcacataataagaacctcacagacgtcagcaattttttgttcgttcgtttgttttgagacagggtctttctctgccacccaggctgcagtgcagtggcacaatcacagctcactgcaacctctgcttcccgggctcaagcgattctccagcctcagcttccagtgtagccgggactacaggcgcaagccaccaatgcccggctaatttttatattttttagtagagacagggtttcgccatgtt

SEQ ID NO: 37911 - DNA, 3159 bp, Homo sapiens
aaccttctagggtcctaaagtggaactaggaacttattagatatgcacattctcaggcattatttccgatagcccagtcagagaattctgggggtatggcccagcaatctgttttaacaaacctttcaggtaattctgatacacactaaagtttgaaaggtttctttaaggctttccagttttcttttcttttttggagggatgggggggggtctccccatgttgcccaggctggtctcgaactcctagcctcaagctatcctatcctcccacctcggccttccaaagcattgaaattacaggcatgacccactgcggctcgcctccgtttctaacttaaaaaaattttctttggaggggagccttaatcctttctattatcctgctagtagaatcttactactcctgagggtaatctttgtcataatccaaaagccttgaataaaggcctatttgtatagttatgcagaatatattcctgggaggtttgccttcctaggagcacaggtcggccctgggaggtgggggttggggggcagggctgcattctaaagtcctgtaacaacgcacaagtacaactgaatagaactcggaacaaaggcatcagggccacggtgcaagtctttgttcatccgttccccgactgctcaccctgtctgataccgctcttttccacccagaaaagcagccactcaagttttaagaatggatgtatgccgcggacgttttcgattaggccgttttctctcaggcactggaggatattcgtggctgcaggaggcgcttccaccctttcctcaacctagcaaagaagtaactgaaactaacccaagggttacaaccgaaaagccccttccagcttcagaagcagaactggaagctcggatagacttctccgcctctacactcctggaaaacccgcagtggatttcaccaacttcaggatcggagcccaggcaggcgaacgtaccttattgcgcatgctcgctagcccctcccgctcggagcggaagggggagcgctgggggcctgggcctggcctggccggggcgtcggcaccggcggccatcttggcttcccggggaaaggcggcgtgaggggaagaagttgtagggtgggggcaggagtgaggaggagggaagagagagggggaggaggccgcggcggggcagggcggggactgcctgcctgcctgggttgcggaagtgatagccgccgaccgagcctgctgctttcttgctactgcttcggcttcccggctaccccccggacggtgaaggcggcccagctgtggatggtcagatagcccttgtctcccgccgccaatctctggcccctagcagcacggagcagacggcggcagcagcagcagcaggcgaggaggaagatggcgggacggctgccggcctgtgtggtggactgtggcacggggtaagggggcttacgggcgggggtggggaaactgaggcggaggaaggaagatggcgggggagggaggaggccgggaaatgaatggtgcggcgaggtgccgccgccggctgtcagtcctagacccgccggccagcgaggggtggggcccgcagccagggcctcgcgggtcccctcgtttctccctcctgggactggggcgggggcgcgggcccgagattcaacccccaaccctcccagcggctttctccgcgcgacccctcccggcccttcccccactacggtgggcagcgccgcccaaagggcgctggggacggtcgtcttgggggtggtccccgggcccgacccatccggctttcctttccctccgcgcccgtttttgccagtcggtttggggacccaggggccgagctcggggactggcctggcaggggagctagaaaagagaagcgctcctggtaggtttgacaagatcgctgtgacaacattctgcccagggtgtgggtggggaaagggaagaatcggactctgaaaatgggaacctacagtggggctttcatttgaccacccaccttctcctttcgactcctggtcatttccatctccctctgcgttttaaccggtgaaccaagtcacattttaattcgagggagaaagatgtcatgtgttacttctgtagcctcaaaaaagtcccccagtgagcaagcgcgctgcaacttccttagttttgtcaaagccgcttcctgctttcagtcttttatacccttataaggtagtttttagtttccaacctgagcacatcttactagaacttttaagcaggttttaaagagactgaattaccggtgcttggtgtccatttatatgacttaaaaaaatgtacttatgtttcatggagtgggggaaaggaagcaccctggaaaataaactaatttaagttgtattcgttcattctgtgatggtatcttgaaggaagcaggaaggtatagaggtatataggagggtgtttaagttgcaaatagttactcgtagatatgtagggtagtttgcgaaaatgtagagtggctttaaagtgtggtcgttcattttgtattaatagacgttttagagagttgtaccacactcataactgcatagagaatagactacccttatttttatgtagaatcactgcttcaggatgacatataggaaagtggtttttttttctgtgctgatgacatctctccaattcccagaacactcccagttttttttttttgagggggaagtcagtaagaggtggactgtcaggcttttttttttattattaattataattattgatttcattattgttacttaaaagattgtgtgtccttcactctttatgtgaaatttctttaatcttcattctcataactagctagtgtggcagtttctaaaatcccagttaggtagagagaaaccaccaacttcttaatattctcctaggaaaacactagccttggaacttctatgtatttttttgatgaacactttatttaaaagtttttccttaattcagtctcatttctctgaaccaataattttttttatttctcccttcttagtctaattggtgagtatttttatgtctaggttcagttttaaaattagatttggcctgagtcagtaggataggacttttcaaatgtgttttgttaaagtgacgaatattgctacataattaatgctttagaaattactgcg

SEQ ID NO: 37912 - DNA, 745 bp, Homo sapiens
ttataggcgcccactaccacgcccagctaaattttgtatttttagtagagacagagtttcaccatgttggccaggctgttgttgaactcctgacctcaggtgatccacccacctcatcctcccagagtgctgggattacagacatgagccactgcaccggcttaataatgctatttctttagccatctccaaaggcagaaatattcacaatagcttcttaaccaaaaagcactcattgaaattcttattccttgatgagtcatgctttgcatgctgtttgaagtaagtacaacagacatgctcctagtgagaagtcagactcttacttagacttagcgaaagactctccctcctttcctgcctgccaattttgtgttgaaatattgactttggattgcaaatactatattgcggtgaacgaactttcaggcttattgtaaaacacagttcagaattttaggcacagaacggaaaggtcctgtggaggacctgctggccatgctttctgtgacagctattttttaacctaattttataagtgaaaaaacagaatgagagaatttaaattacctttttgatgccgtctacctggcaggtggttcgatctgctatttggacctgagttctgtatttaagtcctgtgttctttctgttaacactccggggactcctgactgccttttcagaactttatgtgttgcttcattgttgttagtaaagttaactgtatttctgtttaaagaac

SEQ ID NO: 37913 - DNA, 864 bp, Homo sapiens
tcacaaaaaactatattacaatatcacaaccaagacattgaccttgatacaacctacaatcttattcaggttttcaatgttacttgtactcatttgtgtatgcatgtatttagccctacagaattttatcacatggatggatttgtatatctaccaccacagtcaaagtacagaacagctctatcaccaaaaggaatcctcataatgccctttttgtatgtgcttttgaatttaaatttacccagcaaaatttcctgagtcatctatgctcatggaaccctggaaattattccacttggaatgtacaacctccctcatgaattggccagctgggagtgccagtcagcagttgtgcaacattacaaagtcaaactggacagcactggaggcaaacacaacccatgcccttggcctccttagcttcaggcactaactaactgagctaactggccagagataaggacttcatttcaaataacaaattaacagtttcccataactccattaatgcatggttgtgatcccacgaaattgcatctctgacaaactggctgcactaaaatttactctatgtaaaatgattgtgctaattactttctctttatgcttttataatcggctgcctggcaataacatttgcaatgtagtcatgcactaatgagaaaagccatccaatctgatactgcaggtcattagtaaatggctttaggggtcaaagggtaatttccccctttggtgcagttggagatactgatggagcaaatgtcttttcttttctttcttttcttttttttgaagccccaggtgctaaccaaatctggagattgatagaaagattaataggtttcttctagctgttctcca

SEQ ID NO: 37914 - DNA, 2352 bp, Homo sapiens
ggaaattctgattgcgattgtagcaataagcagatattgagcacagcaatttttcacgaaagtatggtgccaatttttgacacactgtcctccaaaaagtctataccacttttatttttaagttccaattgaatgctctaaggatgacaccaaaaactgaggtgcaattcttcattgaattccctggctttcactgggcttagggaactaaagtcatatttgtatgccaaaaagaagaaagaagtccaaaggagcaaactgaagagtgccctcctatttggaaatatttgttcaattattcatttttaacaagcctcaaatgcagacatgcaaaccagacaaaacatgccagatgactgtgtctgtggtaaataatgtaataaatgtcagtctctacagttttacccacaatttcatgtttgtattttatttccccttctagcaaaaatgacaaagttaaaaggaaatatgtattgtgtgtcatcagtggtaatatataagagcagaagtgccttaccatacatcagctccaacattacaaggcagaggcagaaccatttcattgagagtaacgtgttttcatttcaggtggtgaaatcaactccaattactcatctctggacttaactgcttcccattactgaagccaacacttgaaagatggttaggattctctaatcaggtaattagaggtgatggctcctattaacataatcacgacttctgcagaaatgggtcttctctctgcttgtttgcactgttagaatgtctttaatggaactgtgggaggggagggtagaaacctcgccattaagcaacaagatttggagatggaactgctcatgatttggtcccctggtttatcagcctgtattccatcatctatgaaataatagccttcttaatgtccatttcatagccagttagtatgtgagatctatgtattctcgggtatttcctacttaaccattgagtctagaaaacaggaagaatcgaattgctaagatataacagaacacctcatttctttgctgtttatgggcgtatctaggcttataatgtggcaaaagtcacaacaagaggatggtggaatgacctaagacaaaagtaatatttgcctctcacaattaataccagctcttaagattttgctggaaaaaatactatttatttaattgattttttctcccaatagttcataatgaatgcataacaagtaggtaaagttaatcctagaagcaataaatagaagcttaacctgtttctttctttcacctggttaaaggatagaccccaaacacatcagtccagtcatacaagggacattaacactcaggtcccagtacagaaatgaggttccagaactgtgaagagaatgaaattaatcgagaacttaattatgtaggcaacacattgcttctaaatgaacttaacattattgccaaactcctggtctataaattgaaacatcacttgtgaaatgtttgctttatgcttaatcatttggagtcccacagaccaaagacaaagtccatcaagaactcatttgcagtcaaaaaaaaaaaacaaagaaaaacattaggcttgtttattttgcttcactctggaagagaaaatgaaacctggggaagtacagaatatctaagtaagggagatctgggaaagaaatctcaccaggtctgagccatgttgggtaattcttaaaaggtaatagggaagtgaacaacaattcttttttgttttaacttttatttcaataacttttggggtacaagtgttttctggttaacggatgaattatataacagtgaattctgagattttagtgcacccatcacctgagtagtgtatattgtacctaatgtgtaatttttttatccctagtccctctgctactctccccattctgattctctaaggtccattatatcactctgtatgacttggtgtagtcatagcttagctccatttataagtgagaacatacagttttcagttttccactcctgaatcacttcacttggaataatggcttctagctccatccaagttgctgcaaaagacattatttcattccattttatggctgagtagtattccatatgatatgaattagtccgttctcacactactataaagacatacctgagactgggtaatttataaaggaaagaggtttaaatgattcacagttttgcatagcttggggatgggggtgcctcaggaaacttacaatcatggtggaaggtgaaagagaagcaaagaaacattttagacggcaacaggtgagagagacccaaagcaaatgcaacataaacaaaaataaataaatagtgcttaaactaaaaagca

SEQ ID NO: 37915 - DNA, 1611 bp, Homo sapiens
ccttatacaacctaaatgctatgaaagtagttatcacactgtattatttttaattgttttttttttaatgttttcaatgggggagttggttgaatccacagacagggaattcaggtacagggagggccaactctagttctgcacccacagaggataggaacataaaaatgcggactccctaaggcctccttcccctccacgttctttcttcagtcttcctctagggggagctcaagttagctttagcacagtgtgaagccagtgcagcgtctcgcttccacttctccagggggcgctgcaaagattttggtcgccaaagatatcacggtgcgcgcgtctggaagcatttccgctctggagcattttcgttccgccgggtgccagcgttcctgtgacgcgtttcctgttggccgagctgcgcacgtgcggccggaagggaagtaacgtcagcctgagaactgagtagctgtactgtgtggcgccttattctaggcacttgttgggcagaatgtcacacctgccgatgaaactcctgcgtaagaagatcgagaagcggaacctcaaattgcggcagcggaacctaaagtttcagggtgagatgcgttgactcgcggtggctcagaagacccacgcgcgagccctggcgcgttcgggcggccgggggcccagctgctctgtgtgacggaggcagcttcccctgcagcgtgtgtgattggggagagtgaaaaggcagcttccactcgggacccgcgctgctgcccactcgtcgcgtggctccagcgctgctcctgacctttctgagcaatcagtgtcttcttacaacgttagagcgggaggactccccgttcacttctaggcttacgactaaccctgccttttgcatttccaccttagcttttggttccctcaccacctgcaagtcgcacctcacctcatccctcatttccggttatgctgcatgaaacgtctcatttccacccacttttcacatctatttaattcccgtatttctttccccaaaagcccgtctggctgtttccacagagcttctttgatactattgccttcctctacccacttccacacgttctcgtagcactttctcaccagagcttctacgtatttgtgtcccgcacagtgacctaaatgaaaaggattttatctgaatgtcacctttcttacctacctcatttgcagtcccagtgtcctgacagtggggccacagatcttgaagtaattgtgttaacctgttgtccaggttaagatacaaactccccgagggaaagtttggaggcacagtgccttgccccagttggttttcaacagacattaattgaaaaaaaattctgcaggaggcaataggtttgtgaattttaggaatatgttttgaaatactcttgtatttctaattcctatagaataatactacagcattactacttttcagcgcatatgtaagtaaatttgaacaaaagatggtgttttatctttttcagtaaacaaacagggaacctttggtaaggacattctcaggtacagtcatgcatcgcataacaggaggggggatacattgtgagaaatgtgtcattaggggcttttgtcgttttgcga

SEQ ID NO: 37916 - DNA, 599 bp, Homo sapiens
tgtgcctcagtttcctcatccgtagaatggaaggaatgaaaacacaaggattaggtgtacagtcaggccaagtcagatcttagaaacaagacctaacgacactattatcaggaacatcaggaaaaggggaagaaggtcagaaacaagagttttctaggacttaccggtttctcacaccctctccccaccatcaaaatcatggtttcagaggcattaggccaaaaaactgcaaaagggagcctccttctgggaagtctccggcccttccgcggctcccggcgtctccagcagagggctctcggctgtgccgactcaggacagctgctgcgacggggccggctacgcttgtcagagcagcagctggtgattttggacttgcctttgctggcaggggagcgctatcgagggttcattttatccagcttgaggaaagaaaggtcggagtgtaggggaagagtgggacaaacacgcgacccagtcatgccgagagcatgcgctgagggggacgtggagcgaggagtggggctccaggctgctgaggctccggaccaagtgccccctgcactttcaacgccgtaggtctcccggcagccctggaa

SEQ ID NO: 37917 - DNA, 535 bp, Homo sapiens
gactcctgagtcagagaaaacaaactttaatacactaggcaaaagccatagccagagcttcacctttgcttgtgatagctctccatgtttcccagttctcatgcgggtgatagaaagggctcatgctgaattcctgcccagtagtgagcagagtcacagagagaaatgctgagcttggaattcaccactttgacattaagtggaagcaagcatgccccttgcccagaggagaggttacttcatcttttaaggttgcttgctacaaacacaacactcaggaatggcctaggaaatgagcagtcagggccttgcattcttggcacacacgaggagaaggttcaggggatgctcagggcctatgaaccacgtctcccaacaatgcctcatttatttatttaactcattccaatgtattgagtcaactactatgtgcccggcacagaataagatgctaaggatattgcagtgaacaaattccctgcccaagaagagcttatattttagtgggggaaggcatttagataatggaaaggga

SEQ ID NO: 37918 - DNA, 777 bp, Homo sapiens
tgaggcagcagaaatatgagggcacaggttagagccagggctcactgtccggagtgccctttcaggcaggtctgcttcggtcactagagacgtactggggcctgacaacatcaacaacgtcacaaccctgaggtctgaggtcccgggcatggcactttgtgaggtagtaaaaggactgtctgaaggtcttctccagcctctgctcaaggtttcaggaggtcccgagggctcggtattgtcagagaatgcttcccatgcctggaccctggaccttctggttgtgctgatggactcagcggacactggcaggacccagctatcctgaaaatattaagggctacgagctagaaccattaaaaccatgaacttcggactctaacagagatatgcttgacaaactgggaatttgccctctgttaaaacaaccctcagtgtgactctgacgactgtttaacattctgtacctccctctagtggtgttagctaacccagtcatccaacagagacggagcacaggtcaaagacatcaacaaatgtcctagcatctccccacgcacctcgtgatcacgcaatcttgtcctgctcacaacagctctgatcgcggcttaaagcagagcagtcccatgtactccataagaagcaagaagtgggagggagcccccaacccagaggctggcggagattccacagcactgggcagcctgcccgctagcaactccctgtgctgattgagcagggagcctctctctcctggggaaacctggttcctcctgaagc

SEQ ID NO: 37919 - DNA, 2335 bp, Homo sapiens
taaaggaccttatggcagattctgtggactggcttaatatctattgcatcttctagtactgctgaggctggaaaagagactattttccatactcccttgcacctagggttctgaatactgttaacgttccaccaatcagatgcatttgctagagttttcaatatggaacagttaaaggaggaaagagggaagcataaaggatccattgtgttggtgtggatcacagtagaaacagccaggttctggggctagcagctatcacagtggcttcttggtttttcagagcttcctaatttgacagaagcagcgtggtttccttccttgtcaagccgctatagcaccagcttcccaatcctacaggctgctagctagcttcctgattttggaggcagaaacagtatcctggagctccagttctaatgtgaagcttgagagctgaccctggctcagcctagttctcatccagccctgtaaccaatcccttctgctgaaactagtgggagggtactgttttttcaaccagggaaccctgaacaatacaaggtcttgcccaagtttcccactcctatagtgtccttgcatcttgagtattcatctttccttttttatgcctttagtctgtggagacttttagggcagaagacataaagccctttatctaaggcccagggacttcacggattttccaaataaggaagtgaacaaccaaatctgagtgacttgattcctaggacgaatctactcctccttaaagacagaggctctgggaagactcttttagtaagccctccagatgtgagcttctgtgacagccaacgcactcattgtatggtgaacataattatccctcatgagtaatccgctaagcctttctgttgagcctctggagaggaagaaatttgcttcattcactttaaaaaaatattttaaaaactgacataattcatataatataaaattcaccatttcaaagtgtattgctcactggattttagtgtattcactatgttgtgcaaccatcgctattatcgaaatcaagaaaagctccatcacctcaaaaagaaactctgttactattagcagttaatcacaattcttccctcttcccagcccttggctaccactgatctaccttctgtctctatggatttgctaattctggagatttcatagaaatgaaatcactcaaaatgtggcctttgtgtctggcttctttgactcatgagaatattttcaaagttcatccaggttgaagcatgaatcactacttaattccattttatggctgaataatatcccattatatgagtaagccacattttgtttcatcagctgacagacatctgggttgtttctactttttagcaattatgaattgctaaattcataattgtgcaatatattatgcaacatatttacagtgctactataaatattcatgtacagcttcattcacttcaatatccccattgcctggcagttcagtgcctggcacatagtaggtgctcaattaatggttgctgcatgaatgaagagtccacatgatttttctaaaggcctcatccatgtcacaaagtagtgagatttccatgacaaagctctgtcctcaactgcctattaactactgcctcgctttcctcttttcctgtcagccctgcccgtttcccccaagtgacagctctgatccgcagtgccgcatgcttccatttgctcctgcattcctcttctttagctctgattcttgctacctacactgttagcaccaaagagctcctcccatcatccagttcacttcttcataccttagtcataggacccagtctttaaatcaaggatgtacatttagaacagcacagtacaaaagaaatataaagaaggacacacatacaattttttaattactaggttagtaggttcatatgaccaagttattccaaagataaacatttcccattaactaaatcaagcacaaatcttaaaatttaaatttaacttaattaaaatcaaaattctgttcctgagccacactagtcgcatttcaattgctcaatagccacatatggatagtggctaccatactggacaccacaattctagaaaacaaactaactttcaagaacaattacctcaggccaaactaagatggttatctatttggaatataaaacaaaatagggacataaaaagccctaaataccaaggactgtgaactttgttctttattcatttgacaagaacttactaaatatcttttatgagcatgtcataggccttatcatcataggagacacaaacaggttgggagaggtatgccgtgttttatttactaactaca

SEQ ID NO: 37920 - DNA, 2432 bp, Homo sapiens
aatggacttgcattcggggagcacacactgacaaacaaatctgtcctttcagactatatatattcccagcttctggacacagaacacagtgatccctcaattagtggatacttgtgatatgaaagaactgaggatttgggaggaatgcagaggagtaacattggtcactggcaggtaagtgtgaagggacgactcaccacgtcaagcaagcagtcaccctgcccaatgcctgctccagaaccttaggaaaaaggcagaggtgcggcgtggcttccatttctctccagaatccagtaaactagactagcctttgagtaaaatcaactgaaagggacgacagatgcaaactacctatgagatgctaagtggtatttgcagccaaaagaaaatgaatacactttccctgtattcccagcaaacgtggaaatccgcaaaccactcatgaccccctccctagcactaagtgagtacttaacaaacacctttggaaaagaaccccgccctcttctggagaagccgcagcctttccgcccagagccgggtcccccgccacacagcacccctggagtgcgtcccaccccgaacgccccggcgcgctgacccagcgggacacctccctggtgcgcgcaagtctcccaaacttcctcccgccgccccggcccgggtccacgcaaggagggtggcattccctcccgacagcaaggcgggtggggcgggccgccgggactctgcggggtggcggtagacgtcccaaggtcaccacccgagcccgaaccgcctcggagagcggtctcgtgactccagcgcccagcagcctcggccctcggggctagccctgcggcgcggggtgggggagcccgtcccggacagggagaaaggtgggagcccaggaccccgcggcgcgtggggctgcgtcagagcaggtgtcgggctaggaaggccacctgcgccccaagagacccgggagcggcttaagtttgtcctcacccgcccgccgccccctgcccatgcaggggtacctgctccccgcctccaagaagagggtcggcgcttccctgaggtggatacgcctgaggaagggggcggggcgcccctaacgcacccagggcccgctcagcccgccgccccgcggctcggccctctcttcaggaaccccgacgtgtcagggaaggaggaggcgttcttacctccgggagaccctggccctccggccccctgggcaaccccatgatccgaccgggctgtcgtaaggcgagagcgaagcccgccaagcgtccggaggaagctgtccctgccgcggagctgctaccggggtggagtacaaagcggaaactccctctgccgccgccgccgccgccgccgccgcctgcccgaagcgccgcagccgggcagagcatgcgcgctggggccggagcgcggcgccactgcgcctgcgccacagcagcccggggagaggtgggctgggctgcaggtcctggcgttgtgctggatcatcgcgcccgtactctgaagttttctccgtggcgctctttgagaggggttcctcctgcatcttgagaatattttgcatttcggctcccttctcttctcgctgccatcggatgccccaaataggtcctgtcccctcggtgaatcagacttcggaaaccgcctcgcttcagggtcagagtccaagtacagatgagcttgaggattctgaatgcacgcccggctctagaccttacagacacacgcttggacagacttctccatatacgacccaggaacggaccccttgagaagggattcttcaagcccgctgccctctccagcgtcctggccagtggcatcgcgttcccaggaaacctcgcttcagatattgcccaccaccccgccctattcacggttcctgggtcttcctggaggaatgacatctcagagaatgcggactcctatgttcatgtcatttgagccgccgcgtcccttatttgatgtaccccttgttggtcccggaggatggcaactagacaaaaggtcacaggcccccacacccgctccataacggcttcttggctttttgtttcttttaagcaatgaggaaagagatgactttcgtgaaaacttttgctggagaagagatccttccctctgtatatgtgtgtgggatgggaagtgtcagactcagacctttagttccttgagatcaaaaaggtttcgtgtttgctttcgtctcttctttgcatccctagcgtctttaaaagagtaggcaggcgcggtggcacatgcctgtaatcccagcactttgggggtcgaggcgggagtatcacttgaacctaggagttggagaccaacctgggcaacatagtgagacctccatctctacaaaaaataagaaaattagcccggtgccagtggtcccagctagccggtaggctgaggtgggagaattgctt

SEQ ID NO: 37921 - DNA, 1571 bp, Homo sapiens
ctcagcagacaatcgcactagctgcccacgtagattccctgtcatcagttgcctacatcaatctagcttaaaataggaaaaatatatctgatctcattgagagttctcagttgacttgcttctgtagaggtgggctgacctaacttctgcatttccaggctgtgaatttattgatggcaagagatctgtcttattcattgttgtgtctcagtgtttaacagagttcccacatgtaactgctgcttactacgtgcttgtgaatgttgacagggcactagtgagtgactaagagcatagggtttagaatccaatagatctaggttcaatttctgccttctctgccacttagctatgaagtgaccttggactgattaacactaagtcagtgattctcaacgctcaggtggggctcgggcactagaacttttaataaatctatgggtgatcctaatatgcagccaaagttaagaatcactgcttttagccttaatttctcatctgctatttggtatctatttcaaatgggttttgagcatgtgaaatgagatttaacttagcacagtgcctggcacacagaaagtgattaccatcaatcatgatgttaaaatacaacttcaatttgcaattttcttttcaattgctacccccagctctgcctttctttcaattcccagaatgcaccaagtttttcagcttttgtgccctcacacctgttcttcatcctgctcttagcagatccctctcaatcttcagctcacgcatggtctccaggtattcccctttattctccatcacaatatggagatgttccatcttcatggcacttgtctcagtttgtaattacatatgaattccaccatttactgtgtttcccccacaggactctagcttcacaaaggaatgtggcttgtctgtattgatttcctcctaaagtccagtgccaagtgtctggtacctgccaggtgctcaggtgatagctggcttagtaaataatccattctgatctctcaaaaaagcaaaattccttgactttctatgtccctcaaacatatttcacatcaaaacaccgtaacaaaaaccaaaaccaaaaaagtagaatggtctgtagtgtgtggggttctagctactgaataggaaaattgcaatagtaaaaaaattatcttggatgtttttaatttgggtaatgtttccaagtccaaggttcttagaggcttactgaatggcttagtcatcaacctgtaggcaataattaatgtgactcctacaatatctcactccaacaaagtcaataaacttttgtgggtgtttgtattagctaagtaaagggctttttgttttctaacttatctttgatcttcttggttgggagaccaaacaacatataaagctaatggaaaaaacctttcttgaggtcaagaattatcaaattgttgatacttctacctataaaaaagacctcagaaatcatctaaaccaatctctcattttacagatgaaaagaagaaagcctaaaaaaatgaatttattgcaagtgattacacgcatactgtcttagtgctaaaatacaatcc

SEQ ID NO: 37922 - DNA, 3135 bp, Homo sapiens
accagcctggccaatatgatgaaactccatctctactaaaaatacaaaaagtaggcagacatggtggcatgtacctgtagtcccagctactggggaggctgaggcagaagaatcacttgaacccgggaggcagaggttgcagtgagccgagatcatgccagtgcactccagcctgggtgacagagagagactccgtctcaaataaataaataaataaaaataaataaaaattcagaatagggaagcaactcctccttatgacgagtacctttcggcacttatatgggcttgcttttgcattgatggcaccactttcattcaaaaaaaaaagttcgcttgcacaatctgcaaagatctgtttggcttggtttcatgttctaaaagtatggttttagattaaatgaaaaataatacttctgaaaaataagcggttataaggtttttaagttttctttatgttggtgtaaacttataaagcccttcctatgaaaactgtcccccaaatcacattacttggtcgtcctcgaggaacgattttgaatgaaaagcacataaagtgctgtagcatggagacgagagacaaataactatgcccttctcccaaaataagttatgacttactaggggaggaaaaggagcaaagagtataaagcccggtcctctgcgggaagtacccggaggcctgccccggaacgcgctcctttcggctacgagatgaggggcacgcagacggacgcgcccctcggtgagtgtgcgtgtatcagtgcatgattcctttactccgcccacagggtctgggcatccgtcattacctacggctgcctggtcagcaaacaacagcagatccgacaaccgccagtcacctcgacggtccacgcccaccgctagcctccagtttcccgcagaccggaagcccttttgccccggctcgcaggtccacgtcttattgacagcaggaaccggaagctcttctgccccgatcgcctgcgcgcggcctcgttggccgcacaggcgcagtggagctcgggcggagttgtgggagtggaggaggaagaggcggtagggggtacgggggctggtcccagaagatggcggaggcgggggtgagttgggggtctcccggcgaagcgcgggtgacgtggtgctgaggaaagcggcctgaggaggagggtggcccttgggaagaagaactacttgtgtttttgcagcctgggaaccctggtggcaggtgcggggagccaggaccactgatgggcctgcagggcaaggggctccgcttacctgagaggggtccgcaaggtccagaaggggactgcgggatcggggagggggtataggaggggtcgaggctccccggacagtggatgagtgtctgagcgggaagaaggctggaggacggcgagaagggcgacccaatggtctgatgaggtggaggtcagcgagctgtcaagcatagagctgccaggacttgggggcttgtagcctgggagagaagactcagacttgggcggggattggatccaaagaagacaggttgtcgtagtaagtttataatccactaaggagatagggcattgggttgaggagtaatactctggcatttttgactggaattggttacctatggaataggtgtttcggtaaagccaaataattcttgccagggcctagaagtggatttgatgataattactagattttagggttgcttagtggggattggcaatatggagaaggaaagcagtgtggattatgggagtgggcgcgggcaatggcgctaacacttaagtgataatgacccatgtccagttaacgttggaaaaagttgttaaagtatgatattagctagatgctctaggaaaatataccatgaagaacttgctgttttgtaggattgatgaagaaatgctttaaaaaggaatggttaggcttggcagctgggccactgaaactgtttggtatcagtattgcggtggagctgaggactgcaggggaatgcgtgctcccgtcctggtgcagaaaaaataaaagcagccagacagtagctagatggtgttttgtaacttttgggtttggccctgatagtgaaccactgaatgaagatggatgaagggaatgctactaatgggggccccaaagaaaacaaaaatcagacgtgtgctcttcctgttttctgtctttcattctttccctgtactttgtgctcagtactgtgttttgtcattgtgttatgtcgtagttctcagttcacatctgctgtacagtgaccaagctgtgaatcatgtccactcgggaaagaggttgattctgtttaactgacaactgttgcttttgcagatggtcacacggaaaaggaaagaataaaatgcagttcagtagtttaaagagttttctttgttctcagaaacttatctcgaaacgatggagtaacttttttaggcactgagatgtgacatttaaaacctgtaaggggctgtaaatgcagctaacttactggtttctatgtttgggttttaatgttgagaggaaagagttgcagtgtttataaggcaaatattgcttttcttcctagaaatttttaacgtctctagcccatgatacatgtagatgtgtttttatttagggagcattaaactgttgcattgatttaagtctgtttttttctaatgttagtgcttattctatttcaagaatgctattctaattaagagagcatatgatgaaaaatatgtgaggtagtaatttaactttattatttagtagcttacgtgacctaagcacctgaagaaacagggttatctgagggagtaaaaatacttcttttacggctaatcattggaagaggaatggtcttgtcatttggttttagggggtgttgcagttgttacaatgcaacaggttcttaaggttactagaagattttgtatgtgtgtttgttttcaaatgcttgttgcctctaagttgtttcagtggccaacatgaaccttgatttttattcacgaagctcataatcacttataactcttttttaacctgaaagtaataatatcaatccattaataggcagccatacacctggaataatgtttttccagtattgatgattcatcattgatctatgcaaattatttcaac

SEQ ID NO: 37923 - DNA, 2672 bp, Homo sapiens
gggcacatctgataaaggtatcataaacacttggatatttgagtctgggatgtaggatgtaaatgtggagtcatcagcatgtgaccgtaataaatgatgccttaggagtggatgaaatcacatagggagcatgttatggtgaaaagagaagaacgatcaagagtaggaggaaagctcacacctgtcatcccagcactttgggaggctgaggcaggtggatcatgaggtcaagagatcgagaccatcctggccaacattgtgaaaccgtgtctctactaaaaatacaaaaattagctgggtgtggtggcaggcacctgtagtcccagctactcgggaggctgaggcaggagaatcacttgaacccgggagacagaggtttcagtgagccgagatcgtgccactgcactccagcctggagacagagtgagacttagtctcaaaaataaataaataaataaataaataaaaattaaaaaaaaagagtaagaggaaaaccagaagagtgatgggatgaaaccagggtaggaggaagtttcaggcagagtaactggtacaatgaagtacaattggaaggatgaattaatcttgatgataaaggagaaggtgttgttttacattgaaaatgtttttctaactgctgtctcttaacatataaaatatctccctgtatactaataaaatagctcacaaaataaagaaaagcctgattatatactgagtcttttattgggagtgaggggatctggggcaactagggaactttgaaagaatgatggatgtttggacaatatctatgaagaatggacatagtaactgactaaagatgaagaaagacttgccagacagttttgaggccatcaaggatccatgtgaggatagaggtcagatatttgcagtagagccaattgacattgttaacgccatgtcttagtgggctcagcagcccaggagtgtagacttgtcatgatgaaatacattgattgtagctgagaattcactggtaggcatggcacaaggatatgtgaaaaatgaatagagactcccagtgaaatatctgcagacgttttcatgggatccaggcaaattgggaaaggaagttgaatcagcagtgctgacctgatggcatgaggaaataggatgaagtcaaatgactgcaagtgttgagattaaaaatccagtttaagggtaaggttggtaggtttggggtttgtaatcagagaggaatgtagtggatcatttccagatcttgataaagtccaaggagtgttctaaacaactgtatttacatagttcactgaagtgagtagaaatgaacagcagcggagtagaggtccaatgcgtgggtgaacagattttgatgttggtattgatgttacctggagtgatctcaaaggtcaggtgggaaggaagggtgtcatctatactctttttgaccatttgagcaggtacttatctcagtgccttgactgtattgggattttaattagaatccctttcccccctcttttatttatttatttttatttttatttatttttttcgagacaaggtcttactctgtcacccaggctggagtgcagtggcacgatctcggctcactgcaacctccacctcccgggttcaagcaattctcctgcctcagcccccccagtagccgggattacaggcactcaccaccacgcccggctaagttttgtatttttagtagagacggagttttaccatgttggctaggctggtcttgaactcctgacctcaggtgatccacccgcctcagcctcccaaagtgctggaattacaggcttgagtatttatttattttttagatatttatcatcctaggtgttctgagattttactacaatatgtttaggagtgagtctttttctgttaatcatgttcagtcagatatatcttttgaattctgggaaatttacttctatatttgctgttagtgttccttttttcactttctcttttcttttcttctaaaagtcctctattctagacatatttgaccttctgtttctgtttttttatatagcccttagcttttctttgttgtgttaccttctagaagaattacataactgttgttccagctcagcgagttgctcttcagctgtatccatccattcagcccatcagttgagtttttaattttattgatagcaattttaatttctaagattactgtactttgaaatggaagtatattgcccttcttgtattttttctaaggacattaattgctcttctaaagttcgaagcacttctaaagagccattgcagggaagggtgggatgagcctgccaccagctgatctccagatgtgagtgcccctggtttgccttgggcacatcgccatgcttcttgagactgtccacacttaacacttacatcatggggtagataccatgctgtctctgcctggtcaaaggttggcaagtaggagaagtgtagaagggttggccagactggctgctttcacagaagcctggttgaacccataaggtcagttgcccttggcatttccagctcccagcatcagctacctctgagcttaggatgcccctagtttcatatttagcaagtcctctccttgagtatttcaagctgtggtttccctccatccagctactcactcttgctttcagggattccttgtagtt

SEQ ID NO: 37924 - DNA, 3219 bp, Homo sapiens
tatgaagtttgaagtgatttctgcatactttgatcttttatattttgacattcatgaccttagtgaagacaggacagtaaaaatatgattaggctaattgtcagatcaaggactctgattaatgaaaataaatggaagaggttgattatttttttcttcctctgcccccctttaccctggaaagaatatcctagaaaccacattaaactgcacttcccctgagcacatccttcctaactaggctagtcgtgaaactggagtgcaaggccaggtggaggaatggggttgactcaatggcaatccaaggctgacagctgtgctaatggatgacttaggcaagaaatacagtgattgactcatgaaatgaaaagcaggactggtctcacggacagctgggattcagacttcagaaagcctccatcaggacttagcttctttccagccctttgccctttctgctgtgttggccttagtcttgtgcttcacagtggcaggatggctttggcagctccatcctcatgtcctctcccctccacatcccacctctctgaagtctcagcaaaagtctcatgatttattggctttggtcaggtcaggtgtccattgctgaaaaccaattcccatggctggttctccacagaaaaaaataaaatatgacaaaaatgagggtaaacgtaaaaaacagaaaacaaacaaaaaaaactgtcctatgtcagagccaaaaaatcataatgaagtggaagctgcaaaagcaagagaaaggcatgagttacagagagaagcagaagttggagatgaggaaaaggggaggatgggggagagcgagagggagggagggagacaaagcatctgacatttttctacttcccctgaaacctgtgctttccttccaataaactctttaaaaatgatttaaaagttgagtggttttctgttctttgtaaccaaatgaccatgactaagatattttgctaatgttccctttaccaagtaaggctggattccatgtgacatgtaagttacagaggccctacagttgactgtgttcctctgtgggaagagaaaactgcttgccaaacagatcagagattttttctttttggagcaattagatatatggtttgaaataaatgatcttggaggcccatgaaatttgaggttctggggttctctggttttcaaacaatacctacactcagtttcatgcaaaactaaccatttttcagcccagcccaactttctcacttggtgtagaggaggagttgctgtagttaagcattaaccggctgcacttcctcttaagtggaatcttctttgcaagtgagaacatttaggccaagggggttggagacaccattgaagcagttctcttgagtctgagctgaaccacaaggagaccatttcagaatcttgtttgaaatgaaaactaggagaactgggaaaggaaattctagaatctctccaagaaattcatcccaaattttagctactttcatcttcatctggcgtttaccacatactaatattaggttagagggctcgtgagtcaattttttctttaagataataggaatgcattttattcagtttctgctgtagggcccaaagtaggcaggtagtgggactactttatagtgccacgatttgagataaagaccgctgtttctgttcccatacccctcacagagattctgtgtcactagagggccaggtttctggggcttgctgtcgatctcaccttgctggctcatcgtgaatgaatgcaggtggaacaccaccagtcacagcatcagaatgcctttctgaaagcctcttgtgtggattgtccaggagtgtcacccttagtcatctggcttaggtccctgccccacccagctaaacaactttgatttttggcaagtcaagtaactccactgggatagaatgtctttggaatttccgaatgaaattctcttatcttgccaaaaccattatgtcctttcttagtaaagttgatacactgggtcagtctccccagatatgtcataactcctttcttttttcataattactggaatgaatgtggaatggaatgaaaaaataataaaaatctcaccatctgaagccaagctatgcagggagatgttagatcacttttggcaacagagaaaggctctgcaagctggacttggagataaataccagcagctcatccctttatgtactatattttaatggccatcctctcccctgagggctgactagtattctctcctattggctaacattagttcttacttgttctgggaaaatgcctgtttccaagggtgacacccacaatctataaacaaagaatgaaggtcatgtgcatgggaattggagagagaggaggtgcttataaaaaatacaagtcttcccacctagaaggatttggcccttgtggaattttagttttctttacttccaatccccccagtcctaaatcattttatatatcctagtaatattaaacatgaatgtattccacagctgggtgatttattcaggactcaaaaagtatacattatttagataatatttgattacatcatctttatttctcctatggtgctggccctgcagtcctgtgaggtgaggtaggcaggagttgctattaaaccattaacccatgtcatccagcaaatgacaacctcttgctgccacaaatacagcttctgtgcattgtgaggggcagcgatgcacagcaggaaggctctggataaaggtccaaataccaggggtctagttttagttctcccggcagcttgcttagcagactcaagttcctgtttcttcacgcatgtagtgaagccagtgggtgagttggtctctaaaagcggcaacagagcacagtgtctcaggctggggccccggctctgctgctcactagcagtttgaacctgcgcaagttattttacgtccacgtgccttgctttttttttttttaatttgtaaaatggtggcattataaattgatgtaagagttaaataatctaaaacatacaaaatatctagaagagaacttgtctcatagtaagtgcttaggtgtaattattagcaacatcaccatttaaaatcccccaccaagccatgagtagaccttgtcctacccaccatggagatataaaaggaggactgagttttccaacttgatttgggaaacaaaatttatgtataggaaagatagaaaacaataaaaaa

SEQ ID NO: 37925 - DNA, 1921 bp, Homo sapiens
gagctcttttcactgcacaatcctttttggacaagtactactttcatttgtgaggaaactgagacccagcaaagcaaggcatcgaccagggtgataaactcagtgatctgcttcctggtccccaactgttgctccaaactttctcctccttcctattttctgacaaaatctttctaggcgatggtggtctccacagatgatgcctatctgtctgcgtgtgtggcaggcacagctctcatgaatgctcttggataaggatgcacagtcatctgcatgcctgtcccttgctcaatgcagcctctggcaggaaggtaagaagtaggagctccagggccgtgcttgtgcagggagcccttggtgtccttgtgtcctggcttttaccttgttcttatatttcttggtcctagtctaatgcgagttgtccatttaagcctctgactctagattttctctttcgcttctgagttagactttctttcttcctactgaagcccagaagggacaaagtctcttgggcttttcctctttttggaggtttgttcatcccgttggggctgtcaaaactttaagcaagtggaatgtggaggcagagctttctcccacaaaagactgtggttcaaccagtctggttcctgaaaagtggggcataagatgacacccaaggggatacatctgataagggaggggacaaaagtccagaaaaaatgattccaggcacatacgaatgttttgtgtgtgggtgtgtgcatgcgtcgggggtgctggtagctttaatagagaacctgaggactaagactggcaaataaatgctgaccaaagtccccagttgtataaaagtcatgcgtatttccacaggtagccagtgccctggatgacaggtctggatgacccaagaaaatgagaacaggagggcctggctacacctgacattactgcaggggcatgctggaacctcggcccttgggcataggtcaaccaaaacgtactgcaaaacacagctggtttgtgaacttgtggctctttatagtctgccctatttgattcccattggttccagaaggcagcgtaggcagccctcagatggatgcttattgtgaacaccagtggtgtcacagaaaggggtgaagccagtcggcactgtcaaatgtctgtgaaagccctaggcagtgcctggctagtgttcagtaagagtttgttacacacagaaactagctgtggcaggagattatacatctgtataaatattgaaatatatctatgtctttctgtgtgatcagatcgtgcataaagggattatgatcagctgtagatgtgtggttttccctgatggactgtggatccattcccttatctatgactcatccctgttctctaacacagcaaaaggtctcaggcttcatttttctataaaaggtttgcttatcccagcactttgggaggccgaggcagatggatcatgaggtcaggagttcaagaccagcctgaccaatatggtgaaaccccgtctctactgaaaatacaaaagttagccaggcatgatggcacatgcctgtaatcccagatactcaggaggctgagacaggagaattgcttgagcctgggaggtggaggttacagtgagccgaggtgatgccattgcactccagcctgggtgacagagcgagactgcatctcaaaaaacaaacaaacaaacaaacggtttacttagctgagctgcggatattgtttaaatgcttacattattacgttgtgttatgatctgtttatcatgttgaggcatgtggtttgagaatcttcgttgtggaaggtttgaatttttaaatgaagaattaagagtttctccctaggttatgtgggccatgacatatttctgggtgaggaaacagcatgatgaaagccatccttggaacccagcttccta

SEQ ID NO: 37926 - DNA, 540 bp, Homo sapiens
cccctaggatgggctttaattacagcaagatgggccaaagttggctctgaaagaaacttttgagaggtgtatactgtttgatcttgggacaaagagtgagagaatatctggaataccgggaaatctttaggaatgtgtaacctattccatcagaagtagttctgcttatgcctgagcagagagagggagagggattaggttagtggttttcagacctcagactgtatgtgtgtgtgtatgtgattgctgcatgctcagctgctagtacacatcagatgggcacaggcatgtgccaggcaggtgtgcttgtgtcttggctgacctctaattgagtatggctcaagcagcccctggtcaagggtgagcttgtgcaattttacctgaatggatgtgtatagaactgacttttgaaaagaactagtgcagaattttttctccctaattaggccacatttacaagaagaaatttgtatatgtccaagtatgaccaaagacactggattcagaggtctacaaacagacaagaaacctagcagcaaa

SEQ ID NO: 37927 - DNA, 2257 bp, Homo sapiens
ctttacatggttggtattaggaatcccaacaagtatttgccttgttctctttgatatagcaaacccgcgcttagagccgtacgtttatcttggtggagcttcggtgggatggtggatattttgattcatggtaaatttgtgtactcttaacgctatttcatgttggggcgtcagtggtcggtacacttgcctgactgtatttatctaccaaaacctgtaagtgtgtgtctctagctaaacaagtgtatatattggtattcatatacaaaggcgctgcaggacaggaggagcccagctttgtggacggcccagctgtgcaacctgcccccagatgtgagcctgcaggcggcagattccgcttagattatcttgcttacctaatgatgtttgcttcactgccttgctcgattgtgttcaccaggacggcaggctattaaaatgtcaaggcacattgaattgttgttatccgggagagagacctttccaatcaacctgtgttgtgggggttgcaaaaactccctccgagaaagcgattggagagaggctttatggcttttttacatagatgggggtgagcggggaggttgagagagggcacggcgggggaggggggaggagggggcggggggagaggtggggcaggagcccgggtttatggcagccggagtgtgctaattaaaatgccatcttctcaaacaggtattggtggcttcttgcttttccatttatggataactgcaatatggccttgccgtttggtttaaaaaagggagagggggaggtgactcacagcgggcagtggcagtgggagctgcagtgctgaggatctgggtggggtataaggagcgattgtaaggcagaaacaccaaggagttatatccctgatgtattggcaggaagggctagagaaagaaacaaaaacaaagacttccttggccctgcgcctgtccaggctctgctaagagccacgttccctgcatacagacgtcggcgggcctttctgggtgacagtgctgagccgcggctgcagtgtcaccaagcggcacctcggccccggccccgcccgcgccagctgggacagtctggagaccttcttttcatgccgtcaagtctcattttgccaaggatttatttttcttcggggagagagggagagcgggggcaaaggatgttctcttaaagtatccagcgatcagagccgctgaagcctccaaccagaaactcaaacttccctggattgacttttccccctttgttcacatcatctcacaaatatttggctttccccggccacgtctgttctatttctgctccggagagatggctttgtttttgctttcgtgcggttctgcgaggcgctccacgatcccgccccctggcatggcagcacctaccggcggcgcgaactcggctgctgtgggctgctgcgcgctctcgcctttgtcagtttcatcagccggcgtttcagctgcgcgcgcgcatgcgcctgcccacccctccgccagttccgggcttgcgtccccgccaggctcccgcgcccgtggttctcaagtttcccgcccttctagcccgcgctacacccttcccagctcgccactttattttctcgttgttggcgcagcccgttcttccggcctaaaccaaatctcattttcgttcctcgcctcctccctccttctcgtgactggattttggcagagtatctctgtggggctaccccagatccctcagccttggatccttccatgggccatgctcctggagtgtcactggccagcgagacttgctttggtctgttttccccatcttttatctgaagacttctacccccacagccgcagcacgcagtccggcgccgcttgggaagctttggacgggatgctccctccttctgcttccctagtaggggtgagggccgcatatttgagttcccaggccacttttctctcccctatagctttaaaatgcttccttgaaagtgtccgtttacttgtcttgaattaaattggtttatttatttaatcaacacatatttattgagaatctactatatttaagtattaacctgttgttaaatgttggggatatactgggaagaaaaacagacacctctcagcctcccatggcctataagagattttctctgggtcgaggaccatgcagtatttgtttctgtaacctggaacatatagatgctcaataagtttcaaatggacgaaggaaagaaacaaattctctccctgccctgagccacccc

SEQ ID NO: 37928 - DNA, 712 bp, Homo sapiens
tcttgctttctttttcaatttccttcttctttccccttcttttctttcatttaaagccaggcagaatgcaccttcctgatagatgggattttgccttcaagttgtttccagtgtttaattcctccttactgttacctccggaaccaagtccaaatgaaaggcgagcctctttgaccctctgccctccctttcctgccttctcttctcctgggtttcaatggttgattgaacggtgtgttaggttcactgaacttggtcttggcttcggttccaagcagggacaaagtcagcttccaggccaatttccatatgaaagcagctgagatctctttccccattttggaattccaggcagcaccctgggctctgacttctcagattcaaagttcttgctcaaattccccccacccccacattccaacccaaccctaatctcctcccactttggtttctctgcccaccaggtttccaggtctcccagcacactacagtggccctgagagggcagctgtgaactcaactcaagaaaaactccttcacgtttctctgaggctgatggcgtaagagagggatttgtttattagggtttgagatgggcagggagaagtgggaggtcccacgtaggacagagagaaggtggaagagtcaatgcttgttagggatgaatttaagaaaattatacttcctgttgccaactatttaggaacaaata

SEQ ID NO: 37929 - DNA, 622 bp, Homo sapiens
aagaagacgaagaattttcaagaaagagtttcccacccccaactgctgcacactgagctgcattgtccagggagaggtggtgatgattaattgtgcccagttccctaggacccactctgcccttccccctctctcttctgactccttcttcttttcgtaggcttctagacagggagaatgatttactgactagttgagaataacagatatcaggtcttaggctcaatctagtttaatgtcttttaaataaacaggcctggttttgccttgggccctaacaccgttgcctttttcctggcttttattctgaatggtttgtctcagctcccagatcttgtttactttgtttgggcctgacccctggacttattctgcagcctagcggagacctagggtgtggatttgtgttccctgctgtgacctctggcttcccctcccaacagcagtcctcacttgctcttctggttattctgccctgaggctttgggaaagcactttgcatgattccagtaagcgtccttggtgggttctcattagttccaaggatggaacccccaacttctggccagctagaactgtgttctaaggatttctgcaggaatgagatttaataagaaataaa

SEQ ID NO: 37930 - DNA, 1850 bp, Homo sapiens
tgcttgtgggacccataggtagaaatagctatggcccgctggttgtgtggctctgagcttctgttctctccatgttgttcaaaaataatgctttgagtgatagctgcacaggagtggtgacagaaaccatgcatgggagcaatgccacttagcaatagcatagaatagggtttctcactcttgacactattgacattttggatggggcagtttttattgcagaagatttgcctgtgcattgcaggatagttaacaacacctctggcctctacccactagataccagtagcatttccccttccaagttgtgaccaccaaaaaaatgtctccagacattgcaaaatgtccctgggggacatcctcacccctggttgaaaacctttgaatagaataagggcaagaggccaaaggactgaaccctagagtccaccaacatctgaaaagaagtaaaagaagaggagttagtgcgagcaaccaagagaggagagttctgaaaaagaagtgtttggaaaaggagatctcccctctagggagattacataagatatggacagaaaaaatgatggatttggggattagaaagtccctggtgacctccttcatagaactggtaagggaaggagactgaaggtggggaaataaatgtaatgcgtgggagcagagttagagaaggtaaactctcaatgtgcttgcgtaagaaaggaaggaggagagtggtaattaaaggggtggggtgtcaggagagtgccttctaagatatgagacttcttgtatcttgcgaggtgagcaagatacaagaaatcttgtatcttatttctttttgaaatatcacacttgatccatagaacaggctcaataaacatacattggttgaattagaaactgcttttgttacctttcttggactttggatattttaaaacaaatccaggaagagagcaatgtacaacacaaagggatgaatcacaaatggcagaatttcagacatgagtcagagatattttgggtgtagacctgccctgtgtcctataaccctaccacctactcacctcacatttctcatatgaactgattgttctcttgttccctttttttgttgttgttgccaacgagactttgttcccaaattcaagccagccatgggtaattatttctctcttgactaattgacgatgacaactactaaattgggtagataggggacaaatttggtgtcttagtttttcccgaactcttcaggctgggagagataggaatgttcccctggattgaattgaacaaaattgtaccatcaatctttaggatatctgcactagctaattagatgcaaacagtgacacatcaaaaacaaaacccaacagaaaacctcctaacttataatgttgtcctaagggcggcagcagagtacagaaaagagaggggggaagaatatctaccagcaagacttttgagtgatgagttgttggtttacctatagcttatgaacataatctcagcctaaaaagatgaacgggaagagattctgagaaaaaaatatattatttgaagcatgcagaattgtagttttgtaaagccacaagcagaggcagtttgtttcatttggttttgactatagctcacgtcttctcccccaaaagaacacaaaaccagaaatagctgtaaaaaattgataaccaacattatttatatcaagaacgatcccagatcatagccactaagaagccaggacttactgagggctgactcagagctcttctgtacatcaccgagcccggtgccctccaacgagcagttgcttggctcctgtttattgaactaaaatggagtgattttttgaattgatgcagttt

SEQ ID NO: 37931 - DNA, 859 bp, Homo sapiens
aaatattagaggagcagtcaataatggatgagcagattaagaaacccatctcgcggacaattatcgccgcaattgaaaaagctcactttttcccttattctccatcccacccccatttataaaagaaaaaaaaaataggcggaaggatgggggctggggctggcagccgaggaggctgcagggacgcgcatggaagagccggtgcgtgggagggtttgcgggggggacatcgcgccccctaggggtgaccccagtgggtcccgtgtgctctccgcggagccggcggagccttgtcctctgcacccggcgcgcagcggccccttaaacagtggaaccgtgaggccgctctaagccgaagggctggaatctgggtttctcgggttttattttagaccattcggcaccaagcccgagctcccccgccgcaccgcttccagtcccctttctttccatagagcgacccgaagccggcggtggcgcagggagccgagtctgatgagctcgcgggcggctgaaggccggcttccctgtggggaacgcgccacctgtcggcgccagtgagaactgcgtctgtgtggcgccctcggggtattcggggctgcggggagatgtgtgcctgaagccctgcgcttgcggtggggacgtccggcctctttcctggcaattgacccctgaggcgggagagacaacggaattcccacaaagggatccttctcgggatctccccacctcaagacagctaaagctggaggaaaagcccctccggggggtggggggtgcgggtttgccctgcgattccgaaagcagaaaatacccgagccacacagggacgggcgccgcgttggtagtcggggctacg

SEQ ID NO: 37932 - DNA, 897 bp, Homo sapiens
acatatagcatatataatatataacatataacatatattatatataacatataacatatattatatataacatataacatatataatatgtaacattatatataacatatataatatgtaacattatatataacatatataatatgtaacattatatataacatatgttatatatttcagcctcaaggaagaggatacatccctacccactaagtgtgggctgggctgtgcatgatgcgtttgttccctccacggagtataggggaaagagtcactttacagtgtcaaaatctgacacatactacctcagctgggtgatcaaggtcagtagcaacagtgataaatcatgttagtacatgtctttcatataatgataaaaatggcattttacctcagtggtcttcctccccaaagtccataaccccagtctaatcatgagaaacacatcaaatagattccacagagagacattctacaaaacacctgaccagtactgctcaactgtcagggtcatcagaaacaggggaagtttgagaaactctcacagccaagagaagcttaaggaaatatgtcaagtaaatggatgggatcttggagcagaagactttagataaaagctaagaaaatgtgaatgaactatggactttagttaatcatgtagcaatatgtaacaagggtaccatgctaaggtcaatgacagagaaaactgggtgagagagtctatgggaattctctactgtcttctcaatttccctatgagtttaaaactgttctaaaaataaagcctgttaaaatggtatgggttctagaaagttataggtaaaaagaaaatgataccttaaaactgtctctagatcagggttggcaaactttgtttgcaaaatatcagctagtaaa

SEQ ID NO: 37933 - DNA, 561 bp, Homo sapiens
ccaggctcatcctaaagaaatcccattccctttgctagagcaggagcaggaagcccatgctgttggctatagagaggagcagtcagctcaggcactgctctcagctctgttaccaaccaggtgtccaaagaagctgagtatccctctctctgggtgccagcatactcctcgtttgttttgggctctcagaggtcaactgtgggcagtgactcatccagtggattatgaaatggaagaggctgaggctggcctcaggtgccagttccatcactccttcagtgagccacccctcatgctccacccttccctgacagctcagctgcacctggagctttctgaaatgtcagaccatggttctctgtattggaagaagcaatgatctcaacaccaaactcttcctgtcctcattctgggaccttgatgccttgagagtttcctgttgcacaatctgtttgtctgtagagaagtggcatccagagggtggtaggggaggaaaaaaaaatgaagtaatgggacagagcagacacaggtaaagagggccttaggtcctcaggaaagggg

SEQ ID NO: 37934 - DNA, 1260 bp, Homo sapiens
gctgttgtctggtaagttatcaattctgatttttttaaacctgattacaggcatccacaaaaaaatatgcaactaacatcatgtttaatgttgaaagactaaatgctatcctctgggattgggagcaaggaaagggtatccactctcatcactcctgtgtacttaaaaaaaaaaaagaaataaaacatatgttcacacaaaagtctgtatgcaaatgtttatagtggctttatttataattcaccccaactggaaacaacctaacatgaccttcagctggtgaatgaataagcaaaccatggtacatccatacaatgaattactagacagcaaaaaaagaaactggtgatataggcaacaacctgatgaatctcaaatgcactgtgcttagtgaaagaagccaggcccaaaggactacatactgtatgattcaatgttgtgacatactggaaaaggtaaaattataggaacaaatcagtagttgtcagggtctagtggctagggaaataattgactacaaaaggacagcaagggggaattttggggggaattggaactgttctgtatctcaaagatgggcatgattgattacatgattatgccaaaattcattcatcaaaaatgtaaatttttatgtatgtagatagattttattttaagtgaataaaaggaacaggcaacttggaagcaaaagagcaggagccgggccaggcctgcggctagattcagaaatagggttagagggaatgatcgaggggaatgacccaggcagccacagctctggagagacggctgcaggtggacaaaaagcaggtggaagcgcccagcaggaccttgaccagacaggcaatgggaacataaaagacagcaacagattgcaacatcatgtccatgggctcccaaacctgatatctcagaatcacttccagagctgattggaaagacagattccattgctaagcatagtggcctgcacctgtagttccagctactccagagggcttgaacccaggaggttgaggctgcagtgagctatgatcgcaccacagcgctccagactgggtgacagaatgagacaagtcagaatgaaagaaaggaagaaacaaagaaagagagagggggaaagaaagaaagaaagagagagagaaagaaagagagagagagaaagaaatagaggggggaaagaaagaaagagagaaagaaagagagagaaagaaagaaaagaaagaaagaaagaaagagagagagagagaaagaaag

SEQ ID NO: 37935 - DNA, 1562 bp, Homo sapiens
ggaagcctccagaagccaaggtctcatctcccctcttccctggaggccccaaacctgggtagctgtgcccctagacctttgagggagggtctcgagccattatctcccttaccttttcttgcagtgacttggcttctcccaggctgccgtaaccagcaaacgcctaaagatggctctgagacgatggccttctgtgtgtgtgtccatgaaatcaggtagtacaccacacagaaccagactctcagtgacatgcctgatattccacagacctgcatccgagctgtgcagatctcaggtagacacaaccagtgattggggatggctggtaggatcttgcctaggcaggccagggagctctgtgaggagtgtttgggagaaaatcccccaggttcatctccctgcatggactgcccctgctgggccctcacactaagctggtcctggtcctcagtactgagggatcaccacaggtgtgtaggccacagctcacaggagccctccacctagcgggtcaaaggtagtggaagatctgagagtcaggcagacctggtccaaatcccggatctgccatttcctcactgcatgatactaaaaaagtcacttcttcatctgaaaaatggggctgatcccacccattctgcagggtctcagtggggattgaagggggctgacctcaatgtagcacgatgcctgccccaggtgggacttcagcaaactctctttcctttcccttccctccccttgaaggccaagaccaaggaaacagaattgggcatgccagaacatatcccagccctgtggggtgtatttacctccacttctgatcacagtgtgtttgcgtatgaccttgaggccagtgacttttacaccttgcctatgctgggctgggctgtgacttggctgtgacttgcctgccctgaagccaagcctcagctgacatgtgtctttccaccacccctgctgtgctgagtgagcaccagccacctgtcccattgttcctgccccaggctgtgtgtggagagtggtctgacagggcagacaacaccctacactccagatgtgttgaggtgagctctgggggtcaggaaagaagcagggaggggcacagtgtgaacatcctgtgcagatttccccccaactggccccccagctggttgggttttcttttctcagtaactcctggcagaagtccaaggaggcctccttctcccaaaccctctgtccttggctcaaaaatccagcagaggacgtgccacgaccacgaaaggtgacagcagtcaaggggaaagaggactcccttactggagtgcacagaagtttcctatttattttgcttacgcggttgactttttccaaaggctgcttgggacggcttacctcgaaaagcttagcaataaggctagtagtaaatcagacaaaaaaatcatggactgggggaaagaaagtagcatttaaatatatttaataaggacgatatagtcgtgaacatgtgcctgagtatcctggctaccacagtaaaaggggaaatatgatcagttatgggaaaagagtaaaaatattaa

SEQ ID NO: 37936 - DNA, 621 bp, Homo sapiens
ccacggctattgcaaggactttacttttgctgggggagggggtagagttttgagcagaggagaaatgcgatctggcaaacatcttgcaaggatggctctgactgttctatccttggcagaggacaccagagtctggcccatagaaggtgctcaacaaagctcagcacattgcactcctccctggagtaggaaagggctcgtctgctttgggaaatttggctctcaagcttctggaaacacctgaccccatgccaggtgagacaagctcacactcaaggcccccttagtccaacggtcagtggacagaacaagcaccaaaggtcaacggcgtgggcggtggcctctctgccaaagtgtgtgggcccaagtagggtattcacctccctccctgtctgtgagaaatttcagacccctctactttttccagcaggagttcatgttccttttaagataatcctctatagacctctggcagcccagccttcaaaatgtctccccctgtctctcttactcatggagagccccgcttccccgcctcaaaaaaaagtcttcctctctcttactcatgcatggagagccccacaaaaagacactggttcccagggattcttccaaagatgc

SEQ ID NO: 37937 - DNA, 3559 bp, Homo sapiens
cttctcaaagtttacaacccactgcaggggccactcaccagccctggcaccctaagggcaggaacctccattgggcacgtgtgtctccagcactgggagcactgtctggcacctggggcactgtgagtgttgaatggataaaggacctgtaagaattgccataagaggtgttgccctggggcaaggtgggacaggaaagttcttgcaagagaagagaggctctggccttgggccctggctgagcagagagctgggaggtgggtattcgggtaggaggaaagctgtggagggggaaagcaaactgcctgcgggggtgggggggttctcggcgggagttgggggtggagggaaaggcgctttacagcagcactccctccacagggagaccagagctctgcctcttcctccccaccgtgccctttggggtccagttgtggggccttccttgaggcccagctcctgcctctggcctccggaggcttatctccccaacagaggctggctccccagaaaacaggattcttagacttcctaaaaataacctgaagctccttatcagaggctaatagtgtatgtctcccaggaatactctagaaagagtaccaggggtcaggaacccccactcagcctccacgaatctgagcggaaaagcccgggtctcctcacctgtaaagaaaataactgcagccggcaaatgtgaccacaggtgagaaggggcttcggaccagggcgcacacctctagagaggtgcccacagacagcctccccttacttacgccctgcttcgctgcagtgctgtgaagccatcggcattggaagtgcggagggcagcgggcagtgccccagggggaaggggggacgggtagggtttcagagcccagaaggcctagacagggaggcagctccgggagaaaggtacccgccatcccaccggtcttggaacctgaggactgctgggaagggtcaaaagtctgccctaagggtggacaagggacagagattggggggggaccacaaaggcctgggcgcaaccttgttgagagggaagggatccggacccaatctggagccctggtctcttcccacctgcaaccgtggctgccacttggcctcggttataaaatggacaaggattcgaggtgctcctcaggttaagagaggggggcctagaggtcaccctggcctcggtgccctccgtggccgggttaagaggaggtcccggagttctgctcacttcagccgtgtgccgggcactgcaaatcaggaagtgttggcgccggctggcgacctcccgcctggggccaggggaggagggtggttggacgctgccaccgctgccggggctgtgcagggctgggcggggagcgaggacccggcggctcctgattgcggccccgggggaggtggccgagccggataagctgcggcgggctggagggcggccacctcccctgcaggtccggccctcccgggcgggtggggcgcgggggaggaggagcctcgggccgagccaccgccttcgccgcggaccttcagctgccgcggtcgctccgagcggcgggccgcagaggtgagtgtaccctcccccggtctccgcggggctgcgtgctgcgcccggtccccgagacgcccgcccggttgcaccctgcgccgtcgctgcgcggacctcgggtgccgccacacgtctggaggcgacttctgtcccctgggaccgagccacgtgcgcccggcggcagagaaaccgggttccggggcccccaccccgtgtgccttccttccctaggcgtggaagccgcttgcgccgcgcaggttaggcagggccggcggcgacagtggcggggagcaggctccggagccccgggtgcagatgtgggcgcccctccggatgaccccggctgagtccacaggtcccgtgtgccccacggctggggctctggccagcggtcccaaaggagggctggtagctgtgggcggggatcttccaggctcttcctcgccagacctcccagtcccttcgcagccgaacagggcagggacaggggcaggtgcaggggctgggcaggggcgcccgaccttggtccccaggaggaggctggcctcaccagtgcccgcctctgcccgcggagcccttgcctggcaaagttccccctcctgcccggcaaagctccccctcctgcccacttccccgaaatttggggacaggctgcccggagaggtgtggttggaactttggtcactctgggtaaatgaaggggagggtgtgcccagataatatgcggtttggggaccagaaagccggatccgtggggagaagcaggaaggtcccgctggagccctggcagagggcacagagaggcctcccaaatatccagggccacctcagagatgggctccagaagtggggattctggaaatgcccccagggaggtatttctgtccatcagagtgcagccataatataattaacagcagatattcccatttatgtgtgccaggcatcttgctaagggctttgagcacaatatcccagttaatcctcacaacaggaaggcaccattatctcttgttaaaaatggggaaacagcctcagagagtccacgtattttgcaaggatacacagctaggaagttgcagaagtagaatttgaacccagagttatctgacttggagcccagaggaacctaccactggggcgaaacaggctgtgtcctcacggggattctggcagccccaagaatacagtgctgagagccagaaggtccacaaaaccaaagggtctcacctgggtgtgtcctctcagtcacctgcaaggcttgttaaaaatatagatccccaagtcccatccgaagctgactgaatcagctaggggcacctggaggacccagactatgtcttactcatctctgtccctggtggcctgcagaggggctggcaaggagcaggtgcttagtgaatgtctaatgggtaagtgggcggggtggggtagatggtgtcactagtgtcctgaagggggcttaaatggagcaggtggcctcagccaggcaatccggcagcaggtatggaagtgacacagtctaatgctggcctcagagccagcagggagctcaggctgggccacttgtccacctgggggttgaacagcctgccccaggtttgctgaggtccccaggaccaggccaggtcaagctgggatcacacatgttccctctccagcctagagatgtcaaacaggtagattcctctcccattcatatctcctatccttggcccacagcccttcccttcttggacttatcagagaccaaggtgctgggcagggcttcaggtggttaaaaagtgaaagttcttgagtgaagtccaaaggcgcacacctgagagctgagtgggcaaaaggtcgctggctgagtgctggggatagtctggctttggagtcagatggacgagtccaaatctcagctccttaccccgtaacatgaagccctcagctctctgaacctctgtttatttgcaaaaccttgccaagggcttcaaacaggatatcctcataaaacaagtatgc

SEQ ID NO: 37938 - DNA, 1706 bp, Homo sapiens
acttataaagaaatagagcagtaataggaacatgtgcccctaaatgtaattttactgaccagacaaaaaaaattttttttaattgaaaataagtagctggacgtgatagcatgcgcctgtagtcccagctactcagactcagaagtctgagacaagagaattgcttgaacctgggaggcagaggttgcagtgagtcgagatcgcgccactgcactccaggctggcgacacagcgagactccgtctcaataaataaataactaataaataaacaaaaatttaaaaaaattgaagataactgtgggctgcttgaggacaagaactgggttattttctctctctttgctcagtcagtccccacatgggaggcgtgcgaggcaccccgttcttggcctgcaggccgcccccactccatctggctgcagggtgccacagccagcctctgattgccagtggccccagcacctcaatccataccgacctcacagcaaaccctccgtggccacagcctgccctggccactcatgtctgaaaggtgatcggtgtccatgaagaagaggccatggggctgtggatgtcatgtggccaactgttagtggcctgcgcaagagcagacaggagctggcaggcaggcccatgggccaggcgtggctcccagccataaacacaggctgtagccctgccgggaagaaggaggggacagacaagcctgggcagagacccagaggggaccaggacacccgatcctccatggcagttctgtccacagcttgggaggagaggcaggcaggtctgcaggcaggagacaggcctcggcccacagagctgcaatctgatcccatctgctccctctccagttctataaatagaacccccagggagccagggcccagacagggttagtcacaccctcacctcaggccgcagggacaggcctctgggacttccaagacatgtaccacctgtcctgcccccaacccctgccagccttcagcaggagggttcatgctgagcatcaggagggggcagaagaattgaacgtggccactgtccatgaagaagttagagaagagtacacacaacacacatgcacacaagaataggacacgtgcacacacacacacacatgcatacaagattaggaaacacaagtgcacacacaaccagtcagaaatgagctctgagcttttacacatattaactcatttcatcctcaaacagtctttagagaggtataattagtgttcccgttttaaaggtgagggaactaaggcacagaggagctatgtaactcacccaaaggcacccagctactggcatgtgaggccatgatttctccccagcagccccacccacagcccgtgcctttaaccacctgcctgacccctcccagccaagtggctccgtccctacatcagaaaggtcaaggaagaggccgcctagggagcagtacaaggcagcattacaacctggcattttcctgttgcagactgcattttggtggcaagagaagctttggaggtgcttaacgtttagtttgcatttatcctaccgctgaaaagcagggacccttaggaccataagtctaggacttttcatagcaccctagactgctggggatgaaaggggcttggagctgagctggtgcagcagctcctgttagagaagccacccagagaggcccagggacctcctatgtcccagcgc

SEQ ID NO: 37939 - DNA, 631 bp, Homo sapiens
aaaaatactccacagaacatactctgggaaatgctgctagtggcaaaagtttctttttgcatttgttcattcaacaaacatttattgagcacttactgcaggccaggcatcctgctaggcctgtgatgcaatagagaacaagacaggcagagccatctttccatgataaaggaaacggaggcagggacattgtttacatttctttggcatctcccactgttctccacacagaatctgcggtcagtgttggcggattaactcctcccctcccatgagtgggagctgactaatgctgtatcctgccattgtaacagggcagagaacagccatcctatccacccccactatcaacagaaatctgtgcagggaggacgtggtacaggactcagggacagtgacagcgtaatgctcttacgtaatccaaattaattgctcctgaccagggatgcttcacatccattggaacaacacagagttgtagccgtgtgttttttaaagtgtgtctgcctctgaatctccctggctctgctcatctcagaaggtccctggaggagggctcatggctgacacatgttagcatacgagaaggggaagaattttatttatctgccactaatccccatgtgtctca

SEQ ID NO: 37940 - DNA, 1635 bp, Homo sapiens
tgggcatccagcccagggcctgccttggtgccagctctgcccttcctgcctcctccttcctgctttgccttctccccctctctcttccccatatccatttctattttacaatggttcttttggtttttttgtttttgtttttgtttttttcttgagagggagtctggccctgttgcccaggctggagtgcagtggcgccatcttggctcactgcagcctctgcctcctgagttcaagcgattctcctgccccagcctctggagtagctgagattacaggcgcccaccaccacgcccagctaatttttgtatttttagtagagatggggtttcaccatgttggccagcctggtcttgaactcctgacctcaaatgatccaaccgcctcagcctcccaaagtgcttggattacaggtgtgagccactgcacctggccctattttacaatgtttaatgacccaaacttgaggatttttccacttctctacaccatataatcaaatcaaaaaatcagatattaggctttgacaatgggactgaatcttggaaactggaaagtccagtctcaggacatcccggaaagttgagcacacaagcaagtcccatgcaactgtgtgatgaaacagccccacacatccgggagcacagccaaggcgtcctgtgccacctccctggtagaatctggcttttcaacttgctcacccatgagaggaaagcggttttagacatcaggcttacccctctcctaagccacacccttttctcattcccagctgaggaactgagcctgagacactgaggttcccagctgcctccatgattcgccagcacccagcttcagtttcacatcctcccaatcgtcatagccaggacagcatgcctcactgaccacgagggaatgtcacatcccgcctggctgagccatgccgcagacaggctcctggctaagcacttggccgacaccccaatattcaatgctgacacaccacaaaggcataagtaggctaattttgcggatgatgaaaataggactcaaaccaaactgtgtacagttgtagggcttattgagggcagaaaacttctccacagcaggtctctggcaacccagagcccctccctgcactcctgcgtccctgtcactgcacccatagagcccccaagaggcctcagtggatcaccgggcttgcataatttttatctgggcatacattaccaaattacctccaccccaaaaataccgttccaggtttcctgttactatacggaaacactgatgtacatcatcagcctgtgttcattttgtatactctccatatagtgggtgggttgttttgggattttggttttttttttttttgcaacctaaaagctaaaatacttttcatgtttaaaactgaaattcatatgcatggacaggacatttttaaaagtaaatatttcatgggtatttgtcaacagaatcttatggttgataattttgtaaacgatttaacccatcatttcatgtgaataaattaagatttgaatatctataggtagcataaggtgaaaaacctctaaaatttgaacccgtattctgggatgggagaccttaggcaaattaacctgtctgagcttcagttttctcatttgtaag

SEQ ID NO: 37941 - DNA, 2431 bp, Homo sapiens
tctcctcatcctcttttcaaacccttttacgatttcccatctcactcagcatgacagtcaaagtccctgtgatggccaacttctgcatcacctagccagtctgccaccgccaaaactctccagcctcatctttctactcttcccctggttccttgcccacgcctttacacttgttctctgcttggaatcttccctcccctccttgaggaactttctcaaatgtcaccttccctcaatactccccctcctccatttaaaactataaacttccaactctctaagcccctaaagtactctatatttaacttattgtataaactactgtccctacttgtaagttccaagattgcagggattcacccgctttgttcactgctgtctgccaaggtctagaacagtgcaagttacccaacaggagttcaataaacagccattcatttaacaaatatttgctgagcacttcgtcccgtccaagtttgttaaatcaagacaaataagacaccgtccctgcctttaacgcaccagatggagaaatgcaccacagacataaatgtgcaatacaggcctgacactacggccacaagcaagtcaaagaacgtgccaaaagttcagaggaagaagcctcggcttcgcctttcgggagaccagtccagctttccaccatcacgctgctcatcagggaccatctccgggggtctcctctagaccccaagggaggagcgggtcccgcccgccattcccaggtctcagagtttacttgtccagagatgcaacttccggcctcttcaggccgggcaagatttaaggaaagaaaagaaacataaggacctccgttcttcggtctccgtcccctccccttcccccgcgtgccgtccccacaacgggccaggactgaacccaactctcgaccaactcccggcagcaaaactaagcaccctacttccgttgtccccacctgttcccggcgtccccttcggctactcccggcgtttgcgcaagcggtcccacgtgggctcgggcggggctagcgccgcggcgggggctgggcacgcccctagcgcatagctggcttctgattggctttccggtgctcgcccgagcagggttggggcgagtggaccgcgcctctaaaggcgcttgccagtgcaatctgggcgatcgcttcctggtcctcgcctcctccgctgtctccctggagttcttgcaagtcggccaggatgtctcaggtacagcgcgtgcacagccaggctgcgaaggtgcagcgggcgggaggcccgttgggggctcagccggctgccagaagctctcgggctctttccttccgtgcccctcacttgctcatgggcccatgcctagccctgattcgttggacagagccttgtgagcgggattttccgtttggggatttctaaatctgctgcccaccccgcaactgccggaaagttgcccatggggtggacttcgctgtgtagcgggagaggggtgggagtcgagggtgcttgatggagagatgggggaaggggttgcacggattggaggagcgaggagactcagtccccatcccgaagcacagggcaggacgtcgcggcggagtggggaagcgaggagtccgtggccgagagcttggaggtcaggggaagtacggggccggctgctcagagtgcgggacgaggagaatcgcggcccggggagaggtgacccaggggcccctcccttctctccagtgtagacccttgtctgagaccgagctatgtggggcgacctctggctcctcccgcctgcctctgccaatccgggcactgggacagaggtcggtgttgaacgcgcgggccccagggggagggaggggaccaacgggctccggcgctgacaccgcggcactcatgccctgtcccctttcagctgtttccagcatactgtgccccgtctgtcctcaggccagggcttcgctgcagccccggccactccctagtgcctggcccggtggtggccaggcagttggccgcgctgcttctcccgcagaggggacccccactgggggcgaaggcttggcctgccctcttcactgctgtatttccagacctgatgcctgcgtttgtgagagctctggatatatggttttcgattgaatgagtgaactggaggggcttccccttcttgtgttgctgaatctttctagctgccctgttggggcagggaggggcagacacacttcaggggctgcattgcccgaagggtgccacctttcccacctctccatccccgtaactgggctgtcatcaggccacagtaggattcttaccctctcccacccagaggaggccctcaatcctctcctctcccttccatttaggctgagtttgagaaagctgcagaggaggttaggcaccttaagaccaagccatcggatgaggagatgctgttcatctat

SEQ ID NO: 37942 - DNA, 922 bp, Homo sapiens
atataacttattgagtaaaaatgtatgatcttttatacatattgttaaattatttttgtaaaaacctgttactagtaatgtataaaagtgccctctcaccaacttcttgctagcactgaatattattattttaaacattgttgtttttataattcagccggtaagttgtagcttgcagtttcaggctcccttgaaagtgaaaaaggtttgatggctgccttctccaggattctctttagcggcctctgctgcttcagaggcagtctttctctctctatcgctctctctctctcccttggggccatcttgcataatttctggtttcctccttcctgttgtattttggagttcttcccacagactttttctttttcagtcccagctctccacttcaaagtctacttctgccagggtgcagcaggtcagatgttttccattaactaaggtagtatatgttaaatggttaacccagaaccctctggagtcagcagaggtgttgagtggagctgtgcctgccaggaaatgcccccttatcctcatttctgcccattgggcagagcagcattttccgcttggcagagcaggcctgatgcagcgctcagagggaaccaagccagtgctggcattgctgccaatagctactgaggaagcaatctccttaacgatacatgtgatcaagactcaaaagcttaaaagagaacctgtagatcttgcgtgggcagaggccatgagtcatctagaaatggtgtttggggctgtgagcagatgacaccatttccagtggagacagtcacgggacagactgcaggacagaactgggacctgggatctgcagaagccacatgatggagtgataagaccacctggcctgggccaggacgcagaccattcttttagccacaccaaactttaaaggactttc

SEQ ID NO: 37943 - DNA, 819 bp, Homo sapiens
agtagcctcagcatcacctgagaacttaatggaagaaaaattcttgagccccacccctgacctgcagcatcagaggctctgggggtagggcccagccatctgggtttcagcagccctcctggtaattgattcacattgaagtttgagagccactcttctatactctactgcctgcttttggccccatcctgcagcaaccacccagtggaaagaagccatgtgagcttggaaccgaaacaacccagttgcaagggcaaagagggcaagagtgataaggtggtgcttttctaagcaccagaggctgttgcaacatcccggaagttcagaaagcacccagggtgcagggccaaagatttctggtttatgatccttcagctacactgcactctttacacaggtctcaaggaaatttctgctcagcatttaaaaatcagaccctaaaagaaacagagcctgaaggtgttacccgaaaacaccggggttcatttgcctggcaagtaacaaatgactccccacaagaacacaggttttgatcaataggagttttattctccaaagcagtgtctccctgacggaagtgacagaagggttttatggcggtgatgcagacagcagagggtgcattgctgcatggagaggggggtcctagcggcgcaggcacagcaagtcatcacgccagcatgtgggttgcatgttacggttataaagctacagctccacccagggtggatactttagcatggtcatcaggaaagttcactgagcctcatctataagttgctggggtctgtcaggagtcagttccagacaactaggtga

SEQ ID NO: 37944 - DNA, 1819 bp, Homo sapiens
ggctgcagtgaaccatgatgatgccaccgcaccacagcctgaccaacagggtgagaccctgtctctttaaaaaaaaaaaaaaaaaaaaaaaaagccacacccaacactttgtggaaaaaacaatacaggactacaggctgaggatgatgggcaagtgctggctgaaggtctgaagtccatccccttaccctattctcctggggaggccaccctgcccccagtgaattccccgagagatcccagtttcccgtattgctcctcccagaccctttgacccagactgctttccttgtaaacatcaaatctaacaacctaagtggtggggtgtttcctgggtttccccagagcttaggcaaagccctgtgtaaaccatttaacttccatagtcatcagcccagtcatgcccagtactcatgcccacactgtttcttctttgtccctcactggtcattctgtgcccaccaaccaactcctggtgcctaactttgcttcttgggcactttgatcccagcaggggtaccctgatgaggaaagaacacagatccactctggggaagagatgatctggcagtccgtgctgtacaataactctgggtgcatttgtttattgtctccaagagactgagtgtcccagagtatgctgataagtccaatgtccaagtctgcgaagaaaaagttgatagaagtctctcccgtgggggttcgatgtgtgcctggaatctgtggggtcctgatgcctctatctgtctcgagggaggacttgactttggaaagggaggccctacagaaaggccaccctcagaggtcccatctacatcattctccctctccccacctctctggtaccacctctaaatacagaaacaccttcaaaaaactcacgtgggttaagtttcccatatacagacacgtttagaagaaagtttcccatatatagacatatttaggaaagatactagttcctccttgtttcactcattgcttcaagcacagccagcccacccctgcattcccccttagatgctgggtgtccccgatggggctgctgacaggccctttcttcagttgcagggtgaacatcatacctgtgacccttcctcacccaaggggaaggcaaggaggaaagactcaggggagggcggggaaactctttggctcccagccggctcacactaaaatgcggtaaacaaggtctgtgttgcaatcgggcgcctgagaggaggtcaaggaggttgaatgctgggctggggctcaaggcagagcagggcagggcgcagggagccctagctggagggaaaggaaccagcctggaaaggtctggaatcaggaaaaccatggcgtgggggctgggagaagaggaagacctggttggtaaaggcggggcagcaggaggagaggagagggaagaggccatgggccacagacaaggcaagacctggagaggtcagaagtacaaggcacgggcggcagggagggtgggtcatcctggcaccatgcagctttaaagctacccagtgagcttcaaggggctgctccttgccaactccctgctattacctctgggtgtttggagtgtgtctgccccacctcgtccctcccaccttccaactcctcaaaagagaaacttccagcactgggaactacccccaagactaaatctccgcacaggggagtcgcctctcagatctaagtttccctgggagcagggaccgcgcaaacttagagccccctggaaactggatggtaaagatcatgagttatttagacttatgcatatgccagccgggatggtgcacctgacaccttatgcacattcatt

SEQ ID NO: 37945 - DNA, 5271 bp, Homo sapiens
ctttaagaactcagatccggccggatgcggtggctcatgcctgtaatcctagcactttggaaggccgagatcggtggatcacctgaggtcaggagttcgagaccagcctgaccaaaatggtgaaacccccgtctctgctaaaaaatacaaaaattagcagggcttgatggggcgcgcttgtaatcccagctactcgggaggctgaggcaggagaatcgcttgaacgggtttgaacccaggaggcgaaggttgcagtgagccgtgatcgcgtcattgcactccagcctgggccacaagcgctagacaacgtccagaaaaaaaaaaagagagacctcagttcccatcgaggtggagaaaaaataaccacatttgtttggcatatttgcatttttaatagtccctgaggagttcaggaggaaacagggttttacatccccttttagggacgcaagtaggattgccccaaaaagttccactccgttcacactcagcgagggcccggcaagagccccacctttcacattcattatttcccttactaaccgaggctccgagacgctaaacaagcagcccaaggtcacaccgcagagtgagggcagcagagcctctgcgcctgcctcctcccttcggaccctgccgcgttcccagaggctggactcagcaagctggaacaggaatcgaaccctcaggccctcgtcgccgtcccagccctcgaggaatctgcgccccaggcgaagctgtcctcggaggttcgggagcgtcggagtgacttcccgatcctttcccctgggacccgagggatccctccccccaagtgccgggtcctccccgcggctccccaggggctcctccggccgccctcgctgactcagcgtaatccgagccgcggagggcggcggggttggcggagcccgcccggggttaatcgccgagctttgaacgccccctcccgccccgcccgcctccagcagccgccccgcccctgcggagaagtcccgggctggcgccggcggccacagcggagcagctggagcgatcgaggctgcagcgcggccgccgggcgcagcatgactgccgtcggcgtgcaggtagccggcgcctggcggggcgctgacccggggtgctgccccgccgtgggaggttgggggtgggaggacggagggaggggcgtacccaccgcgagcgccggcgtcgggctgggggtgcgagcgccccccgtgcccgccccctgttgcaaacctgggtccggaggaggctgggcggggagcaacctcggggggcctgcctgcctcacatagctgctcccgaggcgcggactccggctgcttctgctcgcggccttgcaagcacccgaggctcccaaacttcatttggaaagatttttcttctctttggtgtcaccagtgacttactggtcagtttaccataagggtccccctttgtgagaaatgaggcgcgtctggggtggagggacagaatcgacttgcaaagtgaggcttatgtaacagaggatgcgtctcttgggaagttagacctttctgggggtggaggttaggaagaccgtctccctccccaaagctgcgtttggggtgctgggctgggggtggacttgctgagtcgcgcggacacctcagggaaaggctctggcgagggaagaagcccgtgtctccgaagatttggcttctccttagcgtagtgcacgatgtttatgttggctaagaacctacacattcctacccgctccctcgggcctgctgctccccaaagggaagtcagtgggtggcggtaccgctgcccagcgggcgaacttcctttccgcgcaactcgcccgctgcagagtctatccgctggactgtctccaggattagagaggcccgttgacttcgtgtacaaacgctcagccacaacactgacctagtagacaccgttctgcccattgtatagatgaggtaaccgagactcagaagtaaggtgccctccgtggctggccaaggaacagaatcaagattcaaacccagggctttctggctccaaatcccactggctcctcctgcctttacctaacgggagaaaccccacccacaggacacccccaaaaccgcttctatagccaggacctaggcacctgggcgaagccgggcatggggcgcagggaattcctcccctttgttctgggggatgtctggaatcccggccaggcagcatggtgggacagaccaggtgcggtccctcccctctaggagcttacagcccatgtagggagagagacttggaaacagggcatgggggagcgaatgctaaattaagaggtgcaaaagttgccagacggggaagaggaggaagcctggtagcaaggtgggagctcagctggggaggccacaggctccaggtgaagggcgggtgctccggccgcttcgggatgataactcttcatccccacaaccatgacttgccagggggcaaacacaggtaggaagcaagttctgggtcatgcaggcagcggtgggccaggctgcagctgagaggagcagaggcaggccggctcatcaggaggctgtgaacttccaggatgttgacgatggtgatggcctcacctgggtaggggcagagtgggtgatgagggggagcaaatatgggagacatgttggggatgtgcggaatgagttgggaggagcttaatttgtctacctgggggtgctttggttaaggggaacacatgaggccctgggttataggaggaagaccatgacattggactcagtagcccagtagtgtcaagtgaccctattctataggtcactagaaatcatgcaaggttacagatgaaaaaggaaaatgcttacatttttagcagagcagttaagctccagagagatttaagtgattgcctaaaggtaccctgcaggggtcctctaggtcaggggcaggacttgacctccccgctcccttcttttccactgcacacttgtccagctgccctccagtagccgtttcaggccctgcatcactgaaagctggtggagatgccgggtggttaggaatgaagactctatatgtgttattattgttattaatattaatagctaccatgagttgggagcggcccgtgtaccatgcatctttatatacaggatctcatttgattcctgggagtttcagtggtggccagagagtttaaatgaagccctactttggggcaggagcgggaggaaactagatgaggtcagctgtctccactttctgatcctgacgtgacatctaagggcctggagattaaagtccagtctgcctaggacaggtagggctggagaagggacaggacgtgcctgttttccagccagcatgctgtctcgggttaaaaggtttctgggtcctgtgatttgttctctgcctgtggtgctcctcctttttaggaccatttatcattctctagggaccttgtaaccttgccaggtgccttcatggctacgactttcctgcaagtgtcattaacttcattttctagatgaggaaacaagggctcaggaagttaagaaactgcccaaggacaaacacctctaatggtttgtggagtagacacaggttttcaaagtttcctttggtttctttcttaccggtagattttttttttttttgtaataaaatgcaatacagactcctggacccccaatgtcccaagcaggtacagggctcagttgaagtgaggaaggggatgcagagccagcctgctcagcttccctgcccacccggcttcagcactggaagccccaccaggagcatggggacacagtttgagaaccacagcccatactcttagctccatgtttttgaccgcacccaggctgccttcatctcagctaggacccaggctggtcctagctctggcatggcccttgaggcatccctctgcacgcaccttttcctcaccaagagggcatggggcacagggaattcctcccctttgttctgggacatgtctggaatcctggccaggcagcgtgctgggacagaccaagtgcggtccctcccatccaggagcttacagcccatgtagggagggctgtaagggctcagtactgagcccctagcacaaaggccctgtccttagaaggccctagtcagtatttattcgctgaacggattccacctcctgcatatcatacaattgtctgggcagccataaagagcttcattgtgctttaggtgagtgatctcaggcaagtcacctgccctctgcatagtttccttctctgtacacccaccatggagcttcctactttatcaacctcataggtttaagaataaaataggatcctacttaaggcagaggtgctgaaagcaaactgcatccttattcctgtatccctggggttgaaattagcggtagctcctgtgtctggggcatgtgagcagatactcttgctgggctctttgaccacaggagtctcccagaagcagggctttattttatgtctcacacagagaggagtggcccagacctgcctcaggaagcctccatttgcccatggcataggacacaccccatgttcctcactgctccattctcctgggtcctagcagtgaccgtcatgcgtgcctgttttgcatacctcccaaaccgaggtgtaacctgggcagcttctagacacactgcaaagcaggtcatttaatgtatgactgtgcaggagactcagtttaaaggagcttcagacggaagtgacagtggttgccaatgacctttgacttatctcacagctctcccttgagcacccactgaatgcccaggtattggggacacagcagtgcctaaacacagaatgtggtggtgtgggggtagggggcggccttcccagagcacacagtgttggaatgagacagaaataatatgtaactacaaactgtcctcagaatggtgaagaatttgaacaggtgcctgacacagaataccaggaggggcctgactctgggttgagtgggcaggaaagcactctctgtggaggagactttaagctgagacatgaagaatggagaagaggtgttgtcctggaggggtggcaggagctgcagaagagccactacaggcttaagggccagtcatctgaggaaagaaagttctagacatggggagaggggagtgtgctgggagctgaggttgggtggggaggcggagcggattgtgagaggcttgtgggctgtgtaaagagttcctgaagtctttcttttgctttctgggtcagggcttgggtgcagtgcccgggtggtgtccttgaa

SEQ ID NO: 37946 - DNA, 2180 bp, Homo sapiens
ccttgttcaagccaggctctgggaactggagagggacagaaggggtagggaacggtagggtgggccgggccagggcctgggttaggggggatgctggcctagagcggggcaggtgtggcctgtttctccctgaagagaggcccagcccctagcaggagaggggaagtgggagggcccagagaggaacccagtcctgaaatcaggacgcctgtgggggctttggaggcggggcagtcccaggagccacaagggcaggctgcaaccatgagcaagggtgtcgtagaattgtagagggacacagaaggcagtgtgtgggcggagctttcacaggacagtggaagcatctatgaggccaaggggcaggggtctgtgtccttggaggcatatgggagatgaggaactccttggatgttccagaagcttcacctgcaagaggaggagccggagcttctctctgctgtgcactccccagggacggctccgccactatcccgaggctgcccgtctacattccagctgtggacgctgctggctgggcctgagcagggtctcgggaactcagcaggcctgccgggtaaccctgggcctacccagatgcctgtgggatggggacttggtcctgaggaccctttacggacagcccactctgtgtctccgtgctgacctagcctggcacctggagtctcaggaggccaagggtgacccagagccctctttccctgtgcggccgtctcagggttgcagcaggatgcctcgtttcaagttgcagctcccctgccagctcgggtcagcctctcttgcattggaagcagctggggcatttccagagcatggaaaaaggcaggagccttttgcctcacttgtggaaaaacagattcagtgctggctggactggccaggtcagccagggtaccagccgcaggctccaggccatgaggctggacaatgcctggctggttggccagacagatgtggacggtgccagcacgtctgagaggcttcctaacttgggtcacgtcaggcagggcccccagggatgcctggggacaggccatgccaggcctgtgctggatgcacatcagacatcctggagctgaggttgacagcagctcaagggtgagtagggtcactgccccacggcggagatgaggaagctgaggttccaagagggggaagtgagaagtgtgggtgacagagctggtgataatggagctgggatcccactcagccttcccatctccccagcctgggacaggctgcctcctccaggctggccttggtggcagcagacctggctgctagccccccacagtgttgatcgtttcctgaacacgagtgacactgccttgttctctcccagccctggctccagcgtctgggcacagaaggcacagaacagacccagggtttcccagcgtgcgatgagctcaccactcactggtggcctgtgcttttggctggtacatggttgaacattttttcatagttgcacttttttaaagaaaatgtgtattagaaacattataaaactagcatatcacatctgtgattttatagctactattgtttaggatgaggctaagttttttaaaagtccattgattgaaaggaaaacatatgaaggaaatcatagcacaggaggtgcgtggctctagccaggctggagggaatgtggcttgggggagctggacagtccctgtggcctcctcagtgcttgtggaggctgccttgcacggtccccaggctttgaatgcagcatctcagactccactccgggactccccagtcccccaagccaagcaggaatgggaggcaggggagagcgctcccagcttagcttcggatacctgtcctggctctggccttcccagggagccctggcagggaagggacacagcccaggactagggtcatcctgggcagttttagttccagagcagcacagctcactgcctgacttgggggtaagcggcattcattgagataggggatgggggagctttgtcaatagggccacacttactgagccacgagggaggggtcaccgccccaggagagccagggctagaaggaatatacattagctgtgtgggcaggcagatccaaagcatgtgaagagcagggcttcccacgcctctgtcgtctctgatggccacctccgccaccaattgtctggctgg

SEQ ID NO: 37947 - DNA, 8744 bp, Homo sapiens
ttttttttgtttgtttgtttgttttttgccttttctctctccttcctcctcagattgaagtcacagagaaaggcaggaaaacttcctggcttaggtttccaaaggcctctgggggatgaagaggtatgctgggataatcaaagcacttgggagaaaacagaaaaagagcaagaattcccagagactggggagagatggaggggaagtgatgagctgggacatggagggttccagaagaggtgcaaataccctgctgcccagccagccctgaggaggtgggatggcccagaggagaaacagctgtgggggcaggtctagatgggcagaccacacacagccttgccgagcccatgcctcccggcaaagcacaggaggggccagtggcccaggatagacagggctctgccagtcaccacctgtgactaacaccatcatcagctgcaggcgagatccccctgaacgtggtggtgctacgtgaatctctagccacctgggaaaattgcaggggaagatccagaaatgtctgccatcccaggagaatgcaatcagaattaaagtcagaaaacggagaaagttctatttttgcccaaaggggtttatagataaagattcctggtctttatatttgtggagcccctggccctgggccaggtctgaagcagacccagcaatgtcagcttcctctgtcctgcccacagggatagagaggtggccccagaggcaggtctgggtgggttgggggaggactgagagaggggaaagggccatctcagagggcaggacagtgcctgggagtttgccctgcattcacctggcatggagcctctatcctccagtcctctatttataaataagctcagatggcctgataaaaacctgggactatttctggagcaatgtgtcaggctgcagtggcagggggccaggaacagcccggcccccggggccatgctgaactgggccactcacacccctccatgtccctggtgctcacttcatcggctgatggggtcaccagggaagccacagctcctctttgtcttggccttgtgtctgtcctctcctaccttctgcttctgccggtgtttgctctttcctctgcccgcggaccgccacatccatctctcaggcacttccactgctcacccccactcatccctttctcctccccagaacccacagtggcttaggacgagctcctgcacagcggcctgtttcccaattgcatcgtgtatctctttgcctctcttggctcagccatggccccagccccaggccatccaaggggcagcctggtgaggtttcttcaactttgctaatgacttgacctacagtcttaagtcaagaaggtgtcgctctcctttgtgatggctggacgcacaggagctgtggtcaggatggggctagaggagctgaaatcccagggcaacaagggtatttaaaaacacatcgcaggagaaacagctaaagagtcttggaaccaggaatcataagctgtttgatgggatgaactatcttgggagtgatgaggtccccatcactgaaagtattcaagcagagagagtcatggaattaggagacggaagagcatcagacactgaatgaagtctgcactacatgagatgaagaacccttccagccctgaggccgagcagccacttctctggagcaggctggcccatctatgtccaggaggccagccccaggctagcttctgagcacggggagctaagtccttcgccttccagagactgcacaaagtgtgtgccacctccacagaaccctcctcatccacccgagaactcttcctcacctgacctaaagctcttcatttcataccacctttcaagcgaattaaggattaattgccagcagcaatctctgtctttgtttgttttctctaatggaaaacctttctctcgggagggtaaggttatcagtcattcacagctcagttgtgctgtgtttgattagactggacggcaaagctgagtcctgtttcggctctgtgcgatcctgggccccttggagcctgttttctcatctatgaaatgggagtaataatagtgcttattgcacagttgttttaagaactaaaaatttaaattgcctagaatgttatacaaacataagctgccatattttggaaaaatgagccaagatcagtggtgccaagggaagaatgggcagaggtgagctgtgggcagccgtggaggatggtccacggtgtggctgccagagggcatcgggggccaggcaactccagaaaggagctaggaatgttagagaaaactgcactaacagccagcatgcgtgaagaactgattcatactacaccgtggatgaacctcaagaacattattctcggcaaaagcagacagacacaaaaggtcacatagcaaatgcttccgttgatatgaaatgtccagcactggcaaatccacagagacagaaagtagattagtaatagccagcggctgcagacagggaaggaggggagtgatgacttaatgggtacagggattttattttggggtaatgaagatattttggaatgagacagagctggtggctgcatagagcactatgaaagtgctaattgccattgaattattcacttcaaaacagttaatttaacgctatgtgaatttcacctcaataaaaaaggtacaaaataaaaagcctgttttcctggacccatgctctgtggagtgggcaaccagcaggtagagacaagaaggaaaatgggatgtcatgaccccacttgaaggcaaggtcactaaggctcagagaggaccagtgtcttgctcaaggtcacagagcacctgtgtgacacagcaggacacatgcccaggtctgtctgactgtcaagcccacacctttcctgtcaccacactgtccttctggaacattcttcccctggggagagccatggcccttccacctgccagctctgagggggtattggcctctgtaaacaaagtaataaatagccctgtggggcaggccgtgcagctattagggtgaccctgaaacgttcccagaaaatgccagtaagaccttggccacctaacccggaatggctgaagagttaattttttatttgtgataagtgtggcgggctcggtgacagctccttgagtggtgtttcctgtgactggtctggcgttcaaacattaacctctaccccagggagcttaaccattaaccctgcaccctcaacggagagccccagcagcccctccccccacacaggtgtcaggatagagtctcggtgctgggagaggccccctggacaccagatctaggccttggccatttctcctcttagtcttttaggggatttttcctcagacatcacacccgctccacactcccagatggagcccttggccctggcttctgaccccctcagtggggcagatctgaagacttttccagcaggcagagtccttgggcctctttggagctttaaaaccatgttttcaaagtaacagatcccctttcctaaatgcacactgcagaaggtcactatgcaaaacagatcccagtgacagctgtttgtgatgggtggggggccagctgagccaccctttcacccacctgcacgctggccctccttggttcagccgccagggcctggccagacaccacagctcttgcaaagccaggggagcccttttcttaagcagagtaaggtccggaagagaggggtatggtcagggcttgcccaggtccccccagtgagtgtgaggcagaagtcaggcaggaatccccagtgagctttctcagccctggatgcacggtcaggacctggcggaaagcgctggttcactgcatggggagccttagggaagaaagatgaccgattctgctcagatcggtcaacctggaattgagacatggacgtgggtgcaacttcccggagtaatgtgaatgtgcacttggcattggtaaggtgactgggcaacaggttcgcagaagaggcgccacccacaggcagggctgagggcctaagtgaacaccagccattcatggcagaggtcagcttggctgcaccgaagggctgggacagagaggccatgagaggagcttctgccttcttcaggtagtcattcacttattctccacaacagcgtcatgaagttgatcagattattttccccactttaaaatgggcacattgaggagtggggagaatcctctagcccaagagccccataaaggaagagtggcaccgactccggctgactctatttgctttctgcctggcattcagccctgctcatttcgtcagatccagcagtgagtggcctcacagcagaccctctgccgccacggggagagtcttttcctcgaaccgtgagagcccaacaggaatgctgggtgcccagaggggagcaggaaccccatctggcgtggtcactagtcagagcctgagtggggcaggcagagccggctcaccactccataggggaaggccagggaagacagggactcacctctctcccccaaggttagaccctggaaagcatccctccaccggtgaccaggaccacgttgctcgcctcagctaatttgtgacaagttgggcagctggtggcatttgtgtcctctgcgggggcctcacctgcctccaaggctccacctcatctcccactctctccttggggccagctgtcttttgttttatcctttctccctgctctcagtcatgtatctgccctcattcactcagtaagtcagtcaacaaacacacactgaatactcggtctggcaagccctgtgtcaagcactgaggaagaaagaaggcgacactgtagctgcctcaggctggggcagggacagtccaggaaacacacctttacagtgcagtgcagaggtgcgagacgagagagaaacagtatcctgcaggagtcggggtaactcgcttgaccaggggagctatgggcattcagacatcattcctagaggagtctgaaaaggtgggtagcttcagagggaagaagatggagaatggtgttgtagcagagcagtctgcatgtgcaaaggttggaggcaggaaagaaatggacaggcaggaaattgcaagcaatttggttgacagttgagctgattggcagtgtttggggtggagatgtggacaggggccaagtcaggagctgggcctcatcctggaaccactggagaacagtgggacattttaaacacatgttatgttaaaataatcatcccttacttctccgtgtaaacgaaagttcaccatcagccccaccagagactccgcattctaggccctatctcacagggctgctgtcattggaatttcaggcattgtccttggggacaggaggtgggggacacccacaatttggctgcacctctggctggccttgttggtgccttgcttcctgctgtcccagacgcagtttccgggggtagcaggaaatcagaaggctctctttggtgcccccatgaatgccataagaccatggtctagctccccaagtgcagtcggagccagagggaaagtgcagtcaggtagagggaaagcaaaggctcaaactgtgggagagatgtctgttctgtccctgtcccttgcgcagtggccgagtgcatgggctaaagcacatttgcagcatccatgctgctgcctccgctgctcacaaaccctcatgttcctctgcttccagctgctcctgacaaatgagggccgggagtgctccaggctggctcctgggttctcttcccttcccgctcctgcactctcctggtgcaacctcagcctcacctgccgcctatgcggaggtttatccccagccttcatccccactctgaagtctcacctctacacgtctaaaactacatgtgtgattttttatctcctctcctccaaaatgctgatcttcctttattccttcctccaattgctcaagtcaaacacctgggggccatcctggattctccatctctcacctcattcccagtccagctcatcaccatgtgtggtcagtgtccccacccacacagctctgccacgggggtgtacctctccagcccttgcagtggaacctgcttgtaactccttagccttaaccttttctgggcacaccaatctcactttcacccactggcccagtatccctttgtctgggggctttctctagctactgattgtccctaagcacagcaggctggaagtgcaagggaatgaaaactgctcgctctgaagcagccccatctctgactgacagggcactggtggatgcatcctccagctcctgtgcgacttggaggcgtgtgttccacaagtgcccacagtgatgatgcaacatttgccagctttcttctcttccctgtctcggttcccagtcctacagatctggcctggaatcacctgcttctggggaatccaaacaatgacatcgtatccagtcccaatgatcatatctcttgcctagaccaccaggctcacagcgagtctctctgaactactcatgtccttttccagttcacctcccacactgtggcagaggtgatcttttcataatgcagacggtaacactcctggcctcctaagactctccaaggcttttgcttctcttaggataggatgaaaatcccccaagggatgatgagcccctgtggtctcatcctgcagcaggatccctcatgtctgtgcccagcaaccaccagtcaggctccggccttggctcaaacgtcatttcctcaagaaagccctcgtggaggcccaggccaggtgaagcctcctgattagacactcaggcagacccacatactgttcttatctcatcattttacatgtttctttctttctttcattattattaatattattttttttgacagagtttcactcttgttgcccaggctggagtgcaatggtgcgatcttggctcactgcaacctcagcctcctgggttcaagcgatcctcctgcctcagcctcctgagtagctgggattacaggcgcccacaaccacacccggctaattttgtatttttagtagagacagggtttcaccttgttggccaggctggtctcaaactcctgacctcaggtgatccacctgcctcggccctccaaagtgctgggattacaggtgtaagccgctgtgcccggcaatcaatttctaatcacttgatccatgtctccctcaccaggctgagtcatggggacaatggcaaaggctgcccactgccatccttctcttctttcttactaggaggacctggttttgctccaggtggctacatgcacagctataaactcaacctgcaacatccattgcagctggggtggccatgcagtcctattccagctgatgaagtatacacagaagtcactggagacactggagagtgtcaggaaagtctggcttcccagtatatctcatccttccttctagtgagtttcttctacttcctgccagaaatgcaggtattcttctctcctccctgaaggtacagcagccattatatgaccatgaggacagaagccacacattcaggcaaaagagaggaatctggaatatggcaacatcttggaactttgctccagctctttttgtaatatgcaacaaataaattcctgtctggtgaaaccagtgtatcaggctcctgccacacactgcaaaacgcattcctaagtgatgagagcacagccgacaacgcttgtttctcaccactcacctgacaccaccaagtgctaaataagcattctttgaatgaatgcttttcatttcacaccaactccataaaatagatgtcaaaactgaggccttgttcaagatcagtctgtctaatttaaaagcctgggttctgtttatttttctttcccgctgtctttcttttcaaatggaagaaaaatcatataacataacactaaccattaaccatttaaagtgtacaatttagtggtttagtaccttcataataaaatattgtggaaacatcacctctatctagttctaacacatttttaccaattccaaaaggaaacctgtacccctcaagcaatcacttcccattgttccttccttcagccttggcaagcactaatctaatttgtctctacaggtttggctcatctgcacattttatatcagtgaaatcatacagtgtgttcctttattttacttttttaatatttatttatttatttatttatttatttatttatttatttatttattttgagacagagtctcactctgtcacccaggctggagtgcaatgacatgatctctgcagcctctacctcccgtgctcaagcgattctcctgcctcagcttcctgagtagctggaattacaggtgcccaccaccatgctggctaatttttgtatttttaatagagatggggtttcaccatgttggccaggctggtcttgaactcccgacctcaaataatctgtgcaccttggcctcccaaagtgctgggattacaggcgtgagccactgcacccagccacaatgtgtgtccttttgtatctggcttgtttcacttagcattatgtttcaaggtttgtccatgctgtagaacatatcatcacttctttcttttaaaggctgaataatatcccattggatggataaaccacattttgtttatccattcgtcagttgatgggcattaggggtgtttccacttcttcatccttgtgaagggggctgttatgaacatccatgtacagatgtccatttgaaccctggcagtgggttc

SEQ ID NO: 37948 - DNA, 1779 bp, Homo sapiens
attttgaaatatttatggatgaaatatctgggattttcttcaaaataatacaaggagtcagggaaagatacggatgaaacaggattggctaggatttgatcatcgttgcagctgggtgttgaagatctattttacccttcggtctgcctttgtgtacgtttgaaatttaccgtaacagaaaatgtaaaacaaactacaagaaagtgggcgtcgtgagtgatgcctgtcaggtgaagccccgcccactggctcgggcggctccgccccgtccgtcttctctcccgcgctccgctcttgaagggttccagtgtgtggtgtttccaactttctcatgtcccctcgggaatccattcgtatcccatgccataagtcgcgctgtctattcttgaccaggcccggcaaactgctccgagctcccaggaatcacccgccgcctccggtcgtggcccgcagcagcccggctcccccgccctggggcgtttggtcgcgcccggccgccggccctgggagcgcgtccgcgtcgtcatggcgacgctccgagcgggcgccggcgctggcgccggccgaatccggcccgggaaccacctccagggtgagcggccagggacctggggcccgggtggcccagggtcggccgctggggcgccgcagcctagctgctgaggcgaccgagccccgggtggtgtccagccgcaagtcggccgcggcttgggtccgaggagagtcgggcccagagggtgacctgaggatggtggggggagcggtgcgcgggcctggggcgaccctgacccttagcaggagtggaatgaaaggtcgcggaggggaggaggcgcttggccggggcgagagggcctgcccggggtgagagaatggggcgagggaacgagggtgcggcggtgagacccggagccaggcctaccggggcggtgggcgagccggcgtgtgggcggcgtggagaccgcctggctcctgggcctgcctgaagcacaggggatgtgaggctccgggaggagacgggctgcaggctgatcctagggctggcgttgaagggctggagggaagggaagcaggtgaggagggggccatgcagccttcagcgatgctatgagaggtggtgcgaggggaggggagaagaggggaggggaggggagaacttctttctgaaagttattgttaagcgccttccttcatagattcactgcctgtcgcttgatgttgtccgtcttgggagtctgaagctatgggtcttctccagaaaaaacaaaaccgaaaaaacacacaaagatccacactaattaacattccatttcagaggcttcgccgaccagccccatggcctgcgcaagggccccaagttaagagatttagttgtgcaatatataagggaatgtgagatttgtaaaatgttgttacagggttataaattattaacaccaaatgagtaatagaagcagtgattgctaaagaatgttaaagtgtgttgggatcactgtgaacttcatgaagaaagtggaacttaaaatgagtgtgttaagggaaggcaaatcggacacagggttcgacatgaatcaagatccacagagctggaatacccccatgtctggcacctggctggccgtaggtttcaccacctcctcatcaccccctcctcatcaccctgttagcagagggatggaggagggtgactctgaaatgccagtgtcctgtaaacagtgcctccaaatgttaaaggcttccatagtcaaatattctaagaaactcatttggagaaatctctga

SEQ ID NO: 37949 - DNA, 1581 bp, Homo sapiens
gttctgtggagaaaaggcaccgtttcacctctgtaggagggtgttggaggcgtgtggaggagaggccattgggggtagcccaaaagccaagtaggaagtggggagaagggatttggggcccagagaaagacatgcaggggcttgagttgagccaacaaacggcgtatttggaggctggtttgcctggatggtagggctttggagcgggtaatggagaaggtgagacatgtgggttgggacaagaatatcaacgtaaggaacgtgcatgtgattcagaaagcagcaggaagttaaggaagtatttttgagcagggttatgatgcatttgaggaagatcaacttagtggaattttaaaggataatgtggttctcaacattttctttcattagcatcccttagggagacatgaatgagagaaactaaatactaaggaataagattttgtcaggtaggattgagctttggaaggttgtagccatcacaatgtctaagattcctttgtcctcccaagaatcagttttcacttccttcccttgtgggtaatttcacccccactgagaattcgtggggagcaagggagtatggtttagttattgaaaaagatatgaagcctcagctcggcgtcattctgctgcagaatggagaccatgtctgtctttcatattgctgcttccccagcaccttgtgcagtgcctgacatgcagaaggcacccaacaagcccttgtgagtgaaggatgtggaactcactttaatgtaagagttgtgaggttattagaagagtggcagaggctcattaattccaagtaaatacaatgtaaagtctaggtggtcatactgcttcgatcagacattaaatcaaacaaatagataaaagtaaagtgatttcatcttaataacattctcggaaatcttgggagagccagccccctgtttccacggcaaagtgaagcggaagcttaaggcagttaccttgaaattcttgccaaacaaggtggaaaatccaacaactgcttttatcttggttttgctacagcaaactatgcaaattgcccaagaatggaatgactgaatgtgtatttaaaaccacaaataaattgttcattaacatttcagatcaatccagatctggctaaaggatctgaaacattttgcttgcattcatgttgaaatcagtgtttcaatttactttaaaatttgaaataatggtccctggttttctcaaaaccaagaccccttaaatttgtttttacctttgtggagtgatttggtcctggaaattattaagtaaataatccatcaattttcctttaagacaaccagtgttgctattgccagcccaaaacaaaattgttagcctaaaaagtcttaccttaaataaatgaacagtttcttctggctttgtcaaataatatttgtttttacatcagtttacattagagacctattctattacagccttagagaccctgaagatcttgcatctcaaaatcagggccatgaatcgcattggcttctcagtgtgtggggttgggggaattgaagccacagtataaacatagtacgtctttctagagcatca

SEQ ID NO: 37950 - DNA, 1204 bp, Homo sapiens
ggtatttaacaatgagaatttagtttaaaatgtaaaattccacccagactctaataggattctgtctctttaaatatgaagaacttctaaataaacttcatattagccaaaattccttttgactcaaattcatctggactgtctttgatttatgattatggtggccatgcaaactaatttgacatgcataatatgcacagcagtagtgaaagcaaaagttcagcaattccactgaaaactgtactacttgcactgctatatctgcttctgaattatggtacttggaattttgtgcccttaaggaactgtttgtttttccagactggctaatgcatcaggaacttggcttcaaataattattattaaacaaataccctgacaccttttctatgggacttatcagagctgtgaaattaattgaaaattgagtatatgtaacaaatgggaaaagctccaggagtttttgtttgtttcaattcaggaaaatgcaaacatgcagcttttagcagaggagccctgagtatcagactttgctttgccgggacagctttgagcagactcctgggttactgacctagggcaacacagcctgtgtggctgcgtgagtccactggcgtcatcttcaaagaccatatttgggcctttcaacacttcacatcgcgcattacccaaggcctgcttaggttctgagggtcagaaatacctcacacgcatgtgtaactaacttgtaatgttagttttatctacccagcgctggtagaatagctgacactcagtggggcctgagcacctgttagcatgaattgccttaccttcatatattctgtttttcagaattaggaaacatctcacagagtgaagattgactgcatacctctaacagagcctgatttaagacaggatttgtgagtttggtagacaatcctatgaagttttcattttactgttgactgaagaccatacactgtacggtgacccttattcagaatttttatcagaaacctagggcccctgaacatgagtatataaagtctgatgcaggcctataccctattggggatctcatgtgctcacagtacagctacgctcctctcaaagagacatcatagctaaggaacaatgttttaaaaacaagtaccagtgcaaattaattagaaacagggcactgcctgacgttaggaactctgcattcagagtgtagatc

SEQ ID NO: 37951 - DNA, 2441 bp, Homo sapiens
ggcgtaagccaccgcgcccagcccaaggtgtcttttttacagttagtttatttggttcaggatcccaataaaagtcacatattgcatttaactgcaatgactctcaagtctcttttcttttgagtccccctccttccctgtttatgccattgatttgttggataaaccacgtcatttgccctgtagaatgtcccacattctggctttggctgaggtcacattgcactatttacatacaaacaactgagcagccaaaattgggggggggggctcagaaacagaacagactttaataataatagctaatggctaggcggcacaaaccgtgaggcacaggttacatatacaccaactcattttatcacacagctagtaaggggtggagcccggctttaaccctaggcagtctgttttcaccctctgtaaaggattgggcatggctgtgttccaagaaaactttatttacaaaagcaggtggagagctggatttggtgcacagattagatgatccctcatctacctcacagagcagctggaaaggagaaatgacagatggcacgctgctctgtggactgtacagtgtgaagcacctgggaggagcttggggggcagcgaacatggtaataaacataaagctcagagctccccgccaagggtgagcgcttccagacggagaagtacacgggccggccagtcagatgggcatgggttctgatgggggccctgccataggccgcctggtgacccacgcggggctgccgttccttcgggggttcaacggcatgatcaaagacaccgggatgtgtgtgtgtgtgtgtgtgtgtgtgtgtgatgatcaaagacaccggggtgggtgtgtgtgtgtgtgtgtgtcatgatcaaagacaccagggtatgtgtgtgtgtgtgtgtgtgtgtggcatgatcaaagacaccggggtgtgtgtgtgtgtgtgtgtggcatgatcaaagacaccggggtgtgtgtgtgtgtgtgtgtgtgtgacggagtctcgctctgtcgcccaggttggagtgcagtggcgtattctcggctcactgcaacctctgcctcccaggttcaagcgattctcctgcctcagcctccccagcagctggggactacaggcgtgcgccaccacgcccagctaatttttgtattaatcaaagacgcatttcaacgcagaggaggaagtgctagcggacccaccccaaggtgcacagttagagaaggagcctctgcggcggccggagccccccacggacatccccttgaggcccccccagccacacccccaagagtcccgcccccagacccgtcgagcgagctcccctccctgaaatcctcgccccgagatctccggccggcgagctccgccccctgaagtccccatcccaagatccggggccggcgagctccgcctcccgaagtccccgcccccagatccccggccggcgtgctttgcggccgccctgccgcgcgcacatgtaggcgttccgagcggcggcggaggtgagcgcacggacgagcgggagggacccttctccggcctgatgcgacccggtaacgcgttcagactgcggagtagcctaggggcccagagtggaagcgtagcgaggacccctctgcggggctcctgcagcccctcctcccccagccaccggcgggctgcatggtactgtgttctaggcccaccccgcagcgcgatggccctagggacgttggactttggtccagacctttcctttcttagcctcactttccgcattgggaaaaaaaaaaagcccgaatgataatgattcttataggagttcttgattaagataggccaagcggtaccctgcgtttttgtttgcggcaactcattcgttgctcattaagcacttttcacggacaggaatacagtaagtttcaatcaaagtgaaataattgtgaatttttactgacgtattcacggatgaagtgataggatgcccggggatgtttcaaaataaaccagttggacggaagtgtggtggaaagagaaatcaaacaagattggccatgagttgatgggattgaagttgatggatgtactattttgtctactttggtatatgcttgtaatttggcataacaagttttctaaaacaaaaagtttgctgtggacacctgactatgcctgtgttagcttgctagagctgccatgccgaagtaccggagactgggtggcccaaccagcagaaatttgtcctctgggagttatggaggctggaagttcaagaccagggtgttaacagggttggtgtcttctgagacctcccttcttggcttgtaggtggtagccttttccctggatcctcacatgatcttcctgctgtgcctgtttgcatcctaatctcttcttataagtacaccagtcaaattggattaggatccatactgatggcctcattttatc

SEQ ID NO: 37952 - DNA, 1268 bp, Homo sapiens
caggttcctggcccagagcttcttaaaatctttagaatttcccaggggataggagtgtttttgttattcatgagctccatggattacacctgagtttatgctgagatggctcaggattaagactggtcaccagaaagaccaaccacgtaattagagggttggggttttgaaccagccctgcctccaaggagggaaggacagctggagattgagttccaccacatggccaatgttcagtcatgccaatggaatggcactctgataaaaactctggatgttgaagctcagtggatctcctggttaatgaacacactgatgcactgggagagtgatatggcccaattccatggggagagagcccagaagctctgcattctagaagctcttaggtcttgtcctatgctcttgattgatattctttattataaaactataatcataatgtaggctttcctgagttctgtgagtcattctagtaaattattgaacctgagagggattgtgggaacacccagatttgtagccagctggtcagaaatgctggtggtctgagaccccaccttgtggttggcatttgaagtgaaacagtcttgtaggggaccgtgccctttaacgtgtggagtctccactaacgccgggtatttgtatttgcatctggggaatcatattacagtacaccagttggtgtcagaacagttggtatcagaagagtcagcctcgtccagagtcacagaagggctgccagcagcaacatacctactagtctatttccagcaagagagatagaagagcctttccccaaaatatggaattgatgaccattccttcagtcttattgtgcccgcttatgtcatcctagacctaagacaatcaccaggagaatgtcacataatgattggtttaagcccagattcttaaaccaagcacaggggattattgtgattggctaatcaatcttcccatcctgcccacaagaacctagaaatggggtcattgacccttggcccatgttagctattttgaggagtggtaaataattaaacaaagctgacgttctgttagaaagggaactgggggccagctgtggtggctcaagcctgtaatcccaacactttgggaggccacgttgggaggattgtttcaggccaggaattgagaccagcctgggcgacatagcaagaccccatttctacaaaaagttagaaaaaataagccagtatagtggcacacaccagtagtcccagttacctaggaggggatacgtggac

SEQ ID NO: 37953 - DNA, 735 bp, Homo sapiens
ctagaatgttagtataaaagcaatagaatgtcctctaccacacacaaaaaaaccaacctcttgatacattgaagatgctttttcttcactgaattgatccagggacaaattgctttgacatcattgataccaaaataattcagaccaaaattaaatctatcattctgtaaattaaggagtttagaaattacttcaaagagattgacatttttgcctttttcaaaattcccatttcacaatgccttcattttggaagagcttcaagccagaggcacttgtggctgcccttcaggtaaacttgacttttagctggagcaaagtgctccacagtcacagcatttacctagttcttcttggtttggatttttgccaatctggcaacaaccataggtgccccaggatgactgtagtggtgccccaggatgactcagggactggagtgtgtgctttatgtcaatacagacagttctctcactgcttggtctcaactccatgaacacttggaaattttacccctcgcaaagagagggagaataagtgtacaggcttttagatcatcccttctctggtctccaaaatcctttagggcagggactgtgttatatttacctctgcaaacccagatcctggcatgatgcctggcacagagaaggcacttaactaagccaagtgctggtgggtttagaagtcctagtttatcttcttcttcaaccagaattggttaagaatacgggt

SEQ ID NO: 37954 - DNA, 790 bp, Homo sapiens
tctcccttaactgactagctaaggcagacaggtacctaaccaaggtctcctgttggggaccaggttagataggactcacatttcactgaaagcctgtatacctttgtatgtcccacctcaccagcgtaggcaacaaaatcaagtcagtttaagtcatgtgcttttttgaagttaaaattcataccactctgagctctacctagcgagtagagtccaaccttctgttgaggttcttctccctaggtatccccagtgatcctacggttactcatttcttccaaagaagtcctctccagttactgatagtgggtggctggtgagtcagccacagtgcctagtcaaagtttcttcttcacggctgctgcctggggtcactgccaaggcccatacaggcaagaacaaatgcttgttcccttctggctgtagctacccagggttaagagaggtcctaccattgaccacacagtgcaaaacggccagtcctcgcctgccaacatcctccaagtgtggatacaacctttgctcttactctcccaaagcacagtcaagggcagactgcagacaaggaaaaaaaaacagtcaatagcagtgtctgccaatatccagtaatgtttgaggccacttttgaatgaaaaaaaaaattcttgctaacttccaactgttaagtcattttaattatgtctcttaattatacataaactttaggtaataatttcttattcttatagctcacgtctataaaactaaaacaattttagaaattaaattcacaaatttaaaaaattcaatt

SEQ ID NO: 37955 - DNA, 2163 bp, Homo sapiens
tttataaaggtaggctctgataggatgctcaagctaagagcaaggaaggacaaagaaggcgcctggcgacagaaaagggcactaacaaaaattgggcaaaaaggaagtgtggcggtccccaaatcccttcttcctccatttcagctgagatcattcgccagtaggcaactgtggtattaccaataagtttgtatcaccaataaaatattataatgcacctggctaaaaaccctggcgtgataacaccaaattcatgttattagaaggaattaaattttaaaaagcacaccgttccaggcacacagaaggagcccccgaacgtttgttttataaacgcaggttggttgctgaggctttgttttggagcctacgtttaggagaggaaatgattcaaaactgccccccaaaacctatatcctccaggagcactgaggttggggcgacctgctgccaactggtctggttttcccttttaacacacgcttcttgcccactatccggtccctgcggtcagtgggtgcagcaggggtcgcagtccaaacaaccaatcgcgacgcggctgcggggcgggggccacagcgctccgcctcccccctccaatccgccctcccaatcctcctaggccgctctctctcgcacctgcgtgtccctctgcgctccgactggtgcgacttctccctgcgctagcgaggcagggttttggcctcgcctctcgcgagatcgcctcctgttgctgccgccgccgctcctggccactgactggcggcgcctgcgcagccgccatgttcggttgctatgctgcggcctaggagagggggtgtgcttgagggaggaggaagagatagaggaggaggagggggaggaagaggaggtggagaaggaggggggtgactgagctcctcttgcactctcacacacaaacgctgcccaggattacccgccagctcacgccgcgcagtgcgcttttccgctcctcgcgccccaccaccaacattgttctctcaggactcctgggtcccaggggccggaattgggcctgagcgggagaggaaagagacttggctttggccgcggggtcggaggattggggccaggccccctcccccacgcacttttgggggtgtggattatctcatccctgcagggaggtaggagaggtcgccggctgcccgcctccctgccacctccccagcggcgccggcccgcggctgcccagcagcatgaggtggtgctggcggctccgggtcgtggcgcgaccgctgcggcggcggctgctcggggggcgctgaggtagccccccggagcggcacggaggacgcgcttctcctctgcgcgccggggcctcgaggctttttttctccagccgagaggacgcggctgtgatatacgaaggtaagaggttctccggtccccgccggcctctcggccctgcacgttgaacgggaggctcttacctgcatgtgtggctcctgggaggtgagccaggtggggcaagccggaggtacgaggatgatttgaaaggaaggaaaaaaggacaaaaacaaacaaacaaacaaacaaaaaaacgctttctttcctttcttcctgggacctctgcttttgcgggggttatagttggaatctctgttatgggtcagcgaagggccaagggatggaataggtgcggagatggaatgttcccagtacctaaactctaggtaaagctttggaatcttgagttttccattgctggtagaattccttttttttttttttttttttttggctcatatgagcgcttcttgcacgctgcatgagccaactattcctaccattgaagttttaagcctgttatgattctaccagtatatacctgtatttgggaatctgtagttgagccaaaaaaaaaaaaaaaaaaaaagttgagatgtgggtaaacagtgatgcatttcgcagggtttccataaaatggaacagcttacagttgcacaggtgatgtgtggatgtttctgcaaaacttagggtggaagattttatgtctgggcttgcatcatgtagtgacatcagtatgtacaaggacgatttgtaggatttttcaaaacgcctgttctaggataacttgttatgcatctgcaatatgccagctgcttttcgaataagaggtttcagtaatactaagtttct

SEQ ID NO: 37956 - DNA, 1144 bp, Homo sapiens
gcttactcattcaaacatcccaaatactagtctttcttctagtttagtgtgtttcctttacctaattgtctttaagacagaagtgttaggtgttttaaagtttgaatccttaaatgcctgagtgttttaagagtttttttttctcctccatgaatgttaattttctaggtatataagtcagtgtttcaaagaattttctttcacaactttgaagctacagcttcattgtctttaaacatctagtatcgctgatatcactgtgatttctgttgttttataggccatctagtttttatctcttaggttaaaaattcagaagcaaagattggtcaccatttctattttgttttcttaggaataataacaataatactattaggttgaattttgaggatggttaaaatgaagggttgtttttttttttaaacttcttggtttccccaacaccttaagttttttaaaaaagggaagggcctgccaaaattaaataatttttcctcctgttgtcattctacagtgctttaaaatacttgcatcaatgagtaatatccaacttcctgaggcagcataatcttcccgccccttttggctactccaaagtttacatattttgaattggaatatgacttccttaaaaatttatgtattaaatcttctggatggagcagttaaaaaaaaaacctctttttcaaagcagtggtaactttagtttgatgatgaactatatataacttatacctacaattcttattctggtgtttcaaaatttataactgttttccacctaagttttaattgagaaatatataataactttgccttttaaactacagcttatattttacgaaccttttatttagtgaatttttttttttttaacttagactttgtgtggacagtaatgacctcacgtttccgattgcctgctggcagaacctacaatgtacgagcatcagagttggcccgagacagacagcatactgaagtggtttgcaacatccttcttctggataacactgtacaagctttcaaagtcaatgtaagtattttgtgtcttttaaaaaataatctctggctataagtctgaatttagacatatatgtaaactaggattattaaattatagtacagtttgaaaagtctt

SEQ ID NO: 37957 - DNA, 606 bp, Homo sapiens
tatggttgttcccatgacctttaaatttattgtcaaaacattaagaatttcctttactgtctcttataaaggtaaaaggaaatgaaaaaaatagtaaagctaatataggattttgtatcctgtaattcaaaacattagaaacactgagaatttaaatgttttattttcttgtgaaaactcattatgagtagtttaaacggtgcttgcctcctccccgtggtacagcttagaataccaaatgagcttcatttcttgccttggcaaattgtcataatactgtctacttgacacactttcagtactttgtcctctgaacttttgatgttgtgaaatatctccaaaagttcctttggctgcatatctagagtctctccaacaacagtgttaacattcccatggtcatctattgcttctctgactctatttatggtccattcaaacttcacctccagcattattcactttgctgcactttcatcttttgtgatcaatttcctctttagatttaggttattcattttaatatgggtttatcactgggagactaggaggcagcccaactacatgctttcctgtctgcacttgaactgaaaacagatgaccatc

SEQ ID NO: 37958 - DNA, 1582 bp, Homo sapiens
cagcagagatttaaatgtattttaatccctacaaaggagaaaaagggaggaaatacgtgacaggctctcaataagtatttgcgaaggatttaatctcttgaacgaatggatgaatgaatctagcagccagctccaccagcctccttcgtgataggactaactggggtctgtctgcggacgggcgcctcctccgcgggcggagggccgcagcgggaactgggtttcggcagcgcccctttaaaccagccgcggacgcccggctgctggcgctagttccagcccggccgggcccggcctcgccggtttctctccagtcgccgcgccggccaatttccggggcggtgtcatcgcccgtttaagagcggagcgctccgccctgggggcggagctgggagggagctttaaggggtggacgggcgggaggtcggggtcctccggggattagagccggtgggctcgttgtgggcgccatttctcggcgtctaccgaggagccgcccctttctcagccttgctcggctcttccccgctctggtcgccggggctgcgccgtccccagctcaggtaagcgcgaggcccggcggcggcgccgcagtacagtccgctgcgctcctagccgagtggacccttcctcgcccgcgcctgcggtagcggccttgtccccggggaggcgggcgggggccgcacccagaccctagggcggccggcccctctctcgtcgggccggcagggcattaatcccgccggagggaggggcggcggcggccaatgaggcagggccgccgagtttcggtcgataccgcgcgacgggccggggcggagggcccggggcagccgggttaatgtttgccgagcggacgcgctccccgagccgcgggtacccctcgctggtccgctgggctgccgtccagcgggagagacaaaagtcgcaagggaaggggaaaaacgaactgagtttgtgtcactgtcttggtggacttttcgagctaacctgtatttgagaaaaacttcagtctcttgggaaaggagaggcaggtgtgttcccatgaaagacgaggtctgaaggtcccgccccgcccccacccgggacggttgtcgtgctaatgatgggttctttggtgtgtaaatgttaattgtgtctgtggttactcgaattctacctaagagcgagacccaactcttaaaacgtttggcaatattttagactaatattaaaagtttttaaagaattacggggaaaattcccataaccgtgtacatttgtaatgtaacccacaactgcattaactcagtttctaacataacccgttgctgagctctagttaaccttgttggattatttgtgcatgtaatatgctgtgcaggctttagaaaataggttaacattattcgaaaacgatatgcgtaactgctgttgaattactcgcttgcattttctttattgggaatactgggacaaaatatagtgttaccttaaatggcatttgctgtatgttatattgctttatcaaaaagcaattaaccaaccatattgtggccaccagtcatgtaagagtatacatatttcatgactaacttttggg

SEQ ID NO: 37959 - DNA, 1113 bp, Homo sapiens
tgttagatacataggctgtcctaattttctttgatgaaatttcttgtaggtaaatctacacacatccataatgatttctaggtgtagaattgctgggttgaaggcacatagttatttttgagacattatctactgtctagtcagattgcttcctggaagggttgtgctcatttgcactcactatggtggatgagaggctacatgaaatagtgcccaggtgaccagccatggaatataggacaactcccagttccatggttttggggagaaaatctggggcatgaaaactagttttttctcttactcagtatgtgatttgcatcaggctgtagtaggtatttgtgtcagttaagtctggaatatttggatattggatttctgggctggacagtgatggatgaactgtttactgctgtaggttgaagaattttctactgaaagaaaattgaattgttttttgctactggcaggcctagtgttctgttaatggaaggatgcagaccggagctgttcctattcggccatcttgccagcctagattgaaagattaaagattgctagattgaaataggcttaaaagtagatgtccaactgaatttattaaaagatgagagatggcacagtagcccgcgcacttgaaatctcaagaaaatattgcatagcatttaaaaaatatttgctgaacattttatttaaacatggaaaggtattttgctgccacactgatagttcagtgaattgcacttttggatcttggagaatggagagaagcagctaggcaaataattggcaagaaaagtaaacagttacagtgcagctttgtttacccactctgcctatctgcgtttctgaaattggattccttggctctgtgaactagttagccttcctttagagtgcttggaattgaaagcatgtcagagagaacacagtcacgtatatcttagttggatgtgtgtgtcctgtcactgttaggacttggtggcataaaggaattaataatgagaagtgagctgggaatggtttatcagtggaaatatctggaataggtttttaggtctatttgtgtcatggacatttcgaagtctcatagtcacaatgttaacatttttt

SEQ ID NO: 37960 - DNA, 1943 bp, Homo sapiens
tatccaactgatagccatggtcacgtgtgttctccgctgctcggcaaccacatccagggaccgcaggaacaggagggaccagacgatgtaatagaggacgaccaggcaaaggaacgacatgaggatccacaggggcacaaacaccaccagccacggccagtgaataatcctgtccagctttagggcgatgaagatgaactgcaggatgttgaccgagcacaggatctccagctccagcgacctatcgtgtcgaaagccccagacgcaggcagccacggacacgggggacacgaagaagagaggcatgaagaccagcagccagaagtgggtgcccctctccaccctgtcgcagaccaggacttcgaacatgagcagcagcaggtggatgcccacagcgatcagcatggctttgaactccacacaggcctctccctcggtgcggtagcgagggttgcgggcccaaacgcccgcgcccacggaggcgcctgcgacgactagaagcttccacagccatatgggggcaaagacggcccagtagctccattggatgatgccgtccaggcggaggggcagcagcaccgagaagagcagcaggcaggtgtagatgagaaacttactggggttgaagtcctggaacaggcccctggggttcatggcggaggccgccgcttgcctgcccgggcctgctccctcgcgacgctcggcgctcgcgtctccgcggcttctccggccgccgcctcccgggccccgcccaagccggctccgcgtggacgaatgccgggacgaccaggaggaggttcggagcggcgaagcggagaggccggaacacgtgcacgcgcggtcacgtggcccggccggaagcgcgctggggtgtggcgcgcgcgggcacgggcggcgcggcggttacaaactgggcgctgcctcggtcccgccgccgcccgcgttcactccgtacccatcaagaaggcacctaatgcgtgtggggcccgaaggggcctggcgcgctgctgactccccaagcggcccgcgaccttgggcggacgcttccaggcgactccgggaacatggaggcgggagtgagctcacatcctccctgccggccggggcgggccctgcgggggcggggccgggtggagagggcggggcctgggcgttggcaccctacccatctctgccgggatcctcgcctccccgcgctcgccgcggcttcccgggaacccgcccggggctagagcgcccgcggtgaggctccagcaccccgcgcgcgcgagcagaggcggtggccgggctagtgcgggagtttgcgagcgagggagcgggtgccggtaactgaacggatgcaaggcgatgtgcatgagcgcagacctgtgggggccggcggcgggtgtatccctggctcaaaggaaaaggcccgcgcgtagactcagggcacgaggtgggggggccttacctgggatgaagactcgcggggcagaactccgcctggtggagcaacggacgtttctcaggctgcctgcgaagtggctgtgcagagatcccaggcggcagcggcgctcttgtacctgtccctctcactccagagtggaaggtgctggtgagggtgttagaccccactcgggaggaaactggatccagaccagggttgggggttgctttctgccccaggtcacccggcaggttaacagagaatcgcgtcgcagatacagggctcctaccttcaagtgtctagtcctcattttgacttatttggccctgtctctgtgttattctcgcaaaaccatgttttccttttcctttggaaaagggtactggaccagaggtcaagagatttgggttcttgtccaggccgtgccacccatcagctgagaaacctaggcaaattcacctctttctctctgggcctcagtttcctggtctatgaagttgggggacagacctgggtg

SEQ ID NO: 37961 - DNA, 1401 bp, Homo sapiens
ctgggcccgcccccccgtgcctggggcagcttctcattggtgaaacctcctccccggccgcccgctgcttggaaaatcagcctcggattggctgacagccccccgacgggcgtggcttccgaggagagggcaagaacggaagcgagggcgcgctctcgagaggaggggttgcctaggcgacgccggaggcgcgctcggggggtgggaaagcgagcccggcagctcaatgacaaatcggtggaggacggctggggtccggccccgggagggggcggggcgcgtttaagagctgcgggccgggtgcggacggcggaggcggcgggactggtccctggtaagggcgcggcgcccgcgggccccgggcggggtggggcgcgggctggggagtggggtacgccgcacgcccgcagcctcttgctccctccgtgccgggctgtggccgggcggcggcaggacatgtcgcgccccgaggccggcggagggcgacgccccggcagcggccccgctccgctccgggaggactccctgggggagtctcggcttcctgggctgcctggggctgaggaagtgggggcggcctccgcctctcccttgtagccgcggttccttccctatcccgcagatggctctgcttccacttcctgccgcgggcctcccgctcgggaccgtccacttcctcagtcctccggccgcggcttgggcagggtcagggctgggaagtgttgcaaaaacttaactgccctcggaacttgcacgcgccgtgaactgggcggtgttcctaaagggcttcggtttgctggttttgttttggtcctgtcttgcaaatgagcataaagttgtttctcccccagcctcctcccctttcctttctgataggggccagcggcgaaggggcttctaaggggaagcgcctggactgggcatcgccgtcccggttcttgccgcctgtgggagtgtgaggttaaccgtgctcggtgcagggttgcggggcgcggagcttgctgcgtccacactgcttgtgtgagcagtgtcctctctgtgctcatttccaacgagaaacgttggaactttggtgttcttatcaggtgagtcttcgggagagaagtgcttgtgcctggcggactgaatgaattggccgtggaagagacttggctgattgctcatctgggttacctgtgactcatcttcagcccttgtagaacagtgcactttctgctctgtcctggtttcctaacctcatttcttctgaagttttggggatggatggtgggcatggagtatcagaggggatagtgaatcttttagaggtgtcaatgactgatgttccaagcagagccataagattgttggatgtcaaagctcagaaccggtcaaggctcagaatgctccttaaacctggag

SEQ ID NO: 37962 - DNA, 2624 bp, Homo sapiens
tctgccaggtctggcaccagatagggcccaggaagtctgcttcccatgcaggagacagacaagggaggagataacagccaggcactgggctgagagcctcactcaggtaaaaaactatacagggcacaaccgggtcagggaaggcttcgccaaggaggagagactgggctgactctgagagcctgagaatgagtttgtcaagtagctggtggctgtggtgacggagacagccgggtgggcagatgcaagcaaaaccaggaggtggccagcctggctcaaggccaccatgcaggaggtgcttcccaggaggcagaagctcccgggccacaggctcccaggcagggcaagggcaacctgatgggagagcagagactctggccctggtggagattctaaggaggcagaagggctgccatctcggggatcctcctggatccctgcttctgacttcggtcggcaaactcacacccgccctagttttgcccgccagcttcgggtcggttcctccgattgggagggagggggcgctcggcttccagacttgcaggccgccgcgggcctgcggtcccggccgagctccacggtggcagggctggcccgagagactggcggtgggaggcgggggcaggaggccacgctccgcctccgacgtccccgattccccaatatcctgggaaagccaggatgaactcccatcgtgcttctgccttgagtctagcccgttgcgagggaacggggtacggctccgtgtcctgtgggcattgtcatgcggccccagacccgggtgggggcgtgaagaaggacagaggagcgcattgcacttggggccccggacgggtctgaaagtcaagtttccactgacagtgttccttgtccggtggcctgagaacggtgaccctagaaccatcctttatcgggttgtgtgaagagcctggcccagttgcctcgctgggcctcccacccagcccctgtgatacaggtgttactgtcccttcacagaagaagaggtaggcgataggaaaggtgaggactctatccaaggtcactcctgcaaagctggcagtggctgagcccgagtggaacccgggtctgagtgaagccaaagtttgtctgctggcgaaagtgggaattccctgggggtgggggtgggggtggggtactgtagaccctgccagcccctcaagccctgaggctcagtggcctccgggccgcgcgcctgggatcccgcacaatcggggcgttcctcctggcccagcagacgcagccgctggccaggcctccagtggctactgccttcccgccctccagctcgcagggtccacgcctcggccagtgcgacggcggcccggggagctgggtgagggcactgcagccccagagcggcagccgccggcggagcctgcctctggcatcccaggccgcgccgcaccccgctcgcctcgccaggctcggccgcgagggagcgccccgggagggccgggggcggccacggcggcgggagtcgcctctgctggttggggagggcggcagctgggacagaggcagggcctgcgcggcggcggggaggcgggagtgggccgggaggagcgcctgggtccagcgcctggaacccgtcggtgccgccggccgcccagctgggcaagggtccggggcgcccacgtggtgggaaagtttcgaggtagcaaaagtagcccggcattgcggggggtgggaggggagaggaggggaggggagagggccggctcgcccctccttctcgggaaggcagaaaggaaaaaagcggtgggaagcaggggtgagcgcggggagcgggcagccccaacctgaacagattccgctttctcctcctccccccaccccgggaagctcgagcggggaggtacggaccgtctcctctcgcacgggcaggacgacaccctccctcccccccttttttctgccaacgtctatctcaacgcgcgcgcacatacggagattgtgcggcttttttcccccttgggagaaaaaacggggagagtaaaagaagagagaccaaagagaagaactcctcctcggcgagctccgcactccgtgccgcggcccggcgcggggacgccgccgccgcccgcccgctctctcccggccctgcggcgggtgccagtacgagcgcgagcgagggcactgcacccggggacgctgcgagacttttcggcgctcgagccgacctcgccgccgccgcggcaggcagaagagacaggagcgagaagggccctgcctccccctcgccttcctcgcccggcgccccgcgcccggccgggccgcgcaggcaggcggagggaaggagggaggctgcgaggaggcgggcggagcagaggccccggcgaagcgcgctgcggccgcccgcccgtggatgcggcgcccagggatcctggagacaactttgccgtgtgacgcgccgggaggactgcagggcccgcggccgagggctcggcgccgcctgtgagcgggcccgcgcggccggctctcccgggcaccaagcttgctccgcgccactgcccgccggcccgcggcgaggacgacctgcccgtctccgccgccggcggcccttcctggcgcgaggcagtgagggcgaggcgctcaggtgc

SEQ ID NO: 37963 - DNA, 646 bp, Homo sapiens
tgggcagggctggactctctgtgacctgggaggccaggacatccagggccctggcagagtcgtccaccaggtgtccatcctcatgggccccactgtgggggcagtggagccacccagcatggagtgtgtgctgtccactgctatgggtcaacaggcacaggaatgaagccccgggaggtgctgtttgtcctggtgtttgtagaaagcaaacaatgggatgcctttgtgagtgctcacaccgcactgggtgcccgggagcgtttggctttcatgcctggctttcatgtccccactgagcaggcttctaccaccccaccctcaggtgagatcacatctccccagtcctcgccactgccacaccctggttcagaggtccctcggggcacccggaagctggcccttcgtcccagcctgggctggggctgactctcagagctgcgggtcctcacgtggaagatggacatgagactcgtgttctgaccgaaagagttgctgtcagggtccgaggaacttgcgggaagtgactgtatcaatataaccacactgtcacagtggctcatttttgtcgtaatgattaagaatgctgttgctctgatttggtagttaactgtcactccgaggttctcgaaaagacagtaaaaacaag

SEQ ID NO: 37964 - DNA, 787 bp, Homo sapiens
tggcccctgggagatgccccaccttttagggaaggtaagccatcaaccccaattccagctgcactccccatctgacccctgcctgcccttgccctgccggccccttctgccacccctccgtccctctccaggcctggagggaggggtgcctctgggagcgggcaccccgcaaaactccgctttctggaccttgtctggggccagcagctgtcatttgccgggcgttccgctttctccactgtaccatgctaatttttcgagggacaattttttgacaatgagtcctccagcccgaacagaaaccctttatggggccggccccagggaggccgcggcgctgccaaggcaaacaaaggctcattgctgccgcggaacatgcctgcgcctttcagggccgggttcgcagagcgcgccgcctccagcccgcgccgaggtaacacctggtccgccaactcctggcgcctaatcaagatatcaatcacggcgcgggggcaggggggcgcacgggccccgaaggctccagaacccggcaagtgcaggtagccggccgcctggccggccagggctgcttggcagggagcgccgggatctggggggaaagaaatcaagccccgaagctgaaggcttaattaggctgatatcatcccgcacaaatgttcctccgagaggaaggcttctgggcaccaaaattattttgtgattaaaagcgaaaaggaaggagaaatgattcggcctttggaggagttcggagggctgggggtggcagcaggaggctggggcgcagcgc

SEQ ID NO: 37965 - DNA, 2284 bp, Homo sapiens
caaggcagataatttgttgaaatatgaatttatggcgttttccctttgtatttttcctttcaatgtcccgtatatgtagccagacttctttctgtttcctagtctcaggggcatttgcagatatttgcctgaatctacttgcaggaaacatcttttcctgtcctttgtgaaagaagaaggccaagaaagaaaacaccaaaaaaaaaaaaaaaaaaaaaaaaagatgagtgggaaggaaaagggaagaaggaaggtttctagtatctgggaagaacgcccaagtcccagaggcctgacctaagccctttccatagcagtgccttgggatgtggcatggttttccaaaagttgctgtctgtccagagaagctggagtcaaaacacagctatgctccagcattctgagccctcaacctggccccagccactgggcgtcaaggagcatgctaagtgggagaacagggacctctgaggaaccctccctggtgcctagcaaactgtgcaaaccccaggccctttgcttggcctcagaacctgggagtcctgaaagtaactaaggtggttttttccggccaggcttcaaataggatttaaagaaaactttgaatgtgacattttcacatatccgcgttcatgagaaaacatatttccaaagacaattgagtacagagttattatcttatttgatttttcaactagtggttaaatattttccataggaagataccgaagtctcctgccctgtgttccctgaactccaagcacataactcattgtaccaacctggccgggagagtcattctctatatttagtgtctcactgttcttcgaggttcttgggtcctggagacttctcagagcgttatcttgtttacctctgtgtccccagtgccttacacaatgcctggcaaacactatgggaatgaatgaggaaatgaacatgtatgtgaatgaatgaatgaatgaacaaatgggtgtctggtgtctgagataaagggcctggtgagatccgttcctgttgtctccacatagacgctgctggcagccctgagggctgtgcacacgggccaggcggatggagttaactgcaaacacacttgggaagtgtaaacagccctcctccgggccaggccgactggcagcctcacgggcagcttgcacaatcctgtgggctgctatgatactcattttttgggcatggagtcatctctgctttgggcctctccctccttgccctggattgtcttggcaacacagatggaactgcgtgtctgttgtcagtgggaggaagttcagacccccagcccctccaggaactccattctgatttagagctgcccaaggacccaaggaggctggagctgagagggagcttggggattacctagcccaacctcttcattttccagatgaaggatctgagacctaaagaggtggggacactaaggccactgtaagtgtgtcaaagcttgccacagagctgggtgtcctgggatggcagctggtttcagaaccagccaagcaaggcctgtaaatcctggcacaacagactgtccagccatgtgaacttggatcagggacttcttcccgagtctcagtcccttcatctgcagggcactgcgtgcaagggtgttgtgcagaccttagggagcgctgatggtaaaatgcctagcacagtgcctggctcagactaagggcttccttctgcctccctctgccctttctttccacacttttcgtgctcaccattcctccatatctgggcatgaaacgccgctgcttccctcagaacctccacttcagggccacccccttcccctgttggctctgtgtgatgtggttgcctctgtattcgttagaatccactttctttcatgctttttctgtcttcacacaactgttgatcctgccaaaatcattcattcatatttttcttcttttctcccttcttacaggccttcccaggcccctgctatctgccagccatctgctgggcagagatgctcatggccggcgcctgcccctacagagcgcgactgcttctctggagaggctgcatgggcaatgacagtgcaggggaggagagctggatggcaggggcagtgctgtgtgtcctcaaaaccctgtgccatctctctcctttctggaatgctgtgctaggcagaataatgtgccacaccaagagggtgccttagttcagactgctagaacagaatattatagactgggtggcttaaacagcaggtatttatgtctcacgattctggaggctggaagtctgaggt

SEQ ID NO: 37966 - DNA, 2507 bp, Homo sapiens
actctgatgaggctcttgcttcacagaggaggtgacaattaagccttgaggagacacacatgtgcatgtgtggttgcgacctctgtgggcacgggtctgtatgagcacacatctttgtgcaactcaggttgtgtgtgcgtttgtgtgtgtatctatgggttatctctgggtctagctctagttctgtggggtctggcacaaactaaggtgtcagtatgtgagtgggtgtctggtgttgaggggtcagatacagtgagcacagtacaagcgaatatgaggggaggatgtgatgacagtgaatagatgctttcaaaatcatcaggaagaaaaagacgtgggacacactggtagctccagaggtgagtcctgagtcctgcgcccctgggggccagctttagagccacgccatgatttattaatctgtagttgctgtgggagcgtggctctttctggaggggcaagcatgaaccacgtcagtcccaccacgggtcgggttggcacgatgtgttcattgcccacatgactcactgttttgttacctgaaatacatctaattcctattaataacgagcactgtagggcatacatttcatcattagcattaaatgactttattgcaggatacaaaggagctgcctgtgatgtatgatgcaactgctggagcgagggcctttggagagagggcgtgtgtgcacacgaacacgcacacacatgagctctcttatgtcctggtcattgtgcaatgagggtgtgtatcacaggcagacaacttttcttgcacacttcagcacctcctgaagcgaatattttgtttgctcggcttaccaatggggtgccgggaaggccactgtgcccctagttggtgtggtaccctaggcccaagacaggaacttgttttcctgagagtctgtgcaggccaagtgcagggctaaaggccttcaaaactcttacctgaaagaaacccaggacctatctgtgggtagcagttgcaagcctcattttacgtatgaggaaactgagactcccagagcccagaggacctgcctaaggtgtgcggtggagcaactgcttaaatcctgccaggcctggccctctatgctcttccacgtgaacttgaacctttgttaggtgctctgcccctcattttcccagtcagcagggctggctcatcttcccctccctgccaacctcacagggcgctttaagatcaagcaagatgaggtgttggcaacacggagactgcaggaagcatgatgcacggattacctgagcgggtttgaactgctgtttgggagctttatgactgagattactcattctccttccttttttgttttgtaacaactttgtatctttcactcacggccgtgagagtctcccctctggcctctgtcgttactagtaagaactgatgtcagagcccggttggggcaagtggtcaaggggcttggcggaactgctcttctgccccccaggtacacacttgcctttgcaaaaacaactccctatttggcaaaaggcagtgtttgccctgggacagggccttgcaaccccatgccaggccctgtttattctggcataagccacggtggtggccaagcgctctgagtttattgaacttcctggatttcttatcacatagcctgctctgccagggagccggtgaaatgctgatatgtgcccacgggaagatattaagggggctgcaaacaccacccctgtcccccgaggagcaggcagctctgggcagggctgctggggccagtggggggacggttgaaggggtaggtcagacatggggataaaccttccctctccttaaccttgcctgaacctaggctccccatggctgaattcccgcccctgaattcttggtggtctctccctgtccagcctccacacctttgcctgggtcttgcctcccatttggatttccttccccagtctctccaaatgaaatcctacctgcttggtaaaataaaagaatgacggaatgagcttcgaggctgggactggtaggtgacggactgtgtctctcctaccacattttcctgtgcacttccctgcttgtaggcatggaagcttaggggctcctcagggagcctcacggagctcgggagaacttcacacaacactgtgtggctgcagaaggctgggtggcggttgcaggagtgagtgggtaggggaggggcttccagggtcatgggtgggaagacccttgctcgcaccctaactcccaatcttccggcactgtggccttagggagtggccccacccaggcttcctttgcctgagtagaatgagtttcatggcagccctttcttcttttttttcttttatttatttatttatatttttgagatggagtctcgctctgtcgccaggctggagtgcagtggtgcaatctcagctcactgcaacctccacctcccaggttcaagcgattctcctgcctcagcctcccaagtagttgggattataggcacgcgccatcatgcctagctaat

SEQ ID NO: 37967 - DNA, 1453 bp, Homo sapiens
ttgtatgtgtgagagtgagaagtgtgtgagagtgagagtgtgtgtgagtgagcgtgagtgtgtgtgacggtgtgtgaatgtgtgtgagtgtgtgagagtgtctgagtgtgtgtgagtgtgtgcatgttagtgtgtgtgattgtcagtgtgtgagtgtgtgtgcgtgtgagactgtgtgtgtgctagtttaacactgtgcagtcccaactgcattgatcctcaatgacactcagctcagctgtttggctctggaggccccactgctagctgtggcaccagctcttgatgcctgtgacagagcagacacacaatcaatatttgtacactgacagcctgggcaggtttctgtctcccgcatagggcaggggcagcacggctagtggtggtgttccccttttactgttagcagcagtggcccccaaacccagggccaagggtgcatgggtgtctgtgccctgctccccaggactggtggtggggaactgctcctgctaagggcaggtgggcagcaagcagtgcttaggtggagttctgggcacgggtaggcacccctgggagctctgatagacatgggggagaagacccataagaagcctgtgccgcctgtaaatcaagcagagtcttggaatagttggggccttcatgggactgtggcctcgtttggctgccccagctgatctgggcatgcagttccgttcattcagcaaatatttattaagctctagccagatgccctagagagctatggtgaggcttagaggaggtgacatggtggcagcccccagccagggccaggaacgtgcatgtttgcgtggaaaggcatgctgcccaccagagccatgagcccataggccagacgctcaagagagggttggagacagggtctcactgcaccaccaaaggagctctccacagctcccttctctcctcggacccatcgcggctacagaatcgacagacgtgagccttggccaggtgagagcgctaacggaagaggccagagcctgacctctcacagggtcagagtccccccatggccttcctactgtagacttctggttccatctctctccttcaactgcagccagcttcccggacaaagggcccttctcggggaatgtccacattgcaaaagactttcactgtctccagtcctgcgttgcctttgcccctgttccaccagacactggagtgctttctcccacatgtctactacagaacagcctgtgtttgaagacctccaaagacaaggagctcactaccctctaagcaccaggggacaccaggcgtttctttctctttgagtgtagtcatccaggttggtattctcatgagagtggctgtctcaaaggccaagcatgcagcgagaagattggggtggatgggaagctggtggtgctgtgggagaggccacagaagacaaggagagaggctccaagtcaaaccccaggga

SEQ ID NO: 37968 - DNA, 685 bp, Homo sapiens
ccccctggctctctcaacatggcagggctgcccatctgaggatgggattaggagaaagctgggctgcggagaggtgagggttggatcccccatttgcattctggagttgaaagttctagaaggttggggtggggtcagggtagagccaagctctggaatccaggaagtggcaatgcagcttagaaaatcccgggcagtgggccacagctggcagcagggactcggcccaggagaggcaggccaggggcagacgagccggcctgagaggtcttggcagccaaaggtcaggcagggcagggcacagcaccacctgaatgttggcccacagcgagggcaactttgatcaactggcacctgcaattctgcagctgaatcatcaaatgggggaattgacaaaacaatgagatgcccaacggagctcagcaagttaggggcagagcccatctcctgacctctcctgagctcttcctgcagcccccactgtccccaaggcttcttgtgccatgctttgagttctcgtgtttcttggtgaaccctcctgtcgctctctctcttctggcatatggcgtgactcatttctccaccgtcagcacgtgcaaagcagccctgctcattcttttcctggtgtccatcctgcagctcccagccccagcatttacagagaagctgttcaataaacaccatg

SEQ ID NO: 37969 - DNA, 879 bp, Homo sapiens
tgggcttccttcctccttcgggccctgtcacctggcaggacaggttttcatcctggccaggtggctttagcaaggccaggaatccagccggcctagcaggggcccaggatgatcccctggccaactgctcccttctggagcccccaccctccctttctcttgctctccttccctgggcctggcttgagcaaggggagccatcgccttccattccctaggcttggcctgggcctgtccacccctgttccagatcaatgactgactgtgggttgagaaagctgtctagaggggcatgaccccagatacagtgtcaggtggggagggtctcttttccaagaccactcttccggagctcagggaacaagccagagaagacgctaatgtttctctgcatgggccgtgtgccaggcatcgtgctaaacacttcaccgcaattgtgacatctggttctcaccatgggaagggggcccatccgtagtcccatgctgaggacaggaaagcacctgacgcctgagcctgtgctcaggatcccaaagccatgagctcatgtgaaaacaggccatttggaaattgcacagcagtgccggggaagtgacagtcagaggccacactgagtcatcaggaactcccacattgccctcaggagccagatgatggctgatggcacttgtgaaggtgtaactctcctggaggtgccccctgtggaagccgccagggaagacgttacgtgggagtaacaaggtcacttttcctcacccctacagcttcagctcccagatgttctgtcctgctccttaagattagctgagtcacaagtcagtccccctaatgtgatgagcccttcctaggactcggggactgatgggcttttaaaccctg

SEQ ID NO: 37970 - DNA, 1125 bp, Homo sapiens
tcaggggaagcactccaccccacgggctatggcacttgggggagaagagaaaaaagacaagcaagatcaccaggcgggccaatgccggtgccttttccctgcctgcgatgcacacttcatttaatttttatagtggagggagatgtggggtcttttgagcatcgatatcctcgtgggcaagtctaagtgtcagacaataagcggaggagcggcgctcggagcgcgttggccccgctgtcagtcttgcccagattaacaacttcatctgagcctttgttgatattgacactcggttgctaggtaacatgtttaccgctcaatgaataggacttgagggccagtgggggcacagtcaacagattggcaaataaggcaaacgtgccatgacttgatgtgcccatcgtggtgcccaagggtgcagaggatgctgatctgcactgacccccgatagggcgagtggctgtggcctcatgcccaggtggggaaagtccaggaaagcagcgctgtttacacccagggcccaatctcgtgatgacatagatgcccctggcctcttgacaagggtgcttctctccagcaacgctgtgacacggtgtccctgcaactctgctgccctggagaggccctgcccgcctattgcaccctcagcacctttggcagctcctgccccctactttatccctatccacaaggggtgtgctgtcctgaaaggaacccacggctgggagtcagaagactttgtcacttcccttggctgggaggccgtgcatgtgtgactcaggccttgtgttgcagggcctgtatgctgcgaacgtatcccctgccctgcctacctcatcagggcattcaaaggaaagggagggcccaccgtttattgaatgccagccctgcgccaggccctgtgctgggcctgctagtcattccctttaggccttgcagccaccctgtgaggtgggctgctgactgtgaactcctttctgatgagttcctgttaagtgatcagccttgaggagtagtcggtctgcagactccagaaccctcattccactgtcccacacaaagacttgctcctctgttccccaccttaagctacctgttgactcaagggctgtgtggaaaggggtc

SEQ ID NO: 37971 - DNA, 1722 bp, Homo sapiens
tacccctattcccactgtataaacaggacctagaatgtgcaaggcacatattaggtgtccattggatatcagttgaataaaggattgaacaaaagcctgaaaatgattccttcctggccttctccaggctcttgagagtctcagatgcagcaacaggagctgctgtttcacacacaattccaggaaaagctctgctggatttccattcaaattctgcctccactccctcctagccacgtggccttcggcaggtcacttagcctgtctaagcccctcaaatgtaaaacaaaaatataaaactgccctaatctcatggagtggttgtgaggattacgtgaaagtaagtttatcaaaagcctgataatttttgtcttctgctgagtagttctttctgtcatctgaacaattgataagtggattctctaagtccttattggatgcattgatgataatactctggggcaggagtagatcacaggaaccaagcctgcagccactctgctggacacctcagccgggctgacttggggccagtggtcattcccgtttgaatacaatcatttaaccagttcaaagtccaatgacctgttctaatgtcccctcagcatttccccacttcctccacaagcccagtggagcctaggaatgatccaggtggatggtatcacggatccagtacctctaacatgagaaattcttgcaaatgcttgcttaaaatagatatactttctgttggctgctgcccctgacctctgaagctcatatgttcaccgcgagaggaaaaggggagtttgttgcggtctattctcagaagaaacacattccttccaaattctttccaaatccttctccaaattttagaagagaatgtagtgggcttatgggggaaggagaagaaaagtagtggtttctttttccagctctcttggaaagccacatctcatgtgagtctcacatgcagtatttattatcccatttcacagatgggggaaggcaggctcagggactcatacaaggtcacacaatccagaaagattctctcccagctccatctagttccaaacccttttctctttccccagtaccatgctgcctcccaccagctgtagttacttaaaatgtgcttgcttcctgtctgggggatgatcaatttggttgtgtatccaggctccagctctccaggattcctccaaggtttttgatggaggggctgagttcacatccacaaattcccctggtatcctgggaggtcatttgtctgggccaagaagctggagctcatttgaggccaccctgtgctcttcaaccctcccctccctatcctgtggctgcacttccctctttgcgatatggaggcggcacacctgcactggacgacccttcttttgactgccacagggagccacagccctctctgctctgagtccccaccatgtgaaaattactaagtcttcaacatgctgttactcataggagcaatggccagtacatgagaaaggcctcatttcaaataaataatggccaccgttgacaatggaagtataaacatgacccaatacatgaattgctcatcattgtccctgttaatagacactcatctttactgtgcacacaggtggtctaaggctgatgctcacaagaggacaacgagtaacattagctgggaggggccagtgagtgctgaggtcagctaaactgcaaatcaagggagagaggctggca

SEQ ID NO: 37972 - DNA, 1303 bp, Homo sapiens
ccactctcacacctacttggtccaaacaccttgaatcttagcaagagccctggagaagtatttcggaagccctgtgagggggtgctgagaccccgggttagaaggagcatccccgtgtgctccccgggtttggagtggggcatttacacagtgtaacttccttaaccttcacagccgacttgataggagggcaccactatgcctatgttacaaatgtggaaactgaggttcactggattaagtaacttgtccaaaggcacaaactaagccaaggtcagagttaggctttgaccctggttccctctgacctcacagcctgagccctctacctgctgtttccctttttaaggagaaaaatttcccttctggctcttccgattccatttacttaccttgaaacccctttctcttcccagtagttagggatgccagtgccattaataattctttgtaggtgcaattctgagtcccttcccaaaccagtcaatattttcccccagggcccttgaaatgtcaggctctacagaaagagcagacgcagaaattggggaaggcaggaaaaatcctggggtgtgaatcctacacttggctcagccattaactttttccagaaccctaggcaggagacaggaacttcctgtgctttcgatgtcctgtgtatgagttacctgttggaagtgacaaactgccccaaacttggtgactgaaaaacagatttgctcaggactcttgccagccccgtttattcagtcatctggaggccttctagaggtccgcgatggcctcttgctggcatccagccaaggctgccagagggcaagccccggctcatcagccctctgctggcctcacctcggctaatgccaagcaagtcacatggccaagtccagggtcaacgtgggagggtcacagggcatgtataccaggaagtgggattgattgggggcatttatgtaacaatctgccgcttcctgtatgtctcaaattaaacattctaaaatgcagaaaaacattcctagatcaagtcgttttgctgtcattgtctctgcgtgaaataacattcatgtagggctttacgattgacaaagaaaccacttttgacataatgatgctgtttaatgtatccacctaccctctgagagagaggtcattttgtaaattggagaagcgagatttggaaaagttaaagcaacttgtacaggcacaggttaacaagtggggtgggggcaggacccaggccagacagcatctgaagcccatttacccttcccacgtggacgcatctgtccctctgagttactgt

SEQ ID NO: 37973 - DNA, 1658 bp, Homo sapiens
tggaggaggatcgggagcgaaggggccttcctcacccagtggggctcaacaaagatcagttcttgtgccgtccttcctggtttgtgatcagaccatgcgagggaaagccggccctgacaactgcctgcggtggggagccagggaggacagggcagtgggcgggtgcagcaggcacagcagccaggactcccagtgcccgggcctgggcccatccccttcactgcatggagcacaggtcaagtgccaagtgtcccgcgatgaccattgatcacacagcccaaacaagcccgagatttggttttatttctcctctggaaatttaaggacaatagcagtctcttccttaggaaactttggagtggaccaaatcacatgtgcgtggcacttgattaacaatggcgctacaagggagtgtttgatgtgcaccagggactctcagcgtttcagtcctcaccatagacctgccagcccaataggaaactgaggtggacagcagggaggagagtaacctgtccaaggccacatggcttagtggctcaactgggaatgagacctggtctgacttcagagcctgagctctgatcccctacgctgtgagtctctggacacggcggtgctgcttgtttatttttgcagcggggtgctgttgttgctgacacgtctgtgcccatgtaaggctgggcctgctgcttctgctggagctggccctttaagcctcccgggtgtggggagcctgccctatggtgcaaccctgttccctggagctggcggcattactgctacagtaaggaatgtccctggggagatttagtgcctggtgatagacatgtgggcttgatttacccccgcactgctccattcagccctaggcaggcagtgcaccggggcagagttggtgaataactagagaaaccagaggggtgcacagggtgctgggcgagggggcacggagcccgcaactgaagggcacttttctgtgccaggcctgtgatctcagcaactactcaaaacaagcctatcaggttacacatccattttacagaggaggaaacggaggctcagcgaggtgaagccacctgacccagggagtagtcaaaagaactgaggaaatctttgcttactgcaaggaagggcctcctgggaccatggcatttgtctgagcctctgggaccaggccctgggggctccgagccactatcccagccctgccaatcttcctgtcaccagaatccagacccttctcacagggctctcagttctgcaagccccctgtttccagttagtgagagactccctttatcagccttggcaaggagcccttcagtctgccaagcccacccctgggccctggcagggtctctggcaggaatggctggaggggcttccctttctgtcttccatgccgtctggggaccttcccacctcctcccctttgtccttgctgtctgccgtctgccaccccctctgcccatccctcctgtcctgcccaggtgccgcctctgcacaaggccttccctgactgtgcgctcagggctctcctcttctctctggccttagtgcctggtgactgcacaggatggagagctcagctctggcctctgcggttttgccctcatttctgatctctctcatctggccacctccccaggagatctcag

SEQ ID NO: 37974 - DNA, 693 bp, Homo sapiens
aacaaacaaacaaacagaaattgtagtcatgcacaacccttaggctgcttctagtttcggttgatgagtgtagctcctgtcaaagtttgaagtgagcgagggctagcttcttctccaaacctcacaacgacgtgagaacggaagcagtctctccaaattctgccacatggagacatttagaaaacaagcattcattcacgaggagccccaaatggctgtataaactcctgagtgccactggtggaatccgggccctctgccctttgaggagctcctactcacttgcatgtgcttatctgcaacaaatacaatgttcctggcaggacttctttgtccccacaggcctcttactcaacattaggcaaatggaagtcctcccaggtgaaggactacacccaggactgacaggcatcaagcttcgggcagcaacgccacagggcagagcctccaggcctcactggcttcctacacagttcttgcagccctgcgaagtgtctctaaatcacacaggccttgagtacctcgactttcaccaaatggaagcttatttctcatgtcatcatgctgcttaacaggcaactatttttaccaaaaagaaaacacaccctcgaacacccatttctgacattctctatgattgttggccaagtgtggggtgtcgatggagaaaacagaagtgggtacagtcatcat

SEQ ID NO: 37975 - DNA, 1016 bp, Homo sapiens
gctctatgagttctgattcagcattgcacttaccacccaccctccccgccttttacagaaaaggaaactgaggctccgaggttgcggagttgcttgctccagctgatgacaaaggcaggtaaagccagggctagagtcccttcccagccctccaaatgccgttagcgccatgatcctacagcctcctcaaagtccagtcaggcaaactcttgcccttgtttccattaaacacatatcttcatctttttcgtacttttaataatagcaggaagtaaatctggccatgtaatgtgagaaaggtaatagtcccaggtcaggaaatcctgttgcttggagtctcttgggaatgttaactttcccactctcaccctaccgggatcctgacctcctgcacagttggcttcctcaggcaaaactgggccagaaattctgggccgttggccagagtcagaccttcgtcctctggtagcgtccgctggaaaagaggaggcgagagtcaccaggaggctggccccactcgcaggccctgccctctgccggtgggtcctatggatgacacgaggccgcactgggctggagaagaagagaagctcctgagacacgcccactctgcagagggaggcaaccgcacaggtaatccatcctctctaggcttttctgttcccgtgcagtaagtgaagtgaagcaaggtgaagaagtgaagtgagcattcaggacatgaattggcacgtggtcggtgctagaggagctggcaaggtagactctggtctcttctgtggtgctgaagctggggaaataaggaacaatctcatccacaggccaggcctccggcgtgctcgggagctactgacggaaactcctagggaacttcccttgtggaaagaacgtaagctccgcccactcgggcagctgaggccattgattcgttcactcattcgctggactatttctccagcccatgatcttattttataacaagtacaacattcattcatttttacacataattacctcac

SEQ ID NO: 37976 - DNA, 622 bp, Homo sapiens
tcatcttacaggtgaggacactgaggcccagagagattaagtaagttgcccaaagtcacacagcaacttcctctgtggcagaaaaatgccttgcaattatttataattgtgaatctgcccagggtgtgggtcaccaggtgcgggctggcccttcccacctggctatgcattgcttttctgggccagagtccagggagtgtgtttgtccagcaaagagtgactacaatcactgcccatgaaaacaagcacccatcccagaaccccttggtcagctgccacacctgccagtcgcatgacatcacctcttgggtccctggctgctaccctcccttcctagagagaaggggaggctggcatagccaccagcagcaagaaaacaaacagcaccagcctcaccacctcccacatttctcggaactgggggcccttctggctatcaggcgttaaggaattcttctaagagggacaaaagagggtgagagagatgtagaaacaccagtgacaatggaaacactggccagcacacataaaccatgctctgcacctaccctctggccgcatgttaacatccgtgatctgtgccagcgggcagccttcccacacccatggatggggagcatca

SEQ ID NO: 37977 - DNA, 511 bp, Homo sapiens
tggtaactgaccagtccttaggctctggtcctcagcagccacatgcctttgccgtgatataacttttcatctgagccttgattcctgacacatggcacctgctgcccccaccctgagatccaccatcggcccctcccctcctgtgattcctgccacaaactccaggcatgggtgtggccctattggaatgtgctgggggagaagcaggaggcggggacaggtgacacagaggaggtgatgaaggtcacaccaagagaggtccctggtggttctttttaccttgagagaacatctgtggcttccatgttgtcacaaaacaaacagaagtgagtctgaagtttcccaatccccgtagctggtttcatggctctttgacagtcctttcatgtccctgacagtggtgagctttttcccctgggaagttagggggcctctgttgcacccccgcggcccacctcgccctggtgacgttatcctggcactcccaggctgatgacacttagctgtcacc

SEQ ID NO: 37978 - DNA, 1695 bp, Homo sapiens
cttcaaatctattgcattttgcagtggggaggctgcacactacttttttagaaaccttctgtgaccaagacagagttttcaaccttaagcaagcttgaccagccctattgtttcttccagccctaaaattctctaatgtgggactctacatgtctacccagacagacaggcagcccctcccattccttgtgatggcggggatctcccaggtgtccctctggagctcaccccagtctcccaccccttgctaaaggggcaggagcccagcagaggggtctgtagggatggccacaccggcacccttcggggccctactgcgtgcctggccctgcactagctcttctccacttcacagtctccctctgacatgggtcctgtccctatcctcattttacagataaggacaccgaggcacaggaaggttcggtgagtcagcaatcaagccagacttggctgtggcactggcggcagcctcagctctgtccaacaggacactatgccgcctcttgtggcctgtctcctgtcacttcaaggccactgttgcagggaacagatcccatgactgcctggctcccgagcggccagacccaaatggcacggggctggcctctcccgtggcgttggctggagcacactcctcaccctggaatgtgcaggtccctctgcatccctacctgccctcaccaggagaccagtctcagaactctgtgcctggtgtggagtggctgtgctggccccagcccagcacactctctctttcggcagctaatttgtcaagtaacacctcagcctggggtgggcagtgtgcgtgggcggacccagcagaggccacgggtcctgctaggctgtgtctgcagggcaggcctgattgcgtgagtggcctgggcctcagccagccggacaccagccagctcgtggtgttggaatttcctgtctgattttaattcctccccccacgtttttcccccaagtgagacagaagcactttttagttgcacgttgtggagtggccattcaggatattattcttattaaatgcttcctgtggggtggtggctgggcatcaggagggcctctggaattctcctgtcctgtggcttattattgaaaatcatggtgccatttgcataaggccctggggaaggaggttttccatgattcgtgctcttttggtgcttcctacctctgatgcttaggccagtgacttcgtcctcatttgcgaacgaacacctggtcacctgggctcacgtggctgaagggctggcctttgaaagtgtcaggatctcagaacagaccaaggctccctagcaaggggagaaagtccctggcagcctctcccagccctggtgtgcactttcattcatgtaccatcgaaaagcacagacccctggatgccttccaaacctgcattcccagtggcacccagaccccttgcagctgctgctcagaagcactggtaaatggtcaccaggattcaaatgtctcccccactcccgcctctctgatcttctgtgttgagtttctccagttagtacaatgcctagtaggcgcatggacatgataaatgatttccccttccttactgtgcaactgggaactatggagccacagcaagtgtggaaatgccaaagggcctgtgagtctccctcccggggtggtccctggagcagcagcatctgcatcactgggaacctg

SEQ ID NO: 37979 - DNA, 2737 bp, Homo sapiens
accttcagctccctatgttgcttttgaggacctttccagccctgccctgccctgccctgccctgccctgccctgccctgccctgccctggggcttcagagaagaccaatttcagctgcttcctgcccagaagggcgtacagaaactgccccatgcagaggttcccaaacctggctgcagatctgaacacacagggtgggtcttaaagatgcccattctcaggccctggccccaggagttcttgttgattttcagactagggtgaagcccggaaatctgcttatttacaggcgcccataggccagagtttggggaccactgcaggcgccgctgcttgcttgacgtccgggaaagcagccccagagctgcttgttggctttctggactcatcactgacagcgcctcgccgccaaaacacgggttgttaaaaatcccctggttcctcgtgataacccattcacagacaagtccctcctaaacctattcatatgacctaaacctattcatattctcagcttgcaaaaggcagtgagtgtatggggtgggaacagctgcagtatctcagccttcctttctcctcctgcctggcaccatctgacctctgacatccacgactccacccccgacctgaccactgctgatggcttcctgcagatctcttgatcctgagctgtagttggtttgcattgcattggcagtcacggcccaaggccacccttcctggaggagtgacgagggggctcttgctggcacagatggctcagggttgtagctatcaacccaggcccaggtatgttagggcaatagagtgaacgccagctggtgggcatgggggcctcacctccctttcatctgcatgcttggtcacgcaaaatgcatattacccagggcctccggagacagcattaagagtgtctgaagccccacttggtccccgagactgcatgttaatggggatgtttagccgggtgtcggtgtgccttcacttaagagagtagtttctttgctgccactgggccgaactcatgaactttccagtctggggggatttgaagattgctttttccaaggtcagtgtcccataaagactgcaccgttcaccatgagattaatgaacacagcagcctgctcagcctgtgactcaccagtgtcatcccgggcctttatgactctgtcctcagtcattcactgagacgggtgggttgagcagaaagatattttcttcttgattcttggcacagcacccgaggttcacgattcatagaggattggctttgtttgttttttgggaagaaccttctcctccctctgcaaacatgctcgtttcttttcagagcctagaggaaggaggagacttccgaaaggcatgtccacctgccccctgggatgagatgctgggtgggcccagcgtcacccaccaggcaacttgtccttcctttccacgtgggtccacactgcctctccatctccagggagctcttccttaaaaccggctgttgctgaccacttcttcagagcaactggacagcaggtagacagggagcccagaaaccctgggtccaggcgatgtgtcgggcagcacatccttccacggctgtctgagggtagaccgactagatgtggagccttggctcactgtgatgtaaacggccctgagaccccatcaggcaggcccctccccatctctgggctgtgggatacttgggtcagaccagcagaggagcagtagcaggagtctgtgcccagccgccggcttatgtcatgtcaccctccctgcaaggtgggattatcactccccaataatcactcccacttgataattggggaaaccgaggcatggggaggctgactgcctttccagtgacacactcctagtaagcagcatagattacttactgggcattttgaccccccaccccttgctaaaatcttccccagctctgagagcttcagattccaaagccaagaatgcactcgctgggctgcgtgggacagacagctcatttataatggaatctggcctgtaaaagtttaacgaggagcgtgtgtgataagacgggctggtctttgatctttactgaacgccaaagccctcgcacaagaggagctgctggctctgggttttggagagagccgtggtggtcagccgagagcaggaggggccagggagtggagcaaatcttgatgtgcaggccgaggtgggcgtgcagtgggggaggggctgcggcaggatcgggatgaactattcggttcctctcctgtccctcggggtccccactgtcggacatttcccctccacacccccagtatgtagacagaacagggttgaggccggggctcacatcttgcctatgctgcttatactcttcacatccttgggcttgcttagccccacaagcctcagtggccccatctctaaaatggggacatagtggctccccatgtgaaactgttgtgaggactagatgggtgtctgtaaagcatgtagaagcacacctgggacataccgagtggcggagagacccctgctctcatcactgccctgctaacattagaaggaaagccaagtttcactgcagacaccctgcagggtgctgggccagtggtgtcctattcagtcctcccaacaccctgtaaggtgggggattttctcctcaattcatagaggcgagaactgggcgttcccagaatttaagaacttcccaagattgcccagcttgtgagatctcaccaagcca

SEQ ID NO: 37980 - DNA, 543 bp, Homo sapiens
acaactggggccttccagggtctcccccgacccctgttcatcctgcctgcagcacctcattcccaacgagggcctgcagccagctcctgccatctgccatgagttatagaaaacaggcagtgattaatcagccagtcaacgccgcgtgcagctatcctctttcatttatctgccccctgacccccccagcacagtccacgcagcaataggcaagtgtattaatcatacgctttaaaaatatttaaaggaggagctgagcctggagcagagtctcctttaatggactcattttcagctgagggtgagtatgctaattaggagataaaacaaacgggctgtttgaaatgcaaatgagctgctgggagcacttctggtcccttccttccctgccgcctgtttgggaggctaaatcttatttctcccagccgcttcccgccaccgatttctaaccagaaaagatagtggctgattctaaaactgagaggtactaggtcgtgttttcaccgccccccctccccgccccccgcctttgccctggatcaa

SEQ ID NO: 37981 - DNA, 904 bp, Homo sapiens
ccagaaaaccctcttcagtgtggtacatcctggatcccttcagacaaggcacgggcaatacctggctgggggagcccctcacaggcctcctcctgccggcccacaccacatccctgtgcccatgtttgtcctcttcccaatccctactgccccatccgaactcactgtcctctgtccccattctctctgtgctaaggtgacacgtcaccatatagcagcttgccccctgccggcacaggctcccttcaccgctgctttcaggtcccagtccctcgtttgcccagcacctcttgctatctcttactcattcaacaaacactcctagcaggcttctccctgccaggccctgggctggattccagagtggcagcgatcaggcagaccaaactctgtctctaggagctcctcccagtgggagaggcggacagaaagatggacagttacagcctaggcacaggagcccatgggagctcagaggaagagcccagaggaagagtaaggcccagcaagttctgtgagctgttggtgccaggaaagagctgggcctgcccctgatactcaaaaagcatatgtgaacaaagggaatggagggagaggaggagaaagaagggatgacaggaggaagggagggaagttggtcgattttcctcatccacctttctcctctctggactagtgtttggggccagctcctcccccactccaatgtcaacctctgggcttatcagatatttcaatagctgctctggcctgataagccctctccagataacccctttctcttgtaattgagtttaaatattgttccacccaatcaaggcaggttaatattcaacccaacctagctctggaagcctcctggccaccagattcttccctgggcgaggcaacctggggctgagca

SEQ ID NO: 37982 - DNA, 649 bp, Homo sapiens
cttgtctgtataaacagagtcactggtacaatctgttcctcgcacatcataaacaagcgtctctacaacacaaacccggcacacaccccatcaacatctcatcaattttgagaagaaaaagcctggcattgagcacacacctggaaaacctgccctgtgtgggcctcccccgtcaccatccactgccgaaaaataagggtgcaaggccgtctcgactttcccccacagggcgtcttccttttgtcagagcagggcacactcccagcccgggtggttctctaggaacactgaggattgcataatttcatgtttgcccagaccatgtcaagttaataatccacggactgctgcctttaaattttttaaacaggggcgggtgggcagaggaagttaagaaccatccctcaacagtaacttgtttcaagcctggcatctttatttgccaaggaataaaagtcacgagaacatcaaacagaaagggggaagggagtaaaggcctctaccctggtgaggtcagacagcttgcagaagttctgccaagtgaggagacgaccaaaaataaaatacaaaaaacgcaaggaaaaggaccagaccctccctctagagtcaggggaccaggggcatatgcacaaaccgccaccttggccct

SEQ ID NO: 37983 - DNA, 388 bp, Homo sapiens
agataagaagaacttcaagggaaaagaaaaaaaaaaaaaaaaggaacgaaaaatgaaaacccaacctcaaacctaaatacacaggttcttgagttattatagtggctcctggcaaagtgacagagtaaagttttataaggaaactccaagggcaatgagtcaaggtgagtcaaactatgcaaagcaggaaggcctgccaatgcaggcaccgttcccaacacatctcctccaccagctctaccacaagtcagtaacagcagcatggggacccttgaacccgagtgctgctaagtttattttaagcaggatatatattctgctcttttcccttgggcaatttaaagggcctcatacctgagaattttctctcctaaatttctaattttgc

SEQ ID NO: 37984 - DNA, 1810 bp, Homo sapiens
aacaaatggcattggccctggaactatgccactgctcagcaaggacgacagcaatggggactccactctgtattacgacatggctgagttccaaggaaggggctcttaagctgtgcactgattctgattcctctatctccatgtccaaactgctcctcatgacccgtctgttcagcacccctggccacatgactgactcacctccttatgggagtctttgtgggcttccagagtcttcataatcgtcagctcggcgtagtttttaaatcttgctggttgatttctcagaatttccctcaaaactcttaacgccagtgctcgaattgaatgctagaatacaaagggaaaggaagacatcaccaaacaccacacagcactttcacacacagcagtcagcagggtcggcaaggccaagcacccagttctgggttccctggaacctcgcagaaccctctaaacagatcacacagttcacttgaaatcagctttacttgacactggctctctagacatcagctccatgaaggcaggcactgtgccttagggtgacattcccaggacccagcgcctgacaggcactgagaaaagctacttgaacgagccatgcacttgagaccaaatgaggatgatatacctaagttcattatcagttttctggggatttccagatttcctgaggcttcaggctacaaattatgcttctgtaaaatgtatgaaagaatgtgtataaagcacctggatgtttcatcaacacagcctgtaagagtgaactccacctaaggacagtggaaggcctgtcattattcctgaccttccatgtgatgagatcactgggtgtgtacaggcctcgagttggttaaggccagagtcacgcatctggaggaaagccattccaaacagactcctgatctcaataaaagagaacgtagtttacaccaaacagagccagaaagtacatcctgattctttgccactcatctgtacagttcacacactaatacaccatttacctgtcttctacatgacatcactttatctcccaacagagccaacaaggcataactgccttacgagccaatactttgttttttttaaaagtatttttaaaaagttttttttaaaaaagtaaaacagattacttattaccattcttctatttttacttatccctaaaccaaaccattaatccaaagcatcagaaagctatctgagtcaccacggcatggcatgcagcagcctccctgtcactcagttgccatgcaagtcccctctagctggccctgggcatggcctgccacctcctggcaatcctcccatccccttcctccagcccctccccacagcactctcttctcatttctcttctccatgtggatggagaaactttttcttgtagaggtttaattctggtaattctcagcatctattcctgtttccatataagggaccagctccacaggtgggagaaggcaggactttgaccagattactcccccctttaagagttctctatgtgcgatgtgcagatcacagaccaggcatgtcagaaatgcctagtttgtcacattcaagtgtcccagcatgatgaagctttttttatttttaaattaataatacaaaaatcagaatcatgcttctggaacctgccacttgactgattaaaattattggaactcttaacatatgtagggggggaccaagatggaatttcatggaatgtagcatttaatcaggtcttttaaaatgaaactttttctcaattacatatgaaacaaaaatgaaactcacaagtaaaaaagtacatcctaaa

SEQ ID NO: 37985 - DNA, 832 bp, Homo sapiens
aatgactaagaataaactttggattaactttacttttaagcagcaactaacttcggctgagttttgccttaggttagaaattaccacacagatgggcttgcccaagagcaagtggtcacaatgacaacagtacagagtgaagtggtgtttttttcctctaatatataaaaattcgaagttgccaaaattcaagcatgcagagggggacaaggggtaactaaggaagaggaaagaaagaagaaaggatcacaaggacagtagaggaggaaaagcaggtcattccgcctagcagtgtctcggacaagcagggaaaggaactctttgctcctcagccagcacctacgtgtactcaccaagtggaggaaagccccgagcagggcttgtatctcggctgctctcacggctggtatcgcggctgcacccctgactcatgctgggtcgagggatacggctgctccgtgctagcgtgcagcatgaagggtttcagagaaggtgaacaagtttaatgaagacagataaactcacaaaatgtcagtcacatttggttaatgtaattacgacattgttcgcgctggggagttctgatgactgagccacctatccatgctgaggtctcactgactgacgtgccaacgggggagggtttgggtaaaatgtgattatgctcaatacctcagaaagctgtgaatttcagtacgaaggtgaaattacacctaaatgtaagaagtgaaaagaaatctttctgaacaacaaactgtcatcagaaaatacaagatcaaaagccttttagaaacgatcagtttttatgagcttagcaaacttctcaacaaga

SEQ ID NO: 37986 - DNA, 882 bp, Homo sapiens
tgatagtgactaaggaggcaggcaatttgaaaaaatatatcaagtgaaagaatcgtctttattttaaactcagattcaggaggctatctccatggcttttaacatgaaaaagctgactctcatattattttgacctgttgctaaatacaaatgaaaatatcacaacttaagtcaaatgctacttgtaagtgacacactttcaaatcctcaaaggaaaggctctgagagaggttacttcagaacatgaattatttaactctcctgcccaggtattgatttcctgcagcagtttaacctgaaaatagaatatgatacttaggtatgaaataaaaatattatcactgtataccttaaattctcaattaaagaatacaaatatactttaaattctcaatttaaaaatatgagcagaaatgtggcatcttccagtactttcagcccaacttaaccaaatttaagaaaatagctatacaaacctttaataatccattacaaaataaacactgagcagaagtcctggatgtgtgcccaattccccacagcaggagacaaataaacacttgttactgtatgcaattttactctgtgcaatacctgtttcagtagaagagtctggaaataccctttgaagacaacaaattaagagtctgccagcaaaaccactaggaaagcaagacagtgatacaggttgttcccatcacatcaactgtaccctatacctttaaatgcaaaccctgtttacacagaatcttttaaaatcacttcgatattggccaaacctgagaaaaagctctgtggaaagactgaaacctaatcaagaagattttttgtgagcaatacttcttttgtagttttcctgtacatttttgcattttaaaaatg

SEQ ID NO: 37987 - DNA, 1770 bp, Homo sapiens
atacatttgtaatgacatttacaatcaaggtgaaaatagtcatgccaaccataatcatctggagaaaaatacaactggcttggttttataggatttctcaaggaaaactgcctctcattaaaggggaccggggtcagggtaaaatatgacttggttggcactaaagagtgacagctaatttagcataagaaataaaaatggcactaatatttcatattagaacacgtattactaagttccgtgtgagaacacagtgaagccagtacaaaggtatgggggagggtaagggcgcccgcaggcccagaggccaggggagtccagctggaagggaaggcagcggggcggccgacccaggctgcgagtgcttaggggggctgcgggggagggcggggactggctgtttgggaggagcggaagggagggagagggggctggaggggaggcagggtggctgccgggagggtttgggagccggggaggccgagggaaggctgggggtctgaaggggccgggtccgctccacaagtgccgcagctcacctgtgccgatctgcgccttgaaccgatcctgcagccgggtcaccagggcggacaggatgtccatgcccagcagaaccacctgcagcgggaaacaccgggagcctgttagcagccggcctgcggggcagcgctcccgcccacccgctccggggaggcctagacatttccggcccagacgcagtccgagagtccagacgcatgccgactggaggaccaaagagattagcacgaagaaggatgatcttccacaaaaagagctatgtacagctataatggaaaatactcggtgaggagaaacgaaataaaaggcaatacagcgtagccaaacccgggttagctgcgggtggagttcaagagcgcgccgcggtcccgcccccgccagccccgccccggcgagaaaagcgtatgcaaattttcgagcggccgacgcgcggtcttctgggtaaaaccgagccgccgcttttgcgacccttcgggagcctcagaaaacaaagaattggggtgtcgtcgaaagctgtggaggctggaggtaagctagctaccagaccgactagggcgaggctcacgaattaattaccacaaccctaccaggtattggcgcttcctgcttgcagcccagggactttctattataaccatccttttcttggggttgcgctactgtccaatgagcgcatagtgagggcagtactgctaacgcctgaacaacacacccgcatcaactagagcttttgctttattttggtgcaatttttggaaaaatgaaaacctgttttcatagacttatcagttcaaacagcagtaattcgtaaataaactagtactttgtggttaaaccagtagagggtgcacaagacgcgtggttttagtgtcgcaagtaaagttctttcagtttttgcggtgattaaacgggaaggatttcaacagaacttcacccctttaactttacgccgatcatcaactgttctgtaacttccttatgctgagtcagcccagtagtctaggtcaagtttcaataggagacgaagtttcagtaggtctttgcacctcacataaaatgtaatccaggtcgggcgcggtggctcacgcctgcaatcccagcactttgggaggccgaggggggcggatcacgaggtcaggagatcgagaccatcctggctaacacagtgaaactccgtctctcctaaaaatacaaaaaattagccgggcgaggtggccggcgcctgtagtc

SEQ ID NO: 37988 - DNA, 587 bp, Homo sapiens
gcgcatgcctgtagtcccagctacttgggaggctgaggcaggagaatcgcttgaacctgggaggcggaggttgcaatgagccaacatcgggccactgcactccagcctggcgacagagcaagactcggtctcaaaaaaaaaaagaaaaagaaatgtgaaatagtgagctttttgtggaatggtccaatagtcagattaaacccttcctccgtatgaagcagttttgcactgtgagacttcattaaacatgcttccaacacaaagccgggcactgcccaatgttcacacaacaaccaaacaggacggggcaacagttaggatttcttgtatacagcctgtgcctgcctgcctctggcggctgataaaagcaaaaactgcagacttttctattcagctttgaaatctactgcttcaaaactgaaggaatctaaattggcccaataatccccacaatacataaaatgttcttgcaagaaactggctacttgacaatattgaagaaaataatttttaaaacttttataaagagaacaatttgtaaacagattttttaaataatataataatggtataaacactttaaaata

SEQ ID NO: 37989 - DNA, 634 bp, Homo sapiens
tgttcacaactcaatataaaaacatgaaaacgaaaagtaatttcctactaggagaagagtgggtgaggagaggcagaaaggaggaggacggataaatacacctaagataacattacttaagtggcataatctctaaagcatcggtgtaaatatccaggctcaagacctgttacagggcttcacattatgagctatagagaaggagacacagttaaatgtgtccctacccaacaacagagggtgcagattctcacccccaactaaaaaatgacttacgtagctaagagcatgacacaggccaaagctaacctttgaatccctgacggataggcctctataatagcaaggtattacacaacctggcctgcaattattatttgtatttgaccatcaaaaaatcttgtggaataccatgaacaggaagggttagaggtcttttcatttattagacagattttactgagtaacaactatgtgcccaggcactaagcaaggtgttacaggtaaaattttttttttaaaaaaagggggtagatatggggtgagaggtacagacattaatcaaattatcacaacataaattaagccatggtaaatgttacaaggtaaagctttgaaggcatacaaaatggat

SEQ ID NO: 37990 - DNA, 3347 bp, Homo sapiens
aacaaagtctcctctaaggagtcctgactttggttaaccttacctgggagaattaaaagctatggctgaaaactccttcataaaaactaaaactttagaagtctaaaatggtgttacaaggtagcccataataaacaatgaattatagaaactgagatttcagtaacaactgctaaaaaggtgtattacacaatttaacaagataaccagatcatcaaaatttaaatttcttaacaaatgtaaaaaataaataatattcaatactctgaggcactgtgctactttttatctatatggtcgcaacatcaatgttgctattctcccaatcccttgatgagcaaacggagccaatatccaggatccctcatatcgagaggtcagttaccgtcgtaaataatcgtagtaataaaaacaatttctaatgccagaattgaaaacggactgtggcacccaaatagggtccaaggtacatggcggcatgaaactatttctcgcttctgactcttctgcatcacggtctcccaaaggactagagaatctgaagctctcattgccacatctacaaatgaaagtatcatgtttaaagagctcacaggttctacgaatggtcagtatttaatgaacgcaccccactacacagaaactcacccagctgcaaactcagctgcaaactcaccacagcgtgctttcagactccacattaattttttttaattttagaagcaaacaactattttaaaaatattatgtaataatttaaactctggaaagccccatactcatcccagcagctcggaaaacggaaagcaaaattcgattagctccattgtacctagccaggctaacgtgcaagatcacacactcatcttcgtcagagcgtctctgccaataccaaagaacaacaaaggcaagttgagaagtctgcacaggcttaactcagcacttgttcgctttcccagcttcagaaagaagctcttcgaaggccccgggaaccaaggggaccttgtgcatcccatcaagccggccgctccgctcggcgccgctcgcgcagcttttgtctggcccggttgggagcccaggacgggagcccgggccgcccgcctcccggcaccccttctctctggatctttcttcacacccatcactcgccaatgactagttgttgtgggtttctctccctcgccccctcccttcctttcaaacgcgccccgggctcgctggcttctcccacccggcaggggagactcgggttaggaagggggcccgggtggggtctggaaaagggaaacagagaggggcacacaaagcccgactgaccccagggccgatcccctccctctgcaaagcagcctgggctcagcgacctactggttggataaacaaccctcgcatcccgctcctcgccaggctcccacctcagggccgccccatccccccaaagtgcacccaagagccgatgacagcgctggacatcgcccccacccagacccggcgcccgccactgcgcgggaggggccagggccgcgagagggctcgggtctgaccctccgccccctgaccgggtacttacagccctgtttttcgttactgttgccgctgcggaccagagagccgccgccttctcctccaccccaatgaggttaagcgcttggtgcggggattaaaaaaaaaaaaaaagaaaaaaaaaaaaaagaccgagagagcgagagagacgccgagggcgcctgcgcagtgcggtcaccctttttcttcttaccgccaccaacccgggtacaccatagagagcgtaaaccgagaccagagaggcggctgcctctctatggtaacgccccgcgcaggcgctggcctggccgtgttaggcttcgctggcgtaaagtccccgggagctttgcccctcacggagaacgttagttgaccctgatggggacccgtagggtaaaggttttgtttttgtttttttttacggaaaaggttgtggttaggccccttggaaagttgcgacaaaactcgagttagacaaggaaggtcggaactaagtggccacagcaacaatgcaccagcaagcagggagcgtgataggaagagctaaagaggaatcgggaaaccctgggtaaaagtcgtccaagtggaacttcctttggtcgggggtctgatactcgaaggaaacggtctttcacttctgggttagggcgtccgcccagagggcgactgcaatgaaggaaattgtgccctgcgacttcccgtaacagagctgtgtgtccacgctcccttttccgagcaggcgcggacgcttgtgccggaagtaaacttgttaacggttctttgccttttggggaggggagacagcccagagaaggctttggagacccttgagtcggccagcgagcagggtttcttacttgagcgcctccacaaataaacgctccttcgctcctccgtcgcgtgcgtttccctgggataataagtgggaaagtggtggcttttatttttttgagacagggtctcaccgccgtcgcccaggccggatggagtgcagtggcgcgatcacggctcactgcagcctcgacttcccaggctcaggtgatcctcctgccttagcctcccgagtagctggaattacaggcgtgcaccacccccccccaactactttttgtatttttttgtagagatgggtttcaccatgtttcccagccttgtctcaaactcctgacctcaagtgatccgccgtcttgggtcttcgaaagtgctgggacagcaggagtgagccaccgcatctggcccggaaagtgttttggagcgtagaaaaatgcaaattatagggctgccttcaaggatcccgaaggacccacagatttgccgcatcaggctcctatgcacgccggtaatttgatgtgttgagatgcactgcccagtgcgttgtttttactggaggagcttgtgtgcggagctccttgctagtgtatgtgttgggatgggagagaagtgcgggagaactatgagataatgccccctgatcctcagggtcttaggaggtatggtcggagaggctaagctaaagtatgaaagccgtgtgtaggcccttctgtgtagtgcagaaaaggtagaggtatgtgatttgaaagagtagggatgacatggaggatgcgactcctggttggatctataaactaatgtctttggaacgaaagcacatgcaaccttttgaaaatggatgggtgataatgaaagaccattccagagaagaaacaccatggtgcaaaggctcaagaggcatactggaagtacaatgaagagagcaatctaactgaaatgggaaaaaaagaaacaaagagtaaaaagtaagattt

SEQ ID NO: 37991 - DNA, 935 bp, Homo sapiens
ttgaatcctggaggtggaggctgcagtgagcagagatggttccactgtactccagccttggcaacagagtgagaccctgtctcaaaaaaatatgcattttaggtatatttaccccacacacacacatacaaataggccagtgcaagatgagccagaagagagctgcttcgttcagtctgagtgactaagagtgatgatgccatccacccagacaggaagcagaccgggtgagcgggtttgtggggagagatgaggtcagctctcagaggtgacaacgctcctaatgatcaaaccctcagtagaggcccactgtgcccgcatgggaggtgctttgcccccacctccctcagccttgcaaggtgaaggctcttgctttcatttcacagggaagctaacggtgtttagccagtatgacccagatttgtccagcccactgtgcctgtctgggttcgggtgctgagggccattccttgtgatgcggccagcaagcaaggggcgacctggagctgagagaggaggtgagagtcagaggagctgcaacatttcctgcactgagatcctggtaaagccacaggcatggcttggcccccgcaggaaggaagcaagagggagagaagggggaagccctacatgtaagacactctctctactgagtcctgccgatcacagcagctcctcctggagaaatgtccaccccagtgtcgccaagttaagacctcggccttgctcagcacctgcccagcagctgatgctaggacctctgccaagcatgaggagaggagccagctcagagtgactcattgtacatcagcctggctccatggatccggatcaacgccctggacctcacctggcagtgaggaaccagtgggaagagaggtgcgtgctggactccactggacagcacgtagtctctcggtggaagcaaagacacc

SEQ ID NO: 37992 - DNA, 1206 bp, Homo sapiens
cgaaaaattttcgatacgcttgttaactctcacggtacagattagcctttcaacgtctcagtcatcatagccttacctctgtaacaggaacttctaagttttcctgtgtattttatgctaaaaaccacagaaagtataagcgatgtcaggggccctagtcagcaagtggaacctggcaaatactctattttaataactcccagatcaccaacccggcatacaaacttcccgaatgtgttaagtctggggctcccatttttgggggaaacgcggaagcgtgacagctctaacccggagataacctgtggtataggagcctattccctccagctggttctttctactgcttctgtcaccccaatacttccccgttaccctccacatgaaggctccagggcctcagcggccaaacccctccatcatttaccgaacagcgtaaaccctttcgtctcggaaaccgtggcctgcaagcttaagaggtcggtccctgattcggtcgaatccacttgggagaccctggaggtaatgaaggcgagcacgaaggcaaggggcgcccgggccggaaaccgtgcaaccccagataccctctagacccggtccatcgcccccgctcgcagcctgggccagggtgcctgctcacctgggttatgcgcttgcgaacctgcgccacctccttttgaaactcgacatcttcctgcggattaagcgacaggattggcccagccgggccagaaaaagtcgccatgccaaaagccgccgacgctaaccacgcggcgctcccggaaacgtcgggctcccagctcccccgaggcggaagtagaggcaggacaggggcggggcgaagcgctaaggcgaggcgaggcgtggcgaggggcggggagggccatgagtcgggcgcggggttggagcaggagttgcccggagaagcgggggcggggcacggggtgtggcgaggcgcggggcggggcataaattgcgccaggggcgagggcggggcacgaggtcgtgccgagagactgggagaggcgtgagtcgcgcggaggcgcgacatggggcgtgacgaggagcggagggcggggcgtgagtagcgccgaggcgcggaggcggggcgcaggggcgtgccgaggcgcggcagcggggtctggggctggggctgggccgtggggagctcccgcaccctcggctgtcggggcgccggctggcttc

SEQ ID NO: 37993 - DNA, 1978 bp, Homo sapiens
caggtgtgagccactgcgcccggccgatagttttttaaaaatgtaggtgctagtggtcttactgtcttcttcatggacatgaaattattctcatataatgagaattaaatatgatccttcatgtaaagagtttagaataatgtcagaaacaaagcaagcaataaattatcatttagttgataagaatcattccaattcatctggcgagtgcaacacacacacacactgtatttgtgtatggaataactgttcaagaacacacacacagtatgtgtgtatgaaataactcttcaagaacaaaggggaaaccgttatagggcatgaaaggggaaaccgttatagggcatggaaggggaattaggacaaggtgtgagtggaaagagaaacatcccaccgcacacgcttaaaaaagccgtttaatttaaaaataggtaatacagccatacagagaagacattaaaagatctacacagaaaattttcgctcccaatccattccctactcacagtcctacatacgttacttttattttccttttttttggaaatgcactggccccctactctctcacgaaggctgaactctctctacattcttctgcacctgttttttgtgcatactctttcgttgtcaaatatttccctccaactgttgttgtgtatgaaataaatacacacatataagctaaccagccccacttgcccgcaccacctacacgcccgtccccgccctccctcaggcccacgtgctccgagggccgccttcgcaggttgtttctggcgatgcctgtctgaaggcctcagactgaggccccgcccactctccctctcctctgccctttggacgcgcgcctcggttccgaacgcagcggacggcgcctcaggcagcgcggcggacagcccgtcctccggcgcgccgcgagcctcggaggaccctagcgacggtcgtggcgtaagaccggggggacgcggcggtagcggcggccgttgcgattgattgcgctggttgcctgcggcgtccacttccttggccgcccttgctacactggctgattgttgtgcagccggcgccatgtctgtgagcgagatcttcgtggagctgcagggctttttggctgccgagcaggacatccgagaggcgagccccctcccttccccattccctttgcctttccatgcctagttgggccacttcgcccggccctcctctgtcgctcagtctcgggcggtggggacgcctccgagggtgggttgcttcccctctagctttaggttaggcactccccgcccccgcccaaaattttgctgctctgtcctgattccccgtgttcgagtctcagcttctcagcatcacttgcctcgtttgtgtcagttttccttcttttcagcacttgtttatatcgaaggctcgattagcacctggtcttcagcgaatgagcgtttcgtgtatttttgttggtgtcttaaaagcacatgtgatctgcttaaaactctcctgtgatttcctatgccacacaggataaaaaatcagactctactgtggctcacatggtttctcttcaatctcgtttatgctctctgtctttgtgtatgatgttcactttacctcttctagtgccccaaatagcttcctgcctgtttgcttttcctggaatttgcttctttcccgttcttttcctgattgtctcgtatttatctcattggcgtcacagtctaagcgatctatttcctgttatgttttctagtagcacattaactttttttaatgtgtgtaatattgattattttaaaaaaatcttctccctcattgtatgttaaaccgccagagggaagggattgtgtgcttggttccccggtatttacacagtgcctcgcacataagtatgctcagtgaatattttaaaaatgaattagaggcggggagcggcgcctcatgcctgtaattccagcattttgggaggccgaggcggccagatcac

SEQ ID NO: 37994 - DNA, 691 bp, Homo sapiens
tcttccccacacgccccaattttcaggtagtactaagagtatgtgccaggaaactcttgctattgaattgagatgattaaaatggtgacttaatccgtagttattttgcacccactgaaaggaaagtgctttccagaataatatgaagtatctaaaagtgtcaccttttcttgcctgatcaacaatttgggcttcctgtttgtacaaggggccatttggcatacctttcacagcttttatcaggccaagttaaaggctgactacattttttcatcatgaggaaagcagttgaaatgaggcatgagttactgtgcattgggattttagaacaattttcttgtgacagctctttttgtgaagttaggttcttaaaagtgcccatgatggtcacttaaaatgtgcagtaatagcactgccaggatcaagcatgaaaggcttttaaattagatcatcccacagacaatacgtttgataatagttttttcttttaacctctttaagtattgattctgcttgagaatattgaagtacttgccagaagttgtggatttcagttttaacaaatgctattaaagtggagaagcacactctggtcttggaattccatttgaggatttagaagtgtcatgtttataactattcagttgtgtttgttgctggcttgttgtaaagcaataaaatttttttggtc

SEQ ID NO: 37995 - DNA, 398 bp, Homo sapiens
ccaccacccattgactatccaatgtgagaggaggccccgaagcaaaaccagtaagaggaatgcattccgataagctaacagatgtttactgcatgaaccaggtgcagctgctcttccatcgttattggcatgctctactatgagtccgtaggtcaggtgctggggaatggatggtatgtgttccctgggggatggggtgggaggaggtggttggcttatctctagtgtttttacaaaaatcctttctccctacaaattttaaaggctatggaagttcattagtaagttgaaaaaaaaaaggaacccatgagaaatttaaaaaaatacttacttgtaccacccagaggaaactactattaaaattttggtttacagtcttccatttttttttctatttc

SEQ ID NO: 37996 - DNA, 591 bp, Homo sapiens
cattctccaaagatgaccatgcctcccagtatttcttcccttgtatagtccttttcccttgaatccaggctagatctctgacttgattttgatccatagaatgcaacagaagagagtgcacggcttctgaggttgcagcttttgggagaagccatctaccattgatgacagacatgccgtgtggaaaccaaaccagccatgtggagaggctacctggacagaggcacagggccagcagcagctgtggagacagacatgtgagcaaagaaatcatctttgatgtacagccaagttgagccttcagatgactccgatttcagccacctttggactgcaaccacatgaaagactctaaatagaagcctcccagctgatcccggttaacccacagtgctgaaggggataataataaattgttgttttaagccactaagttttgtgggcctttgttgcatagcaatagattatccaaactattttttttattgcaaggtattctaggtgtctgctgagctcaggaaactgggaactccttcaaggcagggcctgcattttagcatttttgttattgtgagagctaaatccttcggc

SEQ ID NO: 37997 - DNA, 705 bp, Homo sapiens
ctccctgtcaggcttcctggtacctcttccctggctgctagctggatgctgaggccctggggtgctgagccactggtggagtgaagcctgggcctgaaaggctgggtgaaacagaagtcatgggatgggcaggtgagcacacacaccgtcacggtgttgatgcatggtggcataggattgtctgttacagcagccaggcttctctgactaatacagaccaacacgacttttccaggtcattcaggaagcaggaggagggtgctgcaggcagggggaacagcatgagtctagatgggcattgtggagcgagatgcccccatgtgtgccctaagaactaaagggttccaggattgcaaaacgacatggtgggaagcagatggggaaggtggaggcagatggagctggctgcagagagactgaggacatgcatgccatctggggttactcaggaggcagtggaagccaccagggactgttgagcaagagctctgatgaaatcttgccttggacatgccatgctggtggcactcctccaagggaggcacaggacccatgccaggctgatgaatcaggaggctctgggaatgacccgggaggcagcatgaaggcctggactaggaaagtgtagggaggcaggggcggagctgattaaggaattatttaggaggtagaattcaagggactcagtggttgtttttttagcat

SEQ ID NO: 37998 - DNA, 491 bp, Homo sapiens
gatggcaccatgaagaaggtgagtatattgaaaaaagaaaagatgtccaagactgagtcaaagagatgaggtagaaccagcaaagaagatatagaagtaacagctaaggtgggtagggggggaaaccagagagggcgacatcccagaagtcaaataacaggagattatcaaagagcagggattgatcaaccatggtcaaaggtgcactgaggacaaagaatcttgacagttacatctattacagcaacatgtgactcagtgttgacattagagggaacactttcttcttcaagcaatagaaggtcaagggagttgggcagagctgctatctgtaaagaaagggaatggctaccaggaaataaggggtcaacaccaagtctggaagggacacaagatcaagctggaagccgctactcccagattttggagtgggaggaaacagaatcttagttaaaacaggtttacaaacaagcaagaatttcctgagaaat

SEQ ID NO: 37999 - DNA, 696 bp, Homo sapiens
taagtggaatttcccacctgcctcagtgaataatttacacaacataaaagtgatcatgaaaccatagttcaatgcttacagaaggaagcaaggctgacttacagaagttactgtttcactagggcagagaaaattgtctcaggtgccttgaacatttcagctccctacacagcttgcagatgctctccccaaggtacagtggcctggccttccatcagcacagtcagtgagtaaatatgtcctttagtcatttattaaccgctattacataattgaacgactctaacctgtctttgcatagctcatagctcacaagcttttgaggaatacgaagtgtttattcaataaacatttgttaaactctgagagataattgtgcatgacatccttagatcagagtttccccgagtgttctatggagcactgtccagcccaatacctttatcaacgtaaacgatgggagagttaggggtacagtgctataatttccgttgcacaatagactattaaattctcgctggaggtaggtcaaggggaaaagagactttatgattctttaagtaaggatttcaaaaatcacagagattcccagaacacatttgttttcctcattgcctcagataatcaaatgtttgttgggaaattctgaactaagaaatttgttctactgataaagttgctgaaagaatttttaga

SEQ ID NO: 38000 - DNA, 680 bp, Homo sapiens
ggataaatatttgtgtgtacttttcaaattgccaactagttgagttccagattatcattcagagtctgacaggtaacaagtcacattttacacatgaaaagggtgctgtgttctctgccatatttgttttttttctttgtctgatgggtgaaactactcaagtcacagcatcttctaaagtatacccactgttcctatttgctattttttgctttttgtgatacaaaaagaaggggtaggaatttgctacatgaccttgttccatgcatatttgctacatgagtcacatgtacacctgtgacctcctgcaagaatgcaatcagtaccagagaaagaatttgccctcaaacctcctccatgagctgataaagattcctgagtcctactgactgcttgaattgtctaatggataagatgtagagtctttttagtggactaattggtatcctgtcacatgttaaagatacccaaaaatatgaattgtccaaatatactagaagtcatttagtcattgaaggtttaccacccagaggccaaaatccattcaagcgtcaaacaactgtgtctcactccttcaattttaccctgatggaaaatggatcctgctgatggttatctgaggcaaactctatcatgactggttaataataatcatatttcttcttggtatacctttacca

SEQ ID NO: 38001 - DNA, 1352 bp, Homo sapiens
aattatctttctaaaataatatattgaaactgactcacaatactaagttatatgagtagaatgacatctgttatagccacattctatttattatctttaatatattattttaatatacttgacattttatttactctttaagtaataaatatcaaataagagcaataaataaagctgatttataaattactgttcttctatatgagttaagatgcagtagaatataccctcttgagattactagactgggttttagtataaaacatgagtgcaatttgcccacatagataggttatgggaagatagttttgaaactcaggaagagtcactctgaagaattgagactggagttctgccaagagatgtgcaagtcaaatggaattctgcaactccagagagggagagagagagtagaggcttggaaggaggaagagacaaagttttcagttctcactaggcacagttgaaatttctactctgtgttttcttgaaatttaagtgactctttccaatcgactcttatgtaagtcagtctgaatcacttttggtctttgcaaccaaaggatgtattaaaaccatcttttgcttgtcagttaaacatatggctgttgtttaaatgtaagaatggagagaaaaggtgccacgtaattcaggagtctcttcatctttgtcacagagccttgaactatcttcccaataaatatttgatttgaatcttcagcactgaggggaagtgtcttctgaaataatacaggctaaattgttatgtagcagccatctatacaaagcaaatttttgtaatatacaaaagaggggattttgctattatatcagttggcaagaatcattatcgtgattggaaataaatagatacagagagaaaagaatgagatttaaaaaaaaaattcagcttcaaggaaattggattttctgttgagtatggaatcgagactttggaaactaaaaggctagaaaaagattgctttattaagaaaagtaaaaatacatttttttcatttgaaaaatgcctactagacaataaaacatctggctaaaaaatgaaatcttcagtgacacatctggatatttgctccataagatatcaaacatgaggataattgaaaatatagagctaaattacttaaatgttaagctcccatccagatgtttgatgctatgttagatgaaaaaactctttacatgccagacattaaagcaatcagggatatctaaatgccaccataaataaaatagcattgcaaatatggttcactggaaagaatgtattaactgataattacagactacacaagaaatttgcttcttagttaaaagtttttttaattttttta

SEQ ID NO: 38002 - DNA, 3763 bp, Homo sapiens
cagggaaaataaccacttctcctggtctttgcagattggttctgtgtcaggaccctcctcaacacttagacaggtttgcactggctagacaacagcccacgatgaaaactcaaggtcttctgaggcctttgctgagcatgtgtcttttgggtacacatgtagctttctgaatttctcagcatacttgtctccttttgttaatttctaaagaaacgctccctagctttcagttttgactttaggtagtctattgtatgctttgacagtcagcttttgtcataagcatctgagggtccttactttggcttgcaatgttcctggcaatactagctgcctttccagcctgagtttccagtttggcaaaacagagataaagaacttatgtcactcctacaggtagccctacacagggcagaactgataaacacaatattttctaataagatcttattcttttcactccagaccaatgggaaagggtcccacactgggaatgcaagctatagacacttgaagaccaagactgttcaaagagggtaaggtggcaggtcgggaggaagggagagtacaaaggtttcctagcattttaaagtaccattttcttgattctgtatttttttgattactataatgttttactgtattcctgaattctgacaaagttggttctgacaatttctgcttgtttccaatgtttctgttgggagacgaaaggttggagcttcctcatccatcatttcgcacatgtctaggtcagaagtttcctgattactgtctcttcaagtatttcctctgcctcatcctgtccctgccaccctctgaagctctcattacacttctgttagacatttcatgttttatctcagatatctgatgttctgtttatttcattcttttttgtctttgtatttcattttcaacagtttttatagatgtgttctcaagttcattgaactttcctctgctttgtagagtcagttgttaagagcagctaataaattcttcatttataatattttccacttctaatattttcatctgtcctttttatttctatctctctgctgaagtttgcaatttcttcacccatgttgtctacacatccactagatccttcagcattttaattacagtatttcattatcctgatttttaacaggatgtgttccctctacaattattctttgtatttaatgactgaagttggttttcctgattgtgacctctggtgttttaaggactttggttttaatttgttgtccaactcttggcttcaatttgctctccagggctgacaggtgttcccaagctctggcctgggactcatgcttagtcagtgagattctttttatacagcatgtaatggagcacagcaaaccttctctgatctatatccccatccctctctccgacacccttttgagactggtataggccccttcatgtagtaggacacttagttatgatgtcgctacattgaaacacagtgaataatagtataagccttagaatagatgcacctgcacttaaatcccatcttcatcctttataagctctttgatttggggaaaactcacttcactttttcaagccttggttccttaaattgtaggttagacagaaaataatacaccttgtagaatcattgtaaagattaaataaagaacaggggaacacagtgcctgacattcattaagcagtcactaaactgtaattgttattatttgctttatgactctaacctcactgagctttaatttctttatctgaaaaatgatggttatgttgtataatagtaacacagtatcatgtgcctttccctataaaataacatgataattttaatgactaaaattcagaacacaatttacaaattaaaaagtgttcttacacagatcacatttccccagaaactcaaaaggcaggtgttgtgttcccttcctgtagatgaggaagctgattctaggagactgctaccagggtgggtcataagccagtgtctgtgtctctttaatcctggttctgtgctttttacattgcatgagtctaaactctgcagggggaactcaaccgttcctattctttaggccaatatacacatatggtctcatgatttcctttcatttcccttaatgcattctaaacgctgctgatttgctgttttatggacttcttggctgtgtttctgagtatttttccatgctgcatttcatttcatcatcttctgtctctatttccaaatgtagctatttgttcagcctggttttgctctgtgaggtgttatttacaatacttactaatttaatctttgttcggggaaatccaaggagcaattgcatacttctgtgaatcattgataattcaagcctggaaaaattcacctagcactaggatcctgctctttttttgttcagtgccatatgtatatatagtgccatacgcatacatatgtacagccttattccattctatactgtaattgatgttattttgattgttttgtagccctttgaagcagatcccattgcctacaaaatgaaaatgggtaaatatcattcacaaaatggtgattgattgcaagcacggtttaccatacatctaatatgaacagtaatgtattccctaatcacaaattctggatacaaactcagaagccaaaaatgtgtgacacttaaaacttgagaaagccaaaactaaaagggaattcacccagccattttcctgttcccagcagatgaaacatacacagcaacctgcagtaagtcacatatgatgcacggcacatgtgggcagtcagagcctaccaccacactgcctgtccccagacctttctggaaagcatccttgtattaactctggatttcattctagcattatttatctgactgtttcttcatgtacatggagttggaggctttgttaaaaaatccacttaaaatactaattttaactactttcccggtgtgtaatgcatttctaggatgcattacttaatgcagtacatcaattagattatagaatttaacaccggattcaaatatatatttatttggttagaatagcaagcaattataggaagaactcagcctgaagaaggagttttagtttcccatttctgtggttggctactactaataatattatagttgctatgattttagagtttgactaaatatcaggcactctgctatataaatacttgctttttttttttttttgagacaggactttgctccattactcaagttagtgtgcagtagcgtgatctcaactcactgcaaccttcacctcctgggctcaagtggtcctcctgcctcagcctcctgagtagctggaactacaggcatgtgccatcatgcctggctgatttttgtatttttgatagagatggggtttcgctatgtcacccaggctggtgttgaactcctagactcaagggatcctccctcttcagcctcccgaagtactgggattacaagcttgagccactgctcccggccaatacctgcttttctttaatgggtgctggtgaggttaaaatgaaattatttctgtacaaggcaactgaatggctcttgagtaatcataaagaacattgtcatggtttagatgcgtgtctccccaagcctcatgttgaaatgtgatccccaatgttggaggtgggatctactgggaagcattaagttcacaggggcgggtcctttatgaagggcttggtgccatcctcacaataatgagtgagttctcactctattagttccca

SEQ ID NO: 38003 - DNA, 1282 bp, Homo sapiens
cctttaaaaaggagagaggaaatatctgctaataccaaagacaaagggtaaataaatttaatgcctatgagggggggaagaaggcagattttccacaaagtaacagcgattactttgacaatagattttatcactaaaaataaataaggtcaataaactattatccttaaagtattcagtttagaatcctttatgatagttataccattatactatgtggtgggtgtcagagtgaaggcatttaagaaatataaagactataaaagcttattatccacccatctggaaaggaccactaaggttgtagctgaggaaacaatactgtagtttaaaaaagtaaggttcaaaataaaatcttaacagcaaagtgttgaaacatgctttattagtttttcaatactgtggtaatacaaactaccacacatgtagtaacttaaaattaacccagattttttatcttatagttgtggaggtctaaagtccaaaatccttctcactgggccaaagtccaggtgttggcaggactggcattttgggaataaccttggatagaattctttttcttgcctgtttcagcctctcaattctacttgtaattcttaggtttttgctcctatctccatcttcaaagccagcagtggtgcatcttttaacctccgtgacttctgctttcatggccacatctccttgtctcactcttttgcctccttcttttctgtataagagcctttgggcccatgcacataattcaggacagtctctccattgaaatatccttaatttaatcacattttcaaagtctttttgccatgtaaggtaacacgtttacagtttccacagattagggggactaatccaactttgggggactacttattctgcctaccacacatattgatagagctaaaaaaaagtactatacaaaaaaaaagaacagtgatcctgtttttttttaaaacagagcaagagagaggaactacattagtaatgttagtaaataaacatcaaactaactgtaaagaaaataaaagttaaaataaaagttaaaaaagttattcaaagtcaaagtattaatacactattgagaaaatcaatagagcaaagagttggtcttttgagaaaacaaatatgtttgataaactgctagaaagaataaccaagacaaagcatgtataatgcacaaatcatccatatcacaatacgcatacataaaaagttaataagagattatgaattgttatatatgaatcaatttggaaacttagatgagatggataaaatt

SEQ ID NO: 38004 - DNA, 4925 bp, Homo sapiens
tagtcaagatttggatgttttgaatacagtcacaattatggtctcagaaatactttaaaacacattcatcagtcatgctcttattcagaatcagggcacaaattttaaacaataaaatccatgtgaacttaaaaatatgccttcgagttattgaacatctaattaaattgcttatttctcattatgccttctctaacaataaatgattttcattcctgaatcccaatgggattttcctggtccacttgtaagttgtttatttagatacacaatgtgaatctatatgttgatttattttgtaatggttcacaggactgggctactttcctctgagtgagggtaaaattaatcagtaggaaatgaatattgtcagtgtcaatgattataagaggaaattatatgtgggagcaagagagaatgaagcagattatttgtggttaggagttaattcagagggatccatgcataatctccatctccgccaatttggctgttttactcctgttgccatcatgccagcatgggatgctcaatatcagaggctggctgacatcaactggatgaaaccatttgttgattgatggtttattgtttcttccatggtgaatgattgctactgggaaataatatgggatacaaagatcttcaaacattatgctcacttccatatatctctctccattcagatctccttttccccagtctctaatctttctccctgcaggcacctgtcccattgtccagtccgttggtcatggctcatgaattcacacataattctaatcccagactatttctcttcccacacacaatagatgaccagttttactgtttgaagctctgcccattgggagcaattttctttaccactctattttaaggtcactcctgagaaaggaggtaatgcaactacagactatttttaccttgcatccacatatctaagcaaattatccatgagctaagctaggggtatttcctcctccttcatttggttgtggatctctcatagggccactggagtgatctcaagagagttggcactggtgcagcagtgaggagtgtcacagggctctgagatgcttgctcatgcagcttgcttgtgccctcttgtcttgcttatgcttagccattgatgtgactacatacattcatctgacaccatgtgccatataagcgatgcttaatcttaggactcaatctggacagaacccactcatggcagggctgcttacatcatagtctagatctctgaagagcccttttctgttctgggtcaccctcaaatctgccagccttctgcacgattaaattataggccatagcaatattctcgagtgtagaaaacgctgtttccagatcctgaagaagtctaccaggtagaatgattccttctctgtggtggtaggtgagagatgcaataatttgctttttacattggctaagatgtcccatcatatacctaacctatgtgtcctaaaaattataatgagatgagaggcccttgaatcttagcaggattcatctccttcactcaaaagtgcacacatttactaaggtttctgacatgtcattgaaattgcctttcaaaaattgtaacagttagataaatctaacatagctgactctgtcttgtttctaacctcgcaagcaaactgcctttgcccatccgtacatgtaggacaagctaactatgggaagaatttagtttatagtttaaagcaagaatgatagtagtctcttcccaaaactaatctcccacttattcaggtactgaagtcgctccttgtaaagctaataaaaggccataattttagaattacagtaagatcctgaattctgctaatgctaggcatagttaaataataactagtcattgtctcctaatagatttactgctcaggagtcatgtagccagaggtcacaaaatttgtaacttccctaattgccccgagagacagcattgctattgcaaaacctgactggtgtttgcaatattttttagagtttgcattctttgggccaacagatgccaaccaggctcatgacccatatcaaaaaactgactcaactgctcctgtgacaacccagaaactgactcagtgcacgaaggcaattttgatgcccgtatgatttcatccccaaccaagcagcaaatcaaattccatagccccttgcccaccaaactgtccttaaaaaaaacctcacctccaagttcttagggaggcagatttgagaattatctcccattctcctcacttggctggccctgtgattatggaactctgggctgcaacacctgctatgctcaatgtattggctgttttggaaacagtgggcaagaagaacctgtcaggctgttatgttcccagacagaactggggtccagctgcttgttctcatggttcaatcataagatgcaaacagactgggcaagaagggagtttctgcaaccagttacagggagaaaaccagaataactcaacagaccaactcaaagttacaagtttttctccagtgcttataatacattcaaaccatatgcctacgtgtgggaaagcacctacaaactgaagtgtttcactctgtctaatctttaactagggttcagatctggaaattacttcagagcctaggaacaattatgtaatctaaagtgggtcttggtacaaggtgtgcaagaatgcctccttttattaattaaactctaatgtctgagaaagcccaggtggggtcttaatggacttgtttttacattctaacccttgtactaaggcaccagtttctccagttctttaatgcttaagttatacactcatcagatttacactaaggtggtggtgaaggatgactgccctggttgctaatggagacctggcctgccacaattacactagttatttcttactcattcctcagttagcatcatatcattgatggagtggatcatgtgatgttgagtgagatgcatagataatctagatttccttggactatattttaacagaggttgggggcagttaacataattgtgggacaaaacttgaaacatttgctgtcgttcctgccttgtgaatgtgaattttttcagaactgctttttctgctaagaatagaaaagagtgtattcaataaatcaatggccaattataggtaccttagaccaagctaatgtgcttttgcaaggattccatatttggcatggtggctgcaattgtggctactattactttgtactttgtagtggcagcttaatatcttccgttgggatctgtttggttactgcaggaatcaaactggtaaatcatggtgtttgttgggaccaccagcctatgtcctttagatcctgaaggtgcttctattaatactttctgccatccatcccctgagagtcaccagctgcccaatgcaatattgttttagaaataccatctagataatgtaactctgtgtcccatcatgcaaggcttggtaatatatttacttttgtgtttacttttctttctaatccattatctatttctcagccaatatgagctttttaaaacacaaatgagattatttaatttgtctgctaaaaatccctcaatggctttctactgcccttccaataaaatcagaatctctgattaaaaactaacaattcttatgatttttgaccctgactagatttttggccttaaaatacatgatcgtccacctctagcacaagcctccagtcataggattttttgcatcttaaacacagcacctttcccatcagggcatttggacttgcctttccctccgctaagagtgcttttcccagcacactgaaggagggcttgcacttcatctttttattttcaactcaaataatacatcttcatgaggtcttacctgaccacatagtccctgaaaggttcaccgaaaagtcactggcatgaggcacattgattaataggagaagagacataaacatttatttaacttctatacgtgggagccttaagaatgaagaccagcttcccaatgagttacagaaatgtatataccatcttgaggccacagtaaagaatacagactcagaacatggccagaaactggttatattggtaaatcaggcttagtgaaaagacaggttatgagagagagaaagaagcttgactagcaaatgtgaccttgttatgtagatgaagcttcccttagaatagagggtaaatgtttctcttcatactttaaaggtgtcagactctccagtttcttcaggatctggaaaagcacaggaaagggaggcagcctggctgcattgaaggaaattctctacagatccaaattttccccacaaaagacagctttgcagggccacttttgtttgctagccaagtggcagccatttcaaaatatgtcaaaaaatacattttgagggtaagatcattaaatttcctttaccaccatgattaaggtagcagctccatttatatttccttcagctagtttttctgcgtatccacttgcctgtttgtgtgtccacactgactagaatatgagggcagcagcaggaacaacagcaggacctaggagtggttgtgacttcttttgatctcaaggaggttcttctaaatgttgattctactggaatatgacataccagtagacagatggacagacatctaatctgcatagatgggatttggagttattgtaatctcaaattaggaagtcagagaggttctttatatcctaatgggtgaagctaggtatacaagtttcatagatatttttgtacgtatcaactttggtttaaaattaatctagtacttctatttttaaataatgataaatgtatgacatatagacatgcacttgccacccacaattaatgaatgttatattttttccaaactttttaatgaagccctttattccatatatatgaataaaggg

SEQ ID NO: 38005 - DNA, 581 bp, Homo sapiens
tctccctcatgtcttacaactaattttctacttccccacgcataatggatctcacagcattttgttgcattcctatacacattcaaatttttaaaaaatatatatatatccataatttcttgtattgttttgtttaataatttatataaatgcagttacatcaaatatattatgctccaacttgctcatcttaaataatagctttatattctgagagaaatccacgctgagcatgtgactctatttaaatcttacctgttgaaagggcccttatgcgcagagacagactgtccccctgtaggtcctaagaggagttcagtaactgccctgatctctgaactcttggcaggtctcccagactcccagttcttgtcaggacgccctcctcccaattgttctgccctgaacggattgtgttttctccactatctgccctgcaaccaagcaagcgttatctccccatttttatcatcacagaaaggccagccttccaggacatctctaatccttcaattctaaccccacatgcattcaatacatcaacgtttctcaatatttaatgtgcatattaactacttatt

SEQ ID NO: 38006 - DNA, 1245 bp, Homo sapiens
gccagaatcttgtaccaaactgtaaccacctcttttccaggtgagacagccagcaaagaaagacacatgaagcaaatggagccacacgtgatgatcatactgatctctgctaaatcaagctacagcacacaggagtcccaaagcttgctgggccttctctcacctgcatgttcactcttattaaattatgatgagccctctgacaaactgtcatatttgaaggaccttttaccagagaagaggagggggaggaagagagaaatcaaaaaagataagcaaaagggctgggcttgctgtgtgatcacagataaaataccaaacagttaaataatgctggagggtgacctcttatgtgacccaatcagagatttgacatttatctcctgaatgtgacatcccatctcatcaaggatttgggacagtggggatgaggagacacgttctctctccctttccttgctcagccttgttctctctgtttactctttgggcttcagtgcacttttgtggccaagcccagtttgtggcctgccccttgcatggccatctctgcagtatcagtgaaaactcaacagcccctctgtgtggccacactttttttcttttctaaaaacaatgagatacttatatccaccccatgcaaattcctccaggatattgctcttgagtcatccttgagaaatttccgtcttgaaacatgtctatctccatgttgggaaatttaattagtactcctattgtagggattagggaaagcacaactacacttttcatcagcttcaatgatttcaccaaagggcatttatttacttagttataccagctgtttgttcaccagataccgtctcctttgaccctatgtgcacacaaacccacgcacagcggatgttgactatgagaactgataatatcacacccattttagatacatcattgaggcaaaaagggacatttatgggagatatttttctttttgttgtggaaattctgacaatctcattttattttctcattcaaattattaaatgattctctctctctctctctctgcttacataggggtcatcatttgttcttttaatccatttcaagagcatgtccccttttgccgtattcagggatgattgccccctacctgaaccccatcttgctccaacaaacaagtcatataatcagagatcgcactcttagtcaaaagtctgaccagttaaagaattaattgcctgcgccagggagtatggaaag

SEQ ID NO: 38007 - DNA, 545 bp, Homo sapiens
aaggcagagcccggtaacaaataggaccaacaaagaatttgtggcttctggggcctaatacttatacatgtaaaagacaggtgtaactggaaggcaaagtactaagatctttaaaaattaaggacctaagcatgcaaagaaacaaaacaaatctgaatttgcccgctgcataatgaccagtactgtaattgctgccaattatctttaaaattgctggtcttgctggtgactcatgagttaataaacacccaaaggtcgagtgtcctcttacagtacaaagtagcccttggtactcctaaaaacccaaaagatcacacagctgactgtaaaacagtgcagagcttcagacctcagtggatgtagtccaggactctcggggctccatgaggaaggctgaggagcccaaaaatgcgttgtgtggtgccttttctgtgttccttaaggggtgtctggattgctaaaggcctatttttgatgtttttatgtaataaccagaagtgtgatgttttctattggtaattttttatccactgaccaccaaatgg

SEQ ID NO: 38008 - DNA, 987 bp, Homo sapiens
cctaagtaatcaaaagacctaacatgacagtataagatacaaagaacgtgtttctctctctcctctctcttttgagagtttttctcagtccattttgtgttgctatatcacaaaatatctaaggctagataatttataaagaatagaggcttatttaactcgcacttctgcaggctgggaagtttagccctggcttctggtgaaagctttcctgctgcatcgtaacatggtagagaatgtaaaagggaaagcagatatgtgcgaagaggccaaacctgtgagcagtctggctttatactaaccggttcttgttgaaactaatctatccccatgagaactcattcagttgtaccagaacaagaacccataaattattgacagaatggctccaagccaccacaagggcagagccctcatggtccaagcaccacccattagtccccacctcccaatgcaaacacattgaagatcgaatttcaaaaagagttttgattaagagaaataaaccatatgcagaccatagcaatttcacccctgccccccaaaactcatgtccttctcaaacaaaaaatgcaatcatatcatcccaatatttccaaaagttttaacttggtccagcaccaactcaaaagtccaaagtctaaagtctcacctgagactgaaggcaagtttcttccagttgtgagcctgtaaaatttaaaaaaaaaaagttatttatttccaagatacactgctggaacagacatttggtagacatcctccttccaaaaaagagaaataggccaaaagagaggaatgataggccccatgtaagtccaaaacctaggtcaggtgcagtggctcacccttgtaatcccaacactgtgggaggccgaggcaggaggatcagttcaggacaggaatttaagaccagcctgggcaacataattaacattatttaaaagttagctggatgtgatgatgtgcacttgtagttccagctcctca

SEQ ID NO: 38009 - DNA, 736 bp, Homo sapiens
caacattcccgtgactgttaaagcttattccgctcactttctccaaaagtaatttaacaattttttgaggagttcatctctatggatactgttctcctttaatttacttcatccatcaggctaaaaatagaagatgtcgagctttaaaaaaaagtgtgaagttgaaaatcaatggaggtgaggtgctgatttttaaaggaacactgtcaagcctgatgagcaggagactcaacacacaaaaaccttaaaaatatcattttttaacaccttcctatttccttttctgtgaaattgctcaatgcctacactgtaggctgcaactttgtgaaactctatctttgcttctgggcactcagccaggacaaatcaaaatcccttgaatatttgtgacatttggcaagcacaccttggttccctgtgcaattcaaatatttgtcctccctctaactaatttccccctcccccagttgaatgaggaccattgtttttagtcattttgcaaaccaagtgatttcatcagcaagcttgtgcctcactctcagcaagcatgggtcccactcacaggccaggtgagagcttctgcagtgcagaagatggcacacagggcaccctttggcaaaaacaaaaacaaataggcctgaaattctgcacttgtggaaatgacagaatccttgctgtgtttgagggatgttttactgaaggaattgaccacagtcgaaacaagaaatacaaactc

SEQ ID NO: 38010 - DNA, 1344 bp, Homo sapiens
cctaaataattaaaataaatattataaaataaatacactagaatagaattttcaaatatggaagaaaggaacagaaagaagaaggaaatgtgggaaggagagtatacaatttacccaaagtcacatggttaatgactgggctgaagtttaatctgaagcagacttgtctggttctattacatgatactacctaactacagaagtaatgaaagcatgatcaaggcaaacaaattaaatgccagcttgttacatagacatcagcatggatgtcagtcacatctcagtcatatacatgtgtactttaattccaggaaagatgtcgtaaacaaaggacccctgccaaaatcctgagccactccaatccagcctttgctgaattcccaaagcctcctctgaaattgcagaactattgtctctttctgaatgagaccatttcactatctctcattacctcaggaaagacataagtaagaaaataatcaggactttgcccttgcctttctatcctaatttcttgtaaaaatttcatccttagaggtagctccaaattctggctttgtaggttggtgtagactttagtactcttccccacattctctatcagaacccaaagccactctcagtaattattaacaatgtgttaggcaaatgcggtaaataggctctttgcattattttgcatttctaaaataaattgagtaaacatagtctacacaacttccatgttgcagcccctatggttaacagtcttggctgagaaaatttaagtcttctcacaaaaaatatagcaaaagtctgaggaaaaacaaatagccaaggtacaaagttcactaaacatctgccacctgtttcgccataccaggaacactgtctataaatacagcagtattcttgattattgtgggtatgcttttgttcatgattttgatcgagaacatggtttatttctttccttttgtaggtctatttttatttgttaaaaaatgacaaactttgtgaagtttgagcttcctttttggcataaatagatgcaatatccaattgtgtcaatatttgtttagttcttttaaaaggctcagcatggctcaaagccattgaaacagaaagtagttcatttatgtgtgtttacacaaacacagggacctgttcatattctaatcaagatctataatatttcgagcttatctgtgatgttttcaaacttttttttttctttacctactcctcatatacacacgaatctctcttacctcattaaaatggatacctgttctttctttcttctcaggatgacattcaatatatttatctttcttattctagcaaaatatttacagtaatcat

SEQ ID NO: 38011 - DNA, 808 bp, Homo sapiens
agaacctgttgagtacatgtggaaaggcatactagatttttataattggaggatagaatcgaatataagactagataaggaaaagatcactaaatcattaacctaggaactgagataatgtttctacaaggatccctggatctggtcctaacagtttgctggggtagctctttgaagttatcaattcaacaatgattcacagaaattgaaggagagttgccagaaccatgttggcacaatattgagataaacagtcaaagtttcaggagggaacaatgtcagaatgcatttattatataacatctgataagtcaccattggactgtgttctttggggaggccaaggttagcccctttgttgaggcattcaacaacgtaatagcgaagtgggtataagcatgtttcatttaacagtaatggctattccccgaaggccaatattgatggaaggagaggctcttcagatgctaagttatctaatgtaagtgataataatagaattacagaaaatcagaggacaggtaatagcattaaacagtcagagacaagatgaatgtggcaataagagaggctggacagcagtgatctaggtcaatgtcctccctagggtaaagagagatggacagccaaagatagtgttgcatgcttttctattgggagaacccacccccaatatttcaacgtaggttctttctattttccataactgtcggctggctgagaaataaagagagacagtccaaagagaggaattttacagctgggccgccaggggtgacatcacatatcggtaggactgtgatgccct

SEQ ID NO: 38012 - DNA, 1105 bp, Homo sapiens
gaaagctagctttccaagccatagcattccctttttttaaaaaaaaaatacaggattctgggttccgacacgatttactgcctttgggaagcctgcacagtagcatctgacagctcatgtggctacctgacctccttcacctcctgtgttttcacttctggcctcatctcccttgttcctcttgcccccaagacaaccactttctgaaaaacaatcgataactccctgatctccaaagcctgttcttgtactcgcagttctagtgtttctgaagcattaacttatttcaagcaacttccgaattttgtaatgccccaccttctgagtgatgctcttacttcattctgctctacctcctccgtataccctctgaaggctttcttctctctattgcctcgttgccctcacagtgattttcttggtagctgggcaagtctggcaatctttaaaacagagataacagactctgccagatgacctccgggcactgtgaaagttaaacaggataatgaaagtaaagagctgtgtaaactgccaagtgtgaataggtatgaagggtgattcttactaaattggaatggaatgaagcaaggcacttcactccttttttcctgaatttctgagtcttcctactcgtttaaagaacatttaaacccatctcaatgtgcctagagatgaaccgtcaagactgcttagtattttcacccatcaaatggataattccatcctttctactttccttcttttctacttgacatctgatttagagaagagtgtggaaacttacagtaatgagtgaagcttcttcttctctactcctcaaaatatcctactgcccttattattaggcaaccaatataatgtaactaataagaactaacacagagaagtatattttacttttaattagttataattattacctagtacttgaaatttaatatattctttccctccctctttgcattggttacgtggattttagtacaatgtttaacttgaggccacacagaacagtgatttaatgctggaatgttgacccggatcgacaaaggttttattgtagattacaaaactgcccacaattggccttattttgtcctat

SEQ ID NO: 38013 - DNA, 847 bp, Homo sapiens
atgagtacagggcccccaaaggccaacaagacagggactctctccagggacaaatgccccgcagctgagagaggccgcccagctatccagcggccgcgcagccagccaagatttcaacacaggtctgccctatttggtcaccatccccgacagtgctgggccaggccatcatgtcacattggggagttttccctgcactccagggggaattctcaaccacaacctctgtatccggtagtggcagatggaaagagaaacggttagaaaagcgtggttcttgcgcaggaaagttggagcaaagaagagttcagaagtgggcgggtgtgtgtttaaaaaaaaaaaagggggtggaaaccccaccagccaagtctgcagaaaaaaaataaatgaagtctgcctatctccgggccagagcccctcccctcggcccgcgcgggaggagtgtgacccaggtgccgcttcctctcgccgccgagggtcaggagcccgggagcgcgaccctcccccggcccggcctggcccggcctggccagtccccgcggtctctgcccgggctgacgcccaggaatgtggtcgacgagaagccccaacagcacggcgtggcctctcagcctcggtgagtacccgccgtggggaagggtcctggggacccactggaggccgcggcccgcagcagccaggggccgagccacggccacggacgccctggtgtcccggtccgtgccgggcctccaggcggaggaggcgtccgctgggctcagatccccgactccagccccggttccccggcgcctgggctgcgcggagtccctgtcccgcgtcccggacccctacgcgcagcctccac

SEQ ID NO: 38014 - DNA, 1134 bp, Homo sapiens
gctctccccgcccccgcctcaccccagcggtctgtcccagtgccagtacactttctgctctcccagccgggcaccttcgggcttagggatcccttggagggaagcccgccgggaagctgaagacagtggtcaccgccctcggtcattacttcccgggacccggaccctaaccctgcgccacatctccacccgcccccagccgtgtcctggctgcgcagctggaaaggttgagcagctcactgctgtccctctgttcggccttggacacatcgcctgaactcctgggcgcctctgctgttaagtgggggacagcactatttactggggaggaaaactccaggaatgtggaccctggggccacgcaggggttgggaagtgaagggcagggaacgcgggcggcgcccggggtctgcgggtaggcaggcggcctggccgcggaggcttccccgagtcctgcgccttcctagagagggaggggctcatatcggctggcacagccaccacgggtaccgaaacttggggacgtgcccgaccatgcctcctccggtggcccgggggccaccccgcattgcttagaagtctcgcttcccgttcctcctctctggttcagctcattactcttccggtgaccctgggtatgccacgcttattctccaggcctcagtttccccatctgtgctgtgaggagtggaaggaacgggatgactaggagccttttaagaccgagtattcgaggttctttccggccccgcggagccaggaggtgccagccgagatgcgcgtgccgcgcgcgccctccagtgcccggttcccgcttctgcacggtcctcgctgggcaagggcgtcccaagaaaggaggaaaggaagaactccatacattgtcattattgtgaactgatgaacaaaagagtcaatagggaagggaatgggtaaataaacctcagaatgaagaaataataggagagtggtcatgagtgcgccagcgcatgaatgaatggactcaaaatgaatgcacgcacagagtaaatgagccttgcctgtgaccattttcaaacatgtcatttctaacaaaagtcacacagcagataagactgtgtctatggatgacatgaaacctgcccaccctctcttaac

SEQ ID NO: 38015 - DNA, 1135 bp, Homo sapiens
gtccctctctccaagaggcggcatctgttttcctgcccttgggtcggcctggccctgagaggtcagcaggagtctgcggcagtggctctgtgcctatctgggtctcgccttgcggaggaacttcctcttctcccctcctcaacactggcttttagggtcctccctggaggagcacagccacaggagcggctcgcgtgggcactgactacggtcgggagccccagccagctcccagtcgacagtcagcaccactgccagccccgggagggccagccccgtgggaggaccaatcccgtggaggaccagccccgtgggaggaccagtccgtggaagaccagccctgtgggaggaccaaccccgtggaggaccagccccgtgggaggaccagcctgtggaggaccagccccgtgggaggaccagcctgtggaggaccagccccctgggaggaccagctcatggaagaccagccccgtgggagggccagcccagtgggaggatcagccccctggggtgtcagccagccgagcctgcaaatgcagcagccccagtcgacaccacgtggatcagaagaactcgtagaaacgtgcgagaataaaatggtagttttaagccactgagtttgggggttgctttgtttcatagccaatattaatagatacccgaggcattggttttggcgagggccacgcacagcgcaggtcggggcctgggagccctgcagggatcagatgggggctaggggaatctggtcaggcccagagccgggttcccgaccccagctccgaagcagctttctggctacggccgcgcaagccgcggagccaactgcggggctctatctccccctggcggagcagagctggtacttcagagcgctgcctgacaagcccgctcccccgcgccacctgctcgccctatttctggacccggagccggcccctggccccggaggcctccagctgccaggatagctcggctgtgaggccgggcctgcggctgtaccagccctggctgcctgggtcaacaagagtgccagcccccggtgctcaaccgggctgccaatggggttggagaagacagcaggaagcactctcctaataaatgaggggcttctggagaggagctggaagcaggg

SEQ ID NO: 38016 - DNA, 1061 bp, Homo sapiens
ctgacctcaagttttagataaagcctcacttccttaaccaattgcaaattaaagaatctctgaatccacctatgacctgcaagcctccgcttcaagatagcttgccttttggggccaaacaaatgtatggcctccatgtgttgacttatgactttgcctgtaacctctctctccctgcctttaaaaacccttacatgtaagccttctggaagctcaggtcttaagcgttagctacccaactctctttgcttgtcaccctaaagtaaatacctttctttctctcactgcaaatctcagtgtcaatgtttggcttgctgcaccaggcaagtggacccaagttcagtttaactgcagagtgaatgattacaccatcaacagtagatggggccaggtgcagtggctcacgcctgtaatttcagcaatttgggaggccgaggacctcaagtaggcagatcacttgaggtcaggagtccaagaccagcctgaccaacatggcgaaaccccacctctactaaaaatgcaaaaaaatattagccgggcttggtggtgcatgtctgtaatcccagctactctgaggcacaagaattgcttgaacccgggaggcagaggttgcagtgagccaagatcacgccactgtgtggcaggccaggtgtcactaacgcaggcctccataataactgtttcagtactgagtggttaagttaaatattaaaagccagtgctccaggaacagaaaaccaaacatggcatgttctcactcataagtgggagttgaacagcgggaacacgtggacacagggaggggaacatcacacactggggcctgtcgcggggagggagccaaggggagggatagcattaggacaaatacctaatacatgcggagcttaaaacctagatgacaggttgatgggtgcagcaaaccgccgtggcacatgtatacctatgtaataaacgtgcacgttctacacatgtatcctacaacttaaagtataataaataaataaagccagtgctcttacacaaaggctgtgatgtaacaaaagcccatcaagagtttg

SEQ ID NO: 38017 - DNA, 1224 bp, Homo sapiens
gtgcagcttacctcccagaggtcccatggaattgactgagcgcagcagtgagggcgagaaggacagttagcacagaggttagagacagggcggcaagcagtccccagggaccctacccccgctcgccccaggccatccagcccagcaggcacaggagtggctcggagccaggtagactccaagatttgcaggtggccgagctcccgacacctctcagggagcttcaagaccccaagccaggatgcttctgccccaagcgatgagcacaaagttgccaggaagtgttcagtaaccccctactgagagttctcccagctgatcaggggctgcttcctgccctacaaccaggaggtgatgagggctgaaggctgaggtgccaggggaagggcagtgacccaggcctagctggggtcacgtggccaataggcaacatgagcccagggttgggcacctggaagctggtgggcccatgggcagtggtgggcacaaccaacctgaccagagggcgtgggtgccttcacagggctcgtcacgggcgggagggggtcaaagtccaggtccagcagactggcctgctccgagaaaggccccggggcctcaaacttggcagcagcagcagcagcagaggaggaagcagttagtgttaagctgggagccctcaccccaggcagacactgcaggcacaggcacacgcgtggacacacacacatacacacaccacgcatgcagagcaagcgcacatacacgcacacacgctggcacacagcccaggcaccaactcatccacctcacacacgggagcactgcccaaagccacgcgccccggcacaggctcccgcccacaccaggaggacgaccccagtgcccgcctcaaactcccagtcataggtccgcccgtggccgccaccccgcagggccagcaccaggccccagctctcttccgccaccatccacagactggtgggcccctccccaccaatgcccgaacctcctctccgctccctgcgccaagagttctgctgatcttgctaccccccagtggcgagagtaacaccatgccacagccaccctcagtgctcccgactgggaaagttccaaaggcagagacttcacactggcttttcctccaccccagacagggaggtcactctctggcgacaccaccagccgtcagctccagggacggagaaagagtggagccagccacaaagcccaacaggccaa

SEQ ID NO: 38018 - DNA, 494 bp, Homo sapiens
actgcacacagagccagattacgggttagtggcacctgggagcagggcgcaaggcgcatgcacagggccagccagggcgcgggcctctgcgcccctccgcagcactcactgccggtacctgttcttctttctgcgcagccgcgaaaacagtttacttttctttctgtggggacggacgggaggtggaggccttcattctggagaaaggccaggtgcagaactggcctgtccccttccctctttgccaacccttctgctcagaggacaaaggggcaaaagcctctcctaagtgccagaggccttgcacagggcctgggcgtgctatcccggggtgccctgactggcccctgctgtggccaggtgcccgaggtgatgctaacagggcctggtgaggggcaggaggctcggggcagtggagagtcaccctgcctgtggtcccagtccccaggagctccaggtgtgcccagagtgccagaaaaggcccccaggcgagc

SEQ ID NO: 38019 - DNA, 1909 bp, Homo sapiens
ttgatgagctcctcctcggcctggggggcagcacgggtcattcccctctgttgggcgtcccagccagcccagccccatggccagtcctcccacctcctgcccacccctcttggccagtgcgctgggaccagggctccgggcaagacagaggctgaactggatgtggacacccatgctggcgacctccccctgcagccctccaggaccctgaggacatctgggaaagggagggctgagcagccgttgccaaagagaggcccacgtggccgggagggcagtgagcgtggagtagggcacaacaagaggggcaagcctggggcttggcgagctggacacgggacatgcacagaggcagaccccagacccagccaagtggggaccctgcccacttccacaatgaacctcctcaggctaggtgccagccctgccactgccttctggctctcagggcagcatctgtcgctgcccccaattgcccccgcccctgagtgctccctccccatttctgagggccagctcctggcagcctcagccaccagccttcacttcacctcccagggatggtccttcccacaaagccctctcctgggacctgtccccaccagagggagaccagaggcagccactcaggcacctctaggaatgtcagggggaccctagaggagggtgcagggccagggaggaggcagccaggcagctgggctgtgcctggtcccactcctagcccacaccttccccagggcaggccctgcatcctccaggcactcacacccaccaggcagtggtgctcaggccccatcacacggccacagagtgctggggaagggactgcgggcagcaggtgagtcacagaccctgcccggtgcccagcccgcccagggaaggggctgtgctggctcactgcgggaggacactgccggcgagagtgactcagggattcggggtctgagtcacagcccaggaaagtgtcaggccccgcctagggaaacttcccgccagcagcctcacgttctcaggccggggctggggcccaggctgggccgccttctggcaaaggcagccagatggccggaaggccacttaaccacaaagcacacgattgccccaagcccagccagctgtcccatccagcctcagacaccaggactagcccaggtcagcccctaggcccagtgacttgggttgggactggaggaggggccaccatggcttctgaaaggttacctccagctactcgctagagtgggcgtgggctccttgcctggcttttcagaatctaataaaaatttaaaggcagaatggggagcggggggtggggaagaatgtctattccaacatgcacacctctcttggatccagggaccctgggcaccccacaccaggaggggaatactgcccctcctccgtctccaggctatggctgggccatccctgccctactcccctgggtgtcccattacctggcaggggggctgccaaccatggttctatggaactcataaaatgagtgagtcctaggggtactgttgtgagctgagcaccatcacacataccccctgccctcaactgccaacagtgggtctaaagtcccacattccgtaagaacctgcctggaccacccggctcctgtacccactaggaccccctctccatgaggatgcagccaccacccccacaactccccagatggcaacggtggggacagcagtgaagacagcaccgcagcttgtctgtgggaacatctgcacccagccgtgctctcaccgctcagcaacgctgccgagagcaagagcggggacagttccgcttgagttcctggaagtcaggacccgtgtcttgtattccctttgggtgacattcctcatattctggctctttaggaagcatgtggaaggggcagggagtaagg

SEQ ID NO: 38020 - DNA, 1074 bp, Homo sapiens
ccctccacgtctcagcatcccatccagactggagggtcctcccagtaactcctccagagtcaccacggggaccacaagtccgaggaaaatgacgcaggggcttcagtcaggagagccccaaccctgcccctaaccggctctggggccctgggaggaggctgtgatgtgcctctctgggcagctttctctgctcagtaaattcaagatgatctcagagttgtcatgtggcttgaaggacaggcatggcagtacaggggcctgatgatgtcgcctccctccccagaggagccctcacagaggacaatggctcaaaggcattcctggaccactaggatttcagaggagtctccaggaatgaccacagatgcagccacggagcgggcatagctatgcccccacccaggtcacacagagcccctcagccggttctttgacccctacatttgacttcaggtctcctctgaagcagagctctcccagcagaggcctttgaaaaaccctgccccagctgggctcagatgccagccctgcattccaccgcagggcgagaggacaggacgacagaccggaaggcgccagcacgtgcaaggttagaagccagtgtcacctgatttcggagcaggttagtttgagctacgagatgagcctgcagtttgccttggcaccactggggggcggctttctcaagcagcgagacaggctggggtggggaggtcaaggcaaaggaaggtggagagaccagggaggtggggagagagaaacagagacacacagattaaatgcaggtccacacgccccacgcgcgggggccaccccaagcagatatgggcccttgaggccgagagaattagggggagcccggggggtaaggaaagggggtgaactccaactgcagaggcaaaaggtgagcgtggttagcagcacagggggcccagcaagcacggccctgcccggaggacggggccaccccagcccctcaccaaaggatgagtggggccagctctgcacctactggctcgctccagccagggacaggtcgcctgggatcgcgtgacgaattccacccggctcgcc

SEQ ID NO: 38021 - DNA, 725 bp, Homo sapiens
tccattttttttctttcgtgatactggtatctttttaagagtgcaaaccaatcacttggagaatgccccacactctggatccatctgattgtttccttgtgaggaagttcaggttaaaggctgctttggcaagagtcctgcagagggaggctgagccttcccaccgcaccacagctgtgttaggcttgaccgccgggtctgagtcgtgtttgccagatctcttggaaaggaaggtcacttttctcttagtcatctgcaggacaatcacggtcactgtggcaaggcaaaaagttgttgaaatttttgcacagtgcctttactatccatcattctttgctattcagtgtgaggtctgtgggcagctgcatgacagtcttccaagagcctggaggagaaaaaaaactgcagacctgctgaaccagagtgttccctttaacaagtccccctggcgcaccgtatgcgcagtgaagtctgagaagcactgcaatagcatcttggctggaacccgctgttacccaatctcctccacgtgacccggcattccacaaacacgagcctcccctggtcttgcctttgcgaggagggtggtgaggatatcgtgagtccttcgttttgcgttcgtgattcattttgatgctcaaacatcccaagtgcgaccagtgggaggtttcggacacgtcctcattcatctccaggcgcttccttactttctggcactagcagat

SEQ ID NO: 38022 - DNA, 2578 bp, Homo sapiens
tggctgcatctgtgctgccacccccccaccccacaacctgaagtcttcccagcccccagccagctattcctggggctttaatccctcctcctcctcctcctcctcctcctcctcctccttccctggggtggggggttggggagctgggtctgggcaaacctggacttggctgagggcccttccttcaatgcacacccacccacctccttagccaggaaacacagggatgagcagtaggactctgagggaggtatggggaagctctaggcgcccccctctcccccatcccccagcaatcacgtggttgcatccttagggagcccgcgggtctcagaagcaaaagtcattgtttataaacagccaccaggcctggcaggggaaggccggcctgtccctgcgcctccacccggcggccgcgcagcgggtgggagagggggcaggcctggccgcggggcactggggggccaccctggcagaaacacagattctgcaatctcagatttcagagttggagtcgtcaggggaagtggcgtcagcagctggcgtgatccaattcaataaaccagaggtggcttgggatagacaactgaccgggtgcagacccccgcccctcaatctctgcatttcctgcacgctctgggcaccctgggaggccccggctccatcccccattccagctctccgcgaggaggggtcgggtttcctgtggcgccttccacgcgcctcctccaggccagctccccacccggccgtgggctcccaaagccagtgccgccacccgctccccggccgccggaaacgctaagcccctgctggggcgagggcacctccttgcggggtgcgtagccctgggctcccggtggggccgggctgggcgggagcttccaggccgcaggcacctctcgggaaaggaaacccaatccctccttcggcccacggagaacgaaagtggagaagcagtgggaaggaaggaactgtgggtgccggttcgagaagcagccttgggagtccgggggaatagtgtccccaggggcagagggacatactccctctcgccccgagcgccggcccagcctaggttgcctgcatgggcctggagagctgagggtcaccacctggcctcccagcctcccggcccttggcctccaaagcggggtagcctggagcgcgcgcctgagaagagcctggagcagggccggccactgctgtgcagccgagccacgaaggtgcaaagcggggccctgtcctgccccggccgggtgtggggagacagaggacgcaaacctaagagggcacccagagcgccggggaacgcagcctggggacctcgaagcccctcgaaagcgctcctctagaggtgacagcaccagatcctggcgaaggaccaggccccggggtcggaggatagggggacaggtggccggggctccgcggcggctgggactccgcggctgctggggctccggctcgctcaccttctcctgcgcgcgggtgagcttcttctgcacgttgctggcgatctttcccgccgtcacccctttactgcccatctctgccatcgcggcgcaggcctcgcccggtggcaggggccgctctcgcgcggggagatcttgcgcgccgcgctcccagcccccagccccggccgcgcgtccagaccggctgccgctccacgccgcgcacccgacagcggagccaactgacggaggcggagcgtgcgccggacgggcgagcgagccagcgagctagccagcgagcgacgcggggacagagggagggagaggggaggggccgggcctcaggccgcggtcggcgccccccgcccgccccctccggacaataagctgccttttaaagggccactccgggcgccggcaccgccaggtccgcgaggagggaggggcgcgcgcggcgctggggctgcggcgagcgggactcccctgacgctccagctgcaccgccccggggcggggactaatccgccggcctggcgtcttggtcttccccgcaagcagtaatctcctgcaacccaggaaaggagactaggtggaggagaggagtgctttcgaaatcaaagagaaagtgcggcgaagggggcgcggccctgaacagaggagccgcggctgctgggagaacgcgcccggagccccctccttttccaggggctcacctcccgcccggtgcccggtgcccggtgcccgacgctccgcctcctcccagccttcggccctcgggttttcgcccggataccctaggcgcctccgggacatctccacatctttgcctacggcgcctagcccagtaccaaccggtgcttggtcttcccgttcgctaaaaatttattataataacaacaacctagcattactgagtgcttactgtgtactaagtgacttgacaggcattatttcattcggtctccgtggccctagaggtaggtgctattactgttcctactttacaaccaacgcgccgggatcgaggaacgagatctctgcctctgtctcccaggtgctccaccaccatacgccgggttgtctcctacccccagcaggaaggaatgattagtgatcattattcc

SEQ ID NO: 38023 - DNA, 858 bp, Homo sapiens
cagcttgcttgtgtttgtcctgcatgtctttaaaccttgacccctgcgtggtctatgctgtggctaaaaagtagtagactgagatgctgacgacgacacacaggctttaggccaaaggccctggctccatcggtatgagtactgtggccctgggccagtcactgcctgcttcctttaagtggggccttcatactcaccaggaaaggctgccgatgaggattaggggtaccaggcagtccctggtagggctgattgagcttggtaaagcatagttgctattatgacatagcggctgttagtcccttagttaatctagtatgtgcccgcattgctggtgagacacagggggcagacctctgttggctctccaggtggtcaaataaaggtgcagaaaagcaaacagccctttgcccagcactccttctttaataaatcactgcttagttcctgtagaagattccagactttggaaatactcactggaaatttaccctaattatctatttaaaaatggctttctaaacagagtgctgagataagatggcccatctccgtgtttaagcatttctaaagtctcgtttgtttatcaacacgcccacaagctatgaagctactaaggtgactgaccggttccttgaaactgggcttcatttacaagttactaggtgcactttaggagggcaatttcaggtgtttaaccaaaacctgacaaacatatgcatctgagattctgtccttagaatatagtcactagcgcagtcatgtcctcacaatgagtgaaatagtgaaaagttggacacaatctaaatgtccaggcgtggattgttaaatttgcttattttaaaatttggtttatcc

SEQ ID NO: 38024 - DNA, 521 bp, Homo sapiens
caatgagtgacttttgccttcatcctgttggccagaactgggtcacgcaccatgcttagcaacaaggagatctggggaagtgagtattaaagcagacacagcactctgaccaccctgctgccagtgtggaggcaaagcaggcaaccggtgcaggcgccctggattacctgcctgaccacgtgacagtgaggtcctgttggccacatctgtgtggaatttcagtttctgtttaagatcatactggcaccgagtagaattctgtgtctccaggtaaatgtaagagaacagggcagatttcataatgtcaaagttggcgtcaagtcaagagaaggccaaacaacttcataatgccccataaaaaaaaagcttcacaatagtttgggtaaagtagttggagaattgagtcttctcctgacaccaagttctatgggcatgccagctaaacctgtaaattaaaacagagcaacagcctgtacccctgcaaagaggataataaagcaatatccttcatcacattcaat

SEQ ID NO: 38025 - DNA, 1656 bp, Homo sapiens
cttcagagactcccagcggtgactggccacttccacacggcctggggagcaggccaaggagcatgggctgccttgctggtgagcagtaagtttccagagcagtgagatcacaccattcccttcctttctcccaacaccccatcttcatcttaaaatacatgcaaaagaaaaggaaacctattgatctctgcttagggacaaagacttcctgaaggtagaagcagattccaattcaaccccgacccgcaaggcctggccacccccatggccccaaactcacgcctttcggaatcagatacccgccaataaccaggtcttcctgggtgacccggccgttccctggcagcactggaaacagcctggaaaagagccagcggggacgggaatggcgtggtgactttcacagtattttattgaacgttcagaaccctggatatattcccatttccattaaaaattcttaaaaagtaacacatggtacattttcaactgaaacattttgcaaggacctttgctgcttctttgttggcttgctttaccagcgagtattctgaggaatgtggaaaagactcccaaagcaaaacatttgcaaaacacaaagccaagcctttcacatgccattgtgttcccaggagggaaattccaagtttctaatattttatgtgaccacgggaccactttatcaaggaatagttcataggacttaaggccccatgaaatgcatttggagaaaagatacttcggcgatcggattatctcagaaaaccctgaataaaactttaattgacaaataccaataaaccccacagccagctgcttctttttttttaattttgaggttcaacagcatgctatataggttgacggtcattatcaagtcagctttgaaagaattctttagtatatactgcagaaaacaagctttgctttttgtcgcagcatttcctcacagaggatgccgtgtttgggggaagggatgtaatccgtccctaatcccacctcctacccaaaccatcccctcaacccaggacaacccacatccctccggcttttctgtttgtcaggaaagccctgtctgggagtaattgagcctcactgggtggcgtctaaacccagatgagaacattcactcaagaaccatgaggtttgtatccaggtctgcaaatcagctgaacaggtcaaactattttcctaacaaatcgatcttgtttcgtgttatcttcagaggaacaaagtcaaaggccattgacccaggaacattttgggaaacccccagtaagccaattggctaaagcagggacaatattcaatgactgctccaaagatcttttttcttttttttttttttttgagacagagcctcgctctgttgcccaggctggagtgcactggtgcaatcttggctccatcacctaacttcaagcgattctcttgccccagcctcccaagtagctgggactacaggtgcctaccaccacgccctgctaatttttgtatttttagtagagacgcagtttcaccatgttggccaggctgctcttgaactcctgacctcaggtaatctgccttggcctcccaaagtgctgggattacaggcgtgagccactgtgcctggcccaaagatctttacagagaacaaggattatgtcgacccat

SEQ ID NO: 38026 - DNA, 793 bp, Homo sapiens
cagagaccacctaatcaagaaacccctgacaccctcataggagacgcctgccatccagctgtacctagaggagatctaccaccccctctgtaactttcagttttgtgaatcagcacattcattctctctctctctcgatctctctctctctctccaaagtggcatttgtctagatggctcagagtgtggtcctcaatcttgcagattcggattcagttctgggacagcctcactaaattgcccttttccagcctgtttcctccctgtagacattggcagggtgcctggcaagcccagcccaggctcttgtctgtgacagatctgtcaccttttaactctttcccaggcttccttgtttacattaacatgtttccagccagagcggagagccgtaaacatcttgagggctggggcggtgtctgactcatggctggattcccccaagccaatgcagagcgggaacctagcgacactcaaacacgtttaagagtaaatttctgtttgagtcaccaaagtaaagaaatccagtccccagtaccaattgaaataaaccacaaaacactttgccgaatggaaacttgttctgcaatggtaaagcatgactttaactttagccaaattacttcccaggagttaaactaactcatgatctcactgtccactgaaaaaaactgttcttagtctgtttgagccattgtaatatagactgggtaacttgtacacagcagacatctatttctcccaggtctggaggctgggcatctgagatcgggaccagcatggttaggttctg

SEQ ID NO: 38027 - DNA, 868 bp, Homo sapiens
tctgcagctcaggcttttgatgtctaccattgcattgtttttcttttacctataatctttgtaaagatccacagtcccccacctagacgtgagaatcaatatctctccataaaatcaccctaactctatggcagcccgacatctttgttagaccagtgggaaaagctacataggtttccaccatccatgagagtcttctcagccttaggctaggccctgaagtcagggagttaggtgctgaaatgtgcacagctgaaggtaagccaccaacagggtgagccagatccactaacaactcaactggcctcctttgaactgtgaaaggaaaagtgttataataataactatcatttattgtgcatctacgatataccaggcattatacaaaacactacagtttgtcaattaattctcataaaagtcctatgaggcaaatgttcctatttttattttatattttatagctggagaaaatgacacacaggctctctagcctgaccatggccctcagtcaataagcagtacagttaaagttcaaacccacgtctcgggctccaagcccagacatttagcaaacactgtgtgctcacagctaagctttcataacagagcactggggacaatgtatggggaataaatgctctcttcgaagatgccctagcattctgtgatgcaatattgtgtgactgaaagaaacagtagtgtaggaattggaagactggatcttagtttgtggcaggattgtaccttactatatgaccttggggaattcacccaaactgcttttgcctccatttcctatttgatttctccattattcagagcatgaggaagatctgaagaatatatctaaattccaaaattaaat

SEQ ID NO: 38028 - DNA, 1537 bp, Homo sapiens
caacgtgtgtggatgaaaattctctcccggccagttctaggggcagtatcctgaatgtcagttttgactctgaggatgcccaagatttagctgccgctccgcacactcctgggccctgcccaagctaagggcatgcttaccacccagaggggcctggaggtgtggtcgtccttcagcggcatttgcagcctgtagtccttggctccatattcatccactttggtgcctgactcatccacctgcttccccgccgccgagggaaccgcttcctgagggtcgttccccggggcgtcctcttcatcatcctcttcatcctcatagtgccgcttcctggatttcttcttgtctgcaagataccaacacagaagtaagcccagcaggagccttcagggttccctccgcaccgcttggcagcatttcacctgcgccgccgcaaactcctagctaagagccacctgcatcccgcaggcgttgcgcccctcacccgtctcccctaggccgagttcgctgggctgcgcccaggtccagcatctctcccgcccaaaggcctgtcccaacggggtgcgcgcgggagggccagcagggtcggccggcgcagaggcccggagcagctccgaggcagagcggggggcagggccggcaagggcagtcgtggctgagcgtgcccgcgcaacgtctcaccgcggtccgctcggtctcttttgcccatggcagctacagcagcagagagaagatgaccccgctcccacaggcccgccgcggcatccgctctggggggacttccggctcaatccggaagctccctgttgtccacacaggatgtcccgcctctaggcgccgtgatgtgggtggctggaagagcggagagccagcgaccgccgatctgttagctcgtgcgacccagcggcgggggtcctccactgttcatttctctacaactgaaggaaaatactgtgtgttgagcacctgtgtagtgcgcgaattaaaggcctcatccttctggaacttaaattttaatgaagccatgtgggcaataaatgtgtgtgtgagagagagagagagagaatgtgacctgagtccatgggtaaggaagaattcttttttttaattaaaaaaaatttggctgagcacggtggctcacgcctgtaattccagcactttgggaggctgaggtgggtggatcacttgaggtcaggagttcgaggccagcctggccaacatggtgaaaccccatctctgcgaaaaatacaaaaaaaagtagccaggcatggtggcacacgcctgtagtctaagctacttgggaggctgagatgggagaatctcttgaacccagaaggtaaaggctgcactgagctgagattgcaccactgcactacagcctgggcgacaggccgagagttcgtctcaaaaaaaatttttttcttttttttttttttttttttgagacggagtctcgccctgtcgcccaggctggaatgcagtggcgcgatttcagctcactgcaagctccgcctcccgggttcatgccattctcatg

SEQ ID NO: 38029 - DNA, 660 bp, Homo sapiens
gtttcagaaagttcacaaacctcagtttcacaaaggtaaatatttgtagtttcattctatctttcaaatgtttaaaaaaaaaatctggctgttaaattacaaagcaaatgcattatcattcactcactctcattcattcacttattgagcaatataaaaccagctgtattccagctttctttatacaggcacatgtaaattaatgggcattttcctatattttttctattttgttcagttaagaagatatgtaattagagaagagataatacacacacacacccagttacgtgccaaatcacactgaccctgacaacatctctttaaattaaatttaaaaaatcaaacttttgcttacttggtccatgctctctggaatgaactctccttcactgttgatactagtgaatgacccattccgggcaacctggtgtaattcatctggaatgtaacctgggggaggagaacttctatctctactagtaggacctcaaggaagaaaaataatgtaatttataattataggcaagggaatcaagttttgttttaaataggctatatttctgaattatatcattaataatttcagcaaaagaaaattcaatttttattaaaacttatcagaacattcatttgtaaatcttcaaatggctttataac

SEQ ID NO: 38030 - DNA, 742 bp, Homo sapiens
gaggcagaggttggcagtgagcagagatcatgctgcactgtactctagcccgcgcgacagagcgagactctgtctcaaggaaaaaaagaaaaaaaagaaaaaagaacaaaaaccaaatcatctcaaaacatacagaaaacacatgtgccaaaattcaacacccttttatgctcaaaagataacaaacagaagaggacataatcaagttgattatggtgaaaaacttcatggtgaaaaacaggatacattcccagtaaggccaggaatatggggatgtccactcttgccacacatctatttaatattgtactagaggttctagtcagaagacgaggcaagaaaatgaaataaacggaatccagactggataagaagtaaaactatacccatttgcaagtgacataatcttagatacaggaaaacctaagaaacaaacaaaaacagtattagaatcaataaacacgttcagcacagatgcaggatacaaggtcaacattcaaaaatcaattatatttctatacattagcaataaacattctggaaataaaattaagaaatcaatttcatttacaataccaccaaaaaaaataaagtacttaggaacatatttaacaacaacaaaaaaatgcagcttgcactctaaaaactacaaaacactgttgaaagaaattaaagtagacctaaatatacagaaagacatcccatattcatgaatgggaaaacaatatttttaagatagcaa

SEQ ID NO: 38031 - DNA, 656 bp, Homo sapiens
aaacttgtagaaaaaaattatggtgaccttgactttggcaaagatttctttgcattttttaatggtgtcttttgaagagcaaaagtacagtacatatcttaaaagaaaaaaatgcattgaacttcaaaaattaaaaatgtttacccttcaaaaaacaccattaaaaaaataaaaacacaagccacagactacgagaaaaaatgtactaaacacatacctgacaaaatatttgtatccagaatatctaaagtactcttacaacccaacaaaaaaagacaaacattaagattaggacatacacttcaccaaaaagacattaaggatggcaaataaagccatggtcaataagataagatgctcaatatcattagtcatcatggaaatgcaaaccaaaactacaagattacaaaagactagccatccaaagtgttggcaaggataccgtgcaactaaaatgctcatgcactactgttgagaatgtcaaatggtacaaccgctttggaaaacagtttggcagtttctcacaaaactaaacatactcccatatgaaccagtaatcatgctttgtatttacccaaatgagtcaaaaacttagatctacacaaaaacctatgcatgaattttattagcagctttattcataatggccaaaactt

SEQ ID NO: 38032 - DNA, 2943 bp, Homo sapiens
aaatcaatctgtaaaccatccacatgttaactttgtaatttcaccttttctccacagagactgcaagaccacaaattttcttcaacttgataatatactaggaaaattacagagtaatataactgggcatcaatagatttgttaaacatttgcaattatgcatagagcttcaattactcaaaggaaatgtatcgactttttttcagtacagagctctggctccttattttttcctctcaccatagttttaaaaaatacaaaactcatgctaaaatgagaattttcagttaacttataaacactgactagtagcactccatacaaatgaaaaagaatcacaccatcaaacttcctacgatattctacgcattaaaatttgacatcgaactaaaaaagattgcataagacaacgaacaaatcactaaattgccacataatccagcaacaaattttgcaacaaggaaatctcaagcaaataacccaactgtgagttccctttgggcatcaaggtcaaactacaaaagtaaatttgtgacttttcaagatctatgcagttttaccaaatgtatttattttttgtgagagaataatttttttctgtccagtactagtacataaaaagtaaaggtatctgaagccatcttttaaattttttttaaagccaagaaaatgatttggcaaaagatatcgaagagcttacgttagggaaaactaaactgtatctgtctatgtgtttagaatttatcccattaaagaaactgcccagttagtctcattttctaaacgtatttattttttgcaagacgagaaatacagtcttacaaaaagacatctgcatattcgaaccaagccttcctggattactaccttcatgaccttggacaaatgccttaatctctctgagcctcaagttttcacctgcaaaatggggcaatttacccacctcattgagctgggaagatgaagagagataatgcatgacaactgccgggcgcagactaagagcaccctaagtgctacctaaatattccgtaaagagaaaagggggaaacaaccttacatcaaaagattaccacactgtgacagtgcaaagacaagcactttttcgcttactgcatgtaccatttctgcttcatcccaagaccagatgcaacctttcttctaaaatctctgcagggtacgtgtctgacagctaacacagcccagcagcctacttcgcgctgacctgggctttaggactggatgcagggggcccaaggtccgccctcccgcagctaggcaatcacccagcgaaatctccgcccctggagcggcgcttaggccgccgccagcccccctcccggcgcccagcccgcggcccccgacacacacgcgcgcacacacacacacacacacacacaagcgcgcgcgcacgcacacacgcacgtaccggctgctccgcagggacgtagagagccgcaggcccaaggaggggccgcccccgccgagcccgcccctccgccccagcgcggcctgtcaccgcggccccaggtcgggggctgccgcagggcccccggggaccggaggggcgcgcgaggagtcgggcgcgggccttggggccaggcccgtccctctttcacatgaagcccgggccgggcggggtggcgggcgcgtgaatcctcgcagccggccgggtcctcctggcgctcctcggcacttctagccgctgcaaccccgaggcccgcgggaactgggcaggaaaggaggaagccgcgggcccgcgtcgctagagaccggagaagaggcgggagtggcgactctgcggacaggggcgccgagcgtcctggtcgttgttttcgtcgccgccgcgggccgtgcaacccccgaacgctgcgcccagcggccgcggcaccctcgtcaggcgccgccgctgagggcaggcagcccggcagccactacacacggacccgtgacgtcgggcgtagcgcggcgcacgtcacggccgctcgctcgtgcgcgcgcacccctccgcccggcggtagcggaacccgccgcgggcgcgcgcccggcccaggggagtgggtcggcgcctgcgcagaggcccgccacgcccacacacaggccaccgcccccaccggccggacggcgcggggattcccagtcctggctccgccccggcctcggccccgcccccgcccctgccccggggcagcctgtgctgttccgtgtgcgcggcgcatacgcacctgggttgtctcgagcctgcggtagtggccagatcccagacatccgagtagatcccgtgaaaaggtctcccacgtgggctgtggacagggcccaagggtagcagagctagcagaggcagtgacggactgtgtggcaggtcatttgcaaggagaaaagccgtctgcctcttaatttgtggctcaagtttcagaatttttttcctgagggactttagaaattacttcaggcttgccacctaaccttaaaccacccccttggagactggctaagtgttatttgtgttttctgtttagttcttatcaccatcgatacttggttatgactggttgtgtacattggttagcccagcaagtattacttctccagcttaacagatgtggaaacttaagcccagagacatgagttgacaccccacccccaaagctagagtctaaaaccctttctttcgctcctcatctcccacaggataaaatgcaaattaatcagactagtggtgaggccctccgtggtgtgactaacctgcatcccgacgttttcaccctactttgatccagaaagcacctttccgccccatctcttctcctttccttaaataccccttacaacttcctgtaccattcttccctgttcagcttcttcttggtttcttcgtacattctggatccacccctttcatgcatattccagaccacatttccactggagcagttgaaatga

SEQ ID NO: 38033 - DNA, 897 bp, Homo sapiens
ttccttcatccaagccctctgagcccctctctgggcggtttggaggatgctaagccctctcagtgcaccatccagggggtccatgttgcagaaatgagtgaggaggtagttatcttcatcctcacagctcagcatatgcctcgacccagtgcgatgtagatccttccccaactgcttcctgcaagtcaagtcacaaaggttggcattggttcttcaccataggctagcctggctgaagctcagctgcacagagtctgtcctgagaagcagaatgccactgtcccctgggccctccagactgccaaggctgctcagtttcagagagcaggctccctgtggcctcacacgccggctgccagctgggccaggtaactctggccaggctgcactgtgaagaacacgagagtcggcggagacctgtgcctgctcttctcagcctcaatgtctggaagacaaaaaaaggcatcctgctcccaagattgtggtggaggccagcagggtgacgcacatgaaagccactggagatagatggcacttgttcccacccactgcccacaacaggcccaggactgcctcagccccggtggaccccagagccagcaggcccttcagaatggaaggtgccaaacaccatcggaaggcgtggttcttttcagagaaccagactctgagactgtggcctcccactatgagtcaccacctctgattcctgaggtcccctccagtcattggctctctcccaagccagccagctgatcagccttgaggacagcagagtgtctgccaagagagatctgtgaagtttcccatcaccgtggcagtccacaatgtgaagcccctgaggccacccttctccatgtgtcccccacactgtccctgaccctcccaccatcctag

SEQ ID NO: 38034 - DNA, 2312 bp, Homo sapiens
aacaacatagtgagaccccatctctacaaaaaattaaaaaattagccaggtgtggcggtccatgccggtagtcccagctacttgggaggctgaggcaggatgatcacttgcacctgggacgttgaggcggcagtgagccgtgttcgcgccactgcactccagcctgggtgacactgcaagaccctgtctcaaaaaaagtagtcaaggaggctgagagccaggaagcctctggccagcaggtgagcaggccctttcctgctgctgtgcattgtatttaagagaaaagacagatacgtctgataccttcaaaggtgttcttcatacagcaggttgcaacctattaatagatcataaaatcagtttagtgtttcatcatcatcatcaaaaaccaccaccaacaacaaaaagacccagaacagatagtgtaaagagtgcatccctgcattcctgtatagggagaaatatggttttgtggaaccttgttgcgatgtaaagtgtacttcttaagataaatacagggttgaggtttttgaaataaagtttgaacaggaccaccttaagccacagtgtagactttccataggccaaaacctggatcaccaagacagtgtgccccaggctgcaggccacactcctgggagcctcaggcaaccttgtgcaggcctgacttcgagacactctgagcatgagctggttcctgggtagcctcccctctacctctccccgcttgccctccctccctccttctgctcctgtctctcctcatcccctccccgagttgctgcctcctcctcctcctcccccaccacctctccccgtctccgagttgcctgccccgccccctcctcttccccctgcccctctccgcgtccttcccgccttccccctcctcgtctcccccctccccgcccgcgccgtctgcgtccctcccgggcccagacgcggcgcggtcagggggcgctgactcacaggctgactcagctgcaggcgcgctgccaggcgacgcagcgggcgggtggccgggcgccggcgggctcgcagccgggctgctggcaacggtgccggcggaggtgggggcgtggcgcgggatgggcggcgcgggccctgccgtggtaccgcctggcagcgtccaccccgccgctggggcgccctggaggctcctggccctccgtggggccgtgacaccggcgctgcggggagcggtggcctcgcagaggctgggcatgggaggacggccgccccgggtaaaggacagggccctggaaacgcgggtctgccgggagcaggggacaggaaggagaccgcggctctcccagtcctgctgccccgggcctccagacggccagactctccccacaccggcctggagggggacgcgccgaccccagctgggaggggtggctggctgcgtagatccgtttgggccgcctgcctggaaaggcccaggtccgggcctcgtcctcctcttcacactctcccccgatctccaaccaccttcaccctcgcccccaccaccaccacccccagctcctcctggccgcctgcggtccagctgaggcccgcctcctccaggaagtcttcctggagagcctgtcctgggttaggcccgcccagagccacctggggcgacttatttcatggcaccttcgaccttgctctctgtctgttttgtgtctggcttcatcaccaaactgagcctcttgggggcagtgaccgggtcttaggtcttagttggcccttaggcgctagggctgagaagacttaggcggacaggagatgagactgtgtattcgacgacacactttagagatccagcccggaacacagccataccagattttaaaaaaagccaacataatatagcatgttaaaaattattgtaggccgggagcggtggcccacgcctgtaatcccagcaattcaggaggctgaggccggaggatcacttgagctcaggagtttgagaccagcctaggcaaccaacatagtgagactccgtctgtacaaaaatgaaaaaaaattagccgagcgtggtggcctgcacctatagtcccagctacctcgggaggctgaggagggaggaccctttgagccccaggaggtccaggctgcagtgagctgtgatggtgccactgtactccagcctgtaagacaaagggagagaccctgtctctaaaaaataaaaaataaatagtatacacatatggtgcttatttgaaatatacatattgtgtattttttaccttctatataaatgctattatttaaagaaaacaatatgattagttcacagtggcaattagtaataatag

SEQ ID NO: 38035 - DNA, 2755 bp, Homo sapiens
agaggttgcagtgagccaagatcacgccaccgcactccagcctgggcaagagtgagactccgtctacaaaaaaaaagacattttggtcctatgatatagtaggatattttgactctttttatttccttgcctgcagcctttagtaggaagttcttccttgatgtagtgatgaaactgaatatagttaaatggaaaatcctttgacttgcagctctgctcttagagagccctcagtacactgactcctgaggtcagtccaatgtgatggcctcaagctgctatctcaacaaaagcgtttgagaatggaatacttaggattgtacctacaagcaacggcagggttttagatttgtagggattcgtttccagctgtccaaagatgtccattcactttgcatctgcaggctggttttggtaaaccagcagtttgtcatcttttgcatctatcatgtaggatatccatggctaagatatccatcctttttgaactttttttttttttttgagttggagtcttactctgtcgccctggctggagtacagtggcgtgatctcggctcactgcaacctcaactacccaggttcaagtgatcctccggcctcagcctcccaagtagctgggagtacaggcgcgtgccaccacgcctggctaatttttgtatttttagtagagacagggttcgccatgttggccaggttggtctcgaactcctgacctcagctgatccacccacctcggcctcccaaagtgctggaattataggcgtgagcaatggcacccggccctttttgaacatttctgagcacactggatgtcactgtaagttaaacctctctctgtctctctccttctctgtctgtgtttctctcaggaaaaatagttttaaagcacaaagatactttgaacttgtgaagttgaagttgaagttgaattccaaataagttacagttttagtaaagaagtgagaaagtcttgtttaaattggctgtccttttctggtgacattttggtttcgtttccaaaaaatgagtcatttttcattatatgagctttgtcagtacctacctataacatcgacaactcagggacagtcagttcatgcttttccagagcccttatgggctcctcaaagatcatcaggcagttttggaggaagaacttataaatttcagtttgactgtttaaccataatctttttctctattttcattcttaatatatttccaaattagacaaggacattcttcttgtcccatgctttgaaaatatggttgtatggcaggctgcctttttaccctggcaacagtgacagccctcgtgtaggcacatgtccaaaggaggccatctccttccatttctggaatgtgaaaaatctcattaagtgctttttcatgctttgaggaaactgaaaagtaaataaaagctttcattttgaaagcatcaatatcacagggaaggaaactccacccctttttactgatgtgtacaaaatgtgcaggacacttcgtggctaatatttttaacttttctttggtaaagcgttcatagactgcatggaatttgcaaaaatttacatttgcacggtctgccaaataggcagacagatgggcaaagtcatgtttgtatttggacaagatagcatcaacattctttttttttttctgcaggtggattaaaatcttcatagaaataaaaaggatgatttgaaactccattttttcaaatcaaagtatttacaagttaggagaactgtttttcattgccatgattggatgcagcacttggttactgtagaaagcatgattgttggtgggatctggcagaatccgctgcatgttgtaaagggtcaacacagctgccatcgacatttctccctttgttcacccacgtgatatttcagttacagcctgtaaatgaggaaatgtgcccctactcagtttcaaaaaacaatcaaaggagcagcacaatcacacaaattcatttttgtagtttgccctagctaattcagcagccactattttcaattggtgtcttttgtggagacaaaaagctttttggttaatgtggacatacttgcctatctcactgaggacttgtgaggcagtctctacagtcccttcttccaccatgcccaaccccgaattctctctgcttattgcgcagtatcccttgttttgattctttacctccctcatccagttgtctgtgtcactcctcctgtcgttaaaataacatggccatttgggtcacgcgggcattgatattgcaacaccatttcctcattttcatcacctgaatgcttaagaaaacatggcctcagtagtcaccatgctaaaattaaactagcagtgtctcaatacaaagcacaacaattaatccgcaggcaaagtggatggtcacgttcaagattatagcgcgcttaagttacatcacaaggagtgacataataatggatgatccactatggtgtactacaaatcatggtggttgtcctcagcaacagacactaaggaaggtgatgtgcccatttggcactaaaaccagtgttgccttcggcctctgtttctggggttgccatgtgggttttatacctttcccctaatctcctgtatcaatcactgaaaacctcgacttttctcttcccaagggagagtttacttccctttaactttttggcttcttctttaggacttttagtgttaaaaatggtacaatcccagacaaatgggatagttgatcatcttatcatgttta

SEQ ID NO: 38036 - DNA, 3900 bp, Homo sapiens
ttggcccctacctcacaccatataccaaaattaacgaattcaaaatgggtcagagatgtaaatgtaagagtgaaaaaccataaagcttctagaagaaaacataagagaaagcctttgtgaccttgaataaggcagtgttctttggtaggacacaaaagcacgaatcataaaagaaaatgttgataattggacttcatcaaaattacaaacatctgttcattaaaagacactgttaagtataaaagacaagtcacagactgagaggaaatttttgcaaaatacttagctgacaaagggcttgttactaggatacatacaaattctaaaaactcaatttaaaaaaccctcaaaaacaaagaaacaaacaaaaaacagcccaaagacttaaactggcacttcaccaaagaagatataaatagcaaattagcacaggaaaagatgctcaaaatcaccagagaagagggaaatgaaaattaaagctacaatgagataccactacacatctattaagaaggctaaaaattgaaaattaaaattaaaaaacaaccgacaacaccaaatgctggtgaggatgcagagcaacaggaacactcagacattgcttggtgggaatgcaaaatgccaccaccactctggaaaagtttgactttatttttttttcccaaaagtaaacacgtactcaccacatgactcagcaatcttattcctagatattacccaagagaaatgaaaacatatgcccacacaaggacctatacataaatgttctagcagcttaatttaatgatagccaagaactggcaaatggataacagattgtggcacatctatataatggagcccagtcagcaataaaaagaaataaagtactgatatagaattccacatgaataaatctcaaaagctttatgctgagtgaaagaaggtagtcttaaaaagctatgtactggttgggcacggtggctcacgcctataatcccagcactttgggaggctgaggtgggcggatcacttgcggtcaggaattcaagactagcctggccaacatggtgaaactaaaaaatacaaaaattaggcaggtgtggtggcgtgtgcctgtaattccagctactcaggaggctgaggcaggagaatcacttgaacccaggaggtggagattgcagcgagctgagatcacaccactgcactccagcctgggcaagagagcaagacaccaactcaaaaaaatatatatatgtgctgtaggattccctttatatgctattctagaaaatgcagattatagagatagaaatccaatcagtggttgccaagagttggggtggaacacagaatttctgagggtgatgaaaatgtgtatatcatgatgtggtggtggatgcactataacatacatttgtcaaaacaagcagaactgtacatttttaaagtgtgagtttccctgtgtgtaaattataccacaataacctgacaacaacaaaagagagagacgttggactgcatccatcccactccacttcttaccagggagctcccgggagcctctctagtgtctgtcctccctgccctgcctggggtgggctgagcagcacagcgtccctgcagagagaatggagaatgggcaatgcccacacaggggagtggcatggggtgagaaggaaccttagtcccgtcagccctgaccaccagcccatctctcatcactgttcagcagagtgagctcaagttgggtttctggcatctattggcagagccagggccaaaacgcaaggggtggggagtgttgtacaggttagggctgactgaatgatcagccctaatctgtacaacggatctgtgcagtctgagcttccacacagcagcagctgtccttgaccccttcccctcctagtcggcccctccctgaccttcccaggcctgtgggaagtcctgttaagtcccaggccatgtccactttgtataaaatacttaaaaataaggccaggcacagtggctcccgcctgtaatctcagcactttggcaggctgaggagggaggatcacttgaggtcaggagttctagagcaacacagcaagacctcctctctcctaaaaatttttaaaaatcagctgggcgtggtggcacgggcctgtgatcccagctactgaggtggctgaaacagaagaatcgcttgagcccaggagatctaggccgcagagagctgtgatcccgccactgcactccagcctgggtgacagagccagagagaccctgtttcaaaacttttttaattaaaaaattaataaaagatttaacgtgacccttataacagtcacctgagacggacgctgaccccattttacaaatgtggacattgagacacagggaagttaaatccccctgtcagaaaaaggctagcggaggtttaaggccgtgggaacgtgactccagagctgagggctttggaaccccgcctgctccggtagttgtggctggccttgccccacacacatttggttctagctcctttgcttgggtcttcatccatgcagcgaattccttagccacaggtgtccctctgctctctaactcacagcgagctcgctgcccaaagtcctgctccggcttcctgggtggacctgaccgcgttcgggtgcacgtggggcgactcacacctgacaagtaaagcgggtgaggccgcgcctgtgaagggcgcctggctcctccgcaggagcggtgcggcgcggcgcccccggctggaaccaggtgtaactgcagagaccctgggatcgcaggaacggctggcggcaggactgtccctacctcgagaaggtgacggggtttcctgcgctgccagccgatgaggcggccgtgacgcagcccgccgtgcagagtccccgtcggccgacaggcgtgcagagctctgcagaggacccttccgccctctgggcagcctgccaagccgtggcacccccaacccccagcactgggcacttgggagcattgcagccgccctggctcgtaccggtgccggtgctttgggcacctgggctggtttggacatgggtgccccgggcagagtccatttatgcaggtcagaatcagtgtgtggagcctgcatagacttgccctggagcggctgcctgtgctggggtggggaggagtagagggcgagaagttggtggggaagggaagcggcgccaaaagaatacccacaacatcttgcacctggaaggcaaagcagagggcagtgatctctgcagacttgcgggggcgacgcctgaagcaaacagggacatacaagctggtgccttctgtggttgtgcatggggtcttcatgcttcctgtctgagttcccagaagcttgtctctgcttttctaggcagctgccacagcctgtcacaaacagctcctggttctccacttctcatagtctcgatttcaaaatccattgcctcaccctccacctcctctccacctccacccctcctagcacctcctgactgcttgtgttctgtgtctccccactgtctcccaacctggggtggggttgggggggatgtctttcctcctgtctgctctttgatgtccagctgaagtgtcacctcctacaggcagcctcccctggctatgccagcttgtactgattgccctctcctctgaattctgtaagcatttcctatgtgtacctgcccctgggcaaggtgggcctgacttgttagagtgttagagttttaccctgttcctctaggagggcctggtaccaccacagcccagcatggtgtggtgcctcagcaggaggcatctggttacaatcaacacaagctgttccagccaatttaaagaaacttcaggaggaatagggttttaggagggcatggggaccctcctgcacccgaagccaggatgtgccaccaatca

SEQ ID NO: 38037 - DNA, 2705 bp, Homo sapiens
tgtcttataattaatggtattttagatttgacgaaatatggaatattacctgttgtgctgatcttgggcaaactataatatctctgggcaaaaatgtccccatctgaaaaacagggacaacgttcctccctcagccagccactatggggctaaaatgagaccacatctgtcaagggttttgccctcacctccctccctgctggacggcatccttggtgggcagaggtgggcttcgggcagaacaagccgtgctgagctaggaccaggagtgctagtgccactgtttgtctatggagagggaggcctcagtgctgagggccaagcaaatatttgtggttatggattaactcgaactccaggctgtcatggcggcaggacggcgaacttgcagtatctccacgacccgcccctgtgagtccccctccaggcaggtctatgaggggtgtggagggagggctgcccccgggagaagagagctaggtggtgatgagggctgaatcctccagccagggtgctcaacaagcctgagcttggggtgaaaggacacaaggccctccacaggccaggcctggcagccacagtctcaggtccctttgccatgcgcctccctctttccaggccaagggtccccagggcccagggccattccaacagacagtttggagcccaggaccctccattctccccaccccacttccacctttgggggtgtcggatttgaacaaatctcagaagtggcctcagagggagtcggcaagaatggagagcagggtccggtagggtgtgcagagggccacgtggcctatccactggggagggttccttgatctctggccaccagggctatctctgtggccttttggagcacctggtggtttggggcaggggttgaatttccaggcctaaaaccacacaggcctggccttgagtcctggctctgcgagtaatgcatggatgtaaacatggagacccaggaccttgcctcagtcttccgagtctggtgcctgcagtgtactgatggtgtgagaccctactcctggaggatgggggacagaatctgatcgatcccctgggttggtgacttccctgtgcaatcaacggagaccagcaagggttggatttttaataaaccacttaactcctccgagtctcagtttccccctctatgaaatggggttgacagcattaataactacctcttgggtggttgtgagccttaactgaagtcataatatctcatgtttactgagcatgagctatgtgcaaagcctgttttgagagctttatgtggactaactcctttaattctcacaacaccctttaaggcacagatacaccacgttattccatccattttacaaatgaggaaactgaggcatggagcagttaagcatcttgcccaacattgccctccagtaagtgctggagctggaatttgcaccgtgcagtctggcttcatggcctgccctgtgaatcctgtaaaaattgtttgaaagacaccatgagtgtccaatcaacgttagctaatattctcagcccagtcatcagaccggcagaggcagccaccccactgtccccagggaggacacaaacatcctggcaccctctccactgcattctggagctgctttctaggcaggcagtgtgagctcagccccacgtagagcgggcagccgaggccttctgaggctatgtctctagcgaacaaggaccctcaatcccagcttccgccctgacggccagcacacagggacagccctttcattccgcttccacctgggggtgcaggcagagcagcagcgggggtaggcactgcccggagctcagaagtcctcctcagacaggtgccagtgcctccagaatgtggcagctcacaagcctcctgctgttcgtggccacctggggaatttccggcacaccagctcctcttggtaaggccaccccacccctaccccgggacccttgtggcctctacaaggccctggtgggcatctgcccaggccttcacagcttccaccatctctctgagccctgggtgaggtgaggggcagatgggaatggcaggaatcaactgacaagtcccaggtaggccagctgccagagtgccacacaggggctgccagggcaggcatgcgtgatggcagggagccccgcgatgacctcctaaagctccctcctccacacggggatggtcacagagtcccctgggccttccctctccacccactcactccctcaactgtgaagaccccaggcccaggctaccgtccacactatccagcacagcctcccctactcaaatgcacactggcctcatggctgccctgccccaacccctttcctggtctccacagccaacgggaggaggccatgattcttggggaggtccgcaggacacatgggcccctaaagccacaccaggctgttggtttcatttgtgcctttatagagctgtttatctgcttgggacctgcacctccaccctttcccaaggtgccctcagctcaggcataccctcctctaggatgccttttcccccatcccttcttgctcacacccccaacttgatctctccctcctaactgtgccctgcacccaagacagacacttcacagagcccaggagacacctggggacccttcctgggtgataggtctgtctatcctccaggtgtccctgcccaaggggagaagcatggggaatac

SEQ ID NO: 38038 - DNA, 1219 bp, Homo sapiens
cctccctccccttcttcctgagcccttcatgcagagcccaggacgcaatggtcacaatggctaaaatctctttggaggagggagagatcagtgcaggctgaagccattggtgagagtggaagaattcagctctccagcggaaggcagcaatatgcagagagccctgtgatggggctgctggagccgaggcctgggggttcagtcccctgagaagcccccaccagcttagcctgggggacgagttatgggaaggacagatgagaaactgctaactaaacaaggccaaaaggaccagggcaagctgggggagaccatggaggctgtggaaggaacaggctgactaagcctcaggagaggccaagagaggctaagcagggagccaggtcctaggaaagaaacagcacccagctctggggccatgccggggaggctgtgggtagagggctagggcaccaggccatattgagaaccttcattgcaggcccatgccaggcacgtgacccacagtgacccggggcttcacagagcaaccaagggaggaactgccgactccattctgatgaagggaaaagagcctctggggggctccctacatcactgctattggaggagtctgggtaggaatgcagcaggctccaaagtccctgctgtgtcccgtgggccatggagccaggtggcgggtcagggagaggagtggtgcatggttgggcagtggcaggacctaggctctgtcaatatttggtgtgggtcaatcattagccagcctcagacttgtccccccacaggttcctcaggtgggttctgggctaggccctgccctgctgggggctccacagggcttggcctagattggacgagtcgggtgggcagcccctggtctctccactcaggagactccccacccacagggctgcagtcctgcctcagggctcagcaagcaaacacgtaagagcactgcacagttgaaaaaatgagttttaaaacaatctgccaagaaaaaagatgtcaaagtagtcatcacgggaaaagtcagaattttggtggacttcactgcacttattctgtggctattaattttaaattatgtatgtgggggaggggagcacaccataatctttctagtgccctgaggctcttaaaccaggctctgttcacctggacctgtgttcatgggcaggaaactgttctaggccctttatatgcattgtttgatttaatc

SEQ ID NO: 38039 - DNA, 2015 bp, Homo sapiens
cgacaggctgaatgcaacacaatggtgtggcaagccctgagcagcttaagggagtcctgactccatctgcttgtttcttaggagagcttccgacaaagtcctcttcaggggcaatgatactaatactaagacaattcaaggggccatagctgcctggacttactggaaacttagaaaagacaaactcagagtgctgcccatgaattctacaaacaacaccctacctggcctaaatccaaattactatgaacagtaagacttcccctctcctaagccagacaagcttcctacagccaggcatctccttaaatgtgaaccctgcaatgaacaagaaaggttactttggatcctaaggaggggggcgctcaagattggatgatctctagtaaattggtttaacagttccaataattactagggttagacgacaattctcagcaggtgtctcctctggaaacagcccctccttcatatctggccgtgtcccccatacggatccagtggtccatgttcatggaaaacagacccttctggtagacaatcgcccttttacctttctccacgttaatagtaatctgggcagggcgcagtggctcatgcctgtaatcccagccctttgggaggcagaagtaggtggatcactggaggtcaggagttcgacaccagcctggccaacatggtgaatccccatctctactaaaaatacaaaaattagctgggtgtggtggcaggcacctgtcgtcccagctactcaggaggctgaggcaggagaattgcttgaacccaagagcggaggttgcagtgagccgagatcacgccatcgcactccagcctgaatgacaagagcaagactccgtctcaaaagaaaaaaaaaaatagtaatctggactccaaaaaataaacaacactgggtgaccaaatctcatattacaggaaatgctcatgctttaaagggatccgtggactttgtacccttgcttgaactaagtcagcgtgacaggctgtaatccttccaaggggaatggtttgggaggattaattaaagggataattacccacttaactgttagtattggcctggttttgctacaatgtgcaccccattattggaatggatctcctcagtcactatgtaactcacggaacaagcccaagtctttcacgctattggtgggtgccaggggtgaactttcccctcgtggtgcaggtggtaaacatgctaccttaccgctgaggcggggcatggaaggattactgcctgtcacagctcacttagttcaagcaggggtgcgaagtccacaggctcacccccaccctttctcagagagctggtttcatatggctggattcttttgtcacagtctgcatttcatcctaggattgtcctgattccctaaatgaattgtatttttttgagacagggtctggcagcctcgaacccctggaggcttaggtgatcctcccacctcagcccccaagtagctgggaccacaggctcagctaatttttacttttttttgcagatatcaacctctctatgtttcctaggctggtctcaaactcctggactcaagcaatcctcctgccttagcctccacaagtgctgggattacaggcatgagcaactgcatccggctaaacaacctctcttcttgcaacactgtttccttgtgagctcattaacatgctaattaccacattccacaggaagatggattacagagcaataagacaggctgggttcaccctggaacgtgaccagtagtgacagcctctaacaatgacacaggtggggaccactatcggaagatggagattctggggaactgctaccagctgcagggctgagagtgacatatctgacatttgttcattgttcatctgttcatacagtcattcttgcatgagtttactggacacctgctgtgagcaggcactgagtggcataaaaattcctagaacagtctcatcagagaaaagacacacacagaaagagaaattatactacaatgcag

SEQ ID NO: 38040 - DNA, 659 bp, Homo sapiens
aggcaaaaaggaaaattataattggcttttggaatgctctccatgatatatccatcacataactctaacaccatttctatgtgtgacttgatttattttagttgaaactacagaaatcatctctagctaagtccagaaaaaaagaacaatcttctcaggatcaaagtcagttgaatgactaaacacttgggaaggttaagtaccaacgcagcacagagagcttagaaaagggaactcaaggatcattttactagagtaccatcagtaacatgactcagctataccctgtctagaacctaaattataaatccccaagagagatgacttaactggccaaggcaatattagaaactgtgactcaatcagttacagctggatcggggcacagcactgggagtcactcccaaagaagtgagagacactgggcagtcatccaaaactcacccgctacactctaccccagatttcctgacacatggtgtagcattccaaaacaaacccttacaaggacactgcataagacaatgattgtaaaatttaggaatcctcatgaattttttatgagtttcacgaaaacatagcattatgtatggcatgacagggcaaaaaaggggagaaatcactacagtaaagaagtactagtttaatagactcgagct

SEQ ID NO: 38041 - DNA, 2967 bp, Homo sapiens
ggtggggtaggggcgtaggggggtggggtacgggcatggggggtgggggtggtgttggtctcactatgttgcccaggctggtctcgaactcctgggctcaagccatcggccgcctacgcctcccaaagtgctgggattacaggcataatccaccgcacctggcttaggaaagtgtttttaagcagtgcatgcctggaaaacgctttgcagtcattagaattcactgtcctacgtaaggaaaagcaatgaactcaaaacagtaaagggcttaacgcttaaacaattatttaagcactcaagttttctttttaattttcaatttttgtgggtacatagagggtgtatttatttatggtgtatttaagaacttttgtaacagaacgccccaacaggactagcacacaaagggaaagcaaatgcgacgtgtttcccacaccaggttctgcctcacttatccttaatctcaggtgccaagcaccgtgccagcagagtgggccccagtaacagcttacagaataaacaaacagtaaagaaaggagaccaaacttcggtgaggaggaagaggaacgatctcaaggtggaggaaaggcacaaaaaccaccagtaagtgccagaagcgcattccttactctatgcatgcaactgaaacatgggtcctgcacttacgtccggtgttgcaagcaagattaaaccactcctaactagcagtgaaaagtctaggaaggatcccccgccccaacgccccttggattctccaactactcaactactgaaaactctcttaacagaagacacctctccttccctgcacacaataggagcttaacatatgaaagtgacttcccaatttcagcaaaaaccttcgccgattcagaagaaagctttcccaccagaatcccctctccaacgttctagcttcgacgcttgcagctggtcagagggctcttgccctcctcgggccgggtcgcgggagggaaggtttcggggggcctccttgcccccacccgcggggtgccaggccaagccccgccgagtaactgctccgcctcccagcccggtcccccaggtccctgccccacctgactggtcgccgctgtaatattccgagtccatggcaggcggactctcagcggggagtgtccgcgccccgcgccgcccccgtcacctccttccaggcggtgtgaccccggatggcgcggctaagtgttcagagactgccgcccgaccggagaacttaacgggtgcggagggtaagaaagcggtagcggcaaaggcgaattctttgacctggaagccccggcggaaaaggccgtacccggcaggctggcgggcgggcaggcatgcgagccggcgttctacttcctagaagcaccgctggggccaaaatggcgtctgcccacgaccctcaaaggaatgcagcgcgcaggcgccgcaacccgtcaaccggccaatgagaagacgcaacagcaatgacgccaggcacggccggaaaggagactcctgggaaaattgagctggaactcgggctttagttaaataccttcctcgggtggatcctggtctgacccccgtggtaataacgttatcattgattctttatcatttcctagattctgtgtccgtgccttgtttgaagagcttttgagatactcttccgaaaaatgaagacctgctcaaatgacttttccgtcattcagccaaaccactgtctttcccgtcaggcccagaggcgcctggttcccgcccgcagtaggcaagaaagcgggcgttgctcactgggacttgtagtatgacgcccgcgagctgtgatgcgttactaactggcgcgatccacagcgcctcctctcccggcgtcttcctctctttcattctaaacaacgatttaatttccttgttaagaagccatttagccaacagtaagaagtacacgtctttgcttccagaagggttcccctgatgaaacaccggaggaaggtgaagttgaactttacctgagccctgtgttcctggaaaacagcggtgattaagaaaccccctcatctatttgtgtttctggaacggcacactgtaaagaaccacccgtctccatgtgactcagataaaacgcgtgcagatgacccccttgtttgcctgtgacaaggccagagacctttcccctttattctgagcctgttaataaagccaaacagaccttccaaattcccgctgatgatatcgagtgattagttgagattagaactctcctccccccaacttgttagacacagagaacatttcctgttcacctgactgaaacttctcctgattgcaaaacaatcccaactgtcaatcatcccaccttcctccctataaaagtcaaaactacgctgccaagacactgatcatatctggagtgctctccctattgcaataggctgagtaaaatccatttccttacttgttcattttagtcttggacagagaggggaacattcttgcctttggatcggaggagggccagtagaggtttaagcaaagactccccaggaggtgtagacatgtagaaaaagagccttttgttactactgcagatatctgacccttcgttagccagtcagagtatgctggcagagcccaattataggctcctgaagaggacgtgggaagagaagaaaggggagaagtggtttctctctggaaattcccattttcctgcaagagagttcatggatattcctttccgaagtggtggaaacagcattgaatccaaattccttcttttcagctgtgggaatgacatcttctcaggcagtcttgagaatcaaaagaacaaagaattagcaatgcccgaaaccgaatcacttgatagaagatatcaaggctctaagccctcttctaaagagaaggtgagagtacacctgtgtaaatggagcaggattaatagatcaaaattccaggcggaggttcagtggaagagaaccttttagt

SEQ ID NO: 38042 - DNA, 2227 bp, Homo sapiens
gaaccccactgctggagtcagtctaacctgggttcaaatcacagcatagccatgtttggggtgggtgagtccagcaggtgtctgctctgctcagaacctgtctgctcatctataaagtgcagcatgatcacccccgtctgaaagcagtgctgggggctacacaggctccctcgtctctaacataggtccctgggcgcaccctgccaggagagctgatcacaggtgacatccaaccctgttagataaagtcgcacgcgcccaccctgtcgccaacccagggcccatccgacgccggggcagagcccacggcgtcggagggccccggtcgggtttccgagggaaggcctgccctgccgccgcagctttccggccattgtccccgccacccgccccgcccctggccacctaccccgtggctggcggcgggctctgccggtgctggcgccgccggtacagccccgacgcggccagcgcacccagccgggccgccatggcgcggggcagccgccttgaggtcgcgggcgcgggccgcctggtgcaggggctatgggaccacctcggaggggaggcgcggccgcctggggccagacaccaagacgggacgggcgtgtgggcgcctcccccgcgctggtcgcgagctcacgttacgcgctgggatctccaaagggcagcagagtcaactccaaatagaaaggatattgttcgcgccgcgggggcagctcctgaaagctgaggctggcgggggttgggtcccgctgggaggggactggtctgggaaggccccagacagcactgaggtgaggtccacagtggcggcaggacacccaggaggtctccggctgccacctgccaggaggaaagcctgtgcccgtggacacactgaggagggcagagtcagctgaggaggacagggaggacctggcgcctttaggatccctgccaacagttaggaaaccgaggaccggagccacacaggcccacattctgctttgctcccttctctgagaccctctgccacaaacatcaccgtggggcacccagaccagggcagagccgatcctctggatctggccaacaaatggtcaggcaccccaaaagaggtccttattttagagaaaaggcaatcctccagcttccaggggagcagacgcagagggacctggtggcaaccaccaggaaggcaccatgtaccccgcatttttacccagagagactggcaaagttacttgtgattcataaacacccgcggtaggcatccaaactgtgaccaaggtaagcctggtcagcagtacaataaagatccagagcactcatggaaatctttagcattgatcccatttccctgaaagacctttctagaaaggtcagaaagcttgagcagtatcttcttctgccttctgaaagcaagagctggcagccgtcactaaagacagcagggcactgatcctcccaaactagggtgggagaaagccttggaggggctcactggcattcagataccaggcccacacgccactgaggaacacactcacccagcaagtcccaacaggaggaggtactcattaagcaccctggcagtcaagtgacgacaagcattgggtacagtataatttgtaaatgtagtccaattccaaagttgcccaacactgatcagttcaacaaatagtttttaaaggtggccccaggggctaaagggcatggagaagctgagcccagaggagccaaaatgaatagggaataccgctgactctctgatgtaggtagccgaatgcttaagaaaacttacaccgaaaatgttcttaacagcagctacaagtcaatgccatagggcctagaccctctcaccactcccgactcagcccatccatgtggaaatcctcaacactagaatccaggactctcatgcagacccgcagttttctgtaaggaggaaacatttatttagggctccaagggtcacatatagcactggaaaggaggctacagccacaagtgttttgtgcaacataatctgtaaatgaagttcaagcacaagtttaccaagtactaatcaattcaacaaatatttactataaaagcggacatcgaaggctagaaattgagagaggcttagagtctgattgagcccaaatcccaaatctctgcacaaccttaccacccattctgcagcctgtcctgctgcagggatgggattgggagccacagatactgtaaactgaatctagaa

SEQ ID NO: 38043 - DNA, 2220 bp, Homo sapiens
tccccagcaaagccacaggtcactctccgggctggggctccccaagagccccaggtcatgggatcctgaagaacagcatccccctgccaggacttggctgggggagaccagggcctcagggacagccccctcccacccagtcctgagtcatgcacttgtacccagctaggttccagaaagggctgcagggacaaacactggccggacactggtggacctgtgactggcctcctgagtggctcagcctctgtggcctctggtgacctcatctgtgaaatggcaacgaggggcctgagagcagagggtgggccaggcccaggggagcgccctgtccccaaccaacccctgcacagctggtgcttgggcgcagctctggccaagttccaacatacccttcaacatttttaacatttttaccaccccaggtttacagaggaggaaacggaaggctccagagatgacactcaccgggatcggggatcgcacagcgcgggctcggggaagttgggggaggcacgcaacctttgaaccttttgcccgtggttggtgtctgaccttggacaagaccccctcccgcagccctgggcgtcggttgtgagcagacggctgtcccatcttgcagcgggcgggtgggcaggagctccaccttccgctgcaggcgctcgcccagaggaagaggcgcgggggctgggggacccctgccccgacgggcgctgccgccccggcagctgcgagaatccgacgcgccagggcggagcggggatcgtggcgccgcggggctgtacgagggcgagctgcgcctcggccaggggtcccgcagtcccgcctccccggcccgggggcgtgggtgggggccgttaccttcccgtcatggtggcagcgacgccgagccctgggttgccggggttgccgcgggtctccctctgctgctgcagccgccagccgagcgcccgcccgccagcccgggccgcggagcagggagacgcccaaaaaaggccaagagccgctccgcccgcgagaggggtgggcgggggtggcagggtggggcccgcggggcggggtgggatggggaggtcaaggctgagggtggtgggggtgttggggaggtgacggtgggaggttgcgggagtataggtgggggtgggggtggcaggtgggggtggcggcgggtagggttggaggggtgggggttaaaggtggggctgacggtggggttggaggggtgagagtgaggcgggggtgggagtgggggtaaaagtaggggtaaaggtagagggtgggccccgctcccgcacagccccagctccagggacacggagcgcggccagcggcgggcgcgggtcaagtccttcccaacccgggctctgctcgccacctcctggattccgggcatagctttccttttaaagggagtaaagttataataaacgcgaacaagcacccccacccccacagccccgccgggacgccccgcccggcgccccctctgcagtccctgggccgccccaaccgcaaacgcgtgcaggagatggtaggcgtgggggcgatgctgagaccacctccctcccgggctttcctagcccggagttcccaccgcggatctgggcactgactccctcccgaggcacccgggaccgccgagtccacgcagtcccgcccccagggaggctaaagccgagaggcgtccctcttcagtcgcaaagctgctttccccgggaaattccgatttcatcccccgttgcgggccatcgccctaacttggcgaaagatatttcttaaacgacaaaaccaaatgcccagctcccaggtttccaggggaaccaggcacgcctctgtataatgaagcgctgagaagctaccattagaggcgttaagatggaggggtaatataaactatttagggaatctcttcggaggaaattttcaaacaaacaaaacaaaaaacccccgccctgcctaaaggcagatatttccagctggacagtggcgtgcagctcatctttggaagcagcccagatgtcacactgaggtttgggagctgggcggcctgatgtgtaaatgtggtgctactccggtcttggcagcagagaaagatgatctagaaatgacggtgtgaattagcaacccacaaataaactggtgccgttcagaaagatgagttgatagtatcctgcagttccacctgcagaaataagctgggaaaagacacctgttcctaag

SEQ ID NO: 38044 - DNA, 3194 bp, Homo sapiens
gagaccctgctttcaattctttggggtatatatccagagtggaactgctggattggattgtaattatatacacacatacacacataactgtatacaaatatgtgtgtatatacgtttatatgtgtctgtgtgtgtgtgtgtgtatatatatatatatatattttttttttatagtaacttccatactgttttccacagcggatatagcattttacattcccaccaacggtgcacaaggcttctagtttctccacatccttgacagcacttgtaactttctggtgtgtttttgtttttttgttttgattgtagccatcctaatggtttagcccatgctaagtgatcaggctggtcactattattatcaagtgagataacaaatcagaatatattttgaaaaagaattgcatctgccaggatccaaccaagaaaacagaaagcattaaaaggaacttaatgggggagattagttacacacaggggatggaaaggctgagaagccaaacagcaggaagccgttaaccttacatccacctagggcagaggacaaaggacacagggccacccaggggaagccaaggtggtgaggggagctgtggaggcagctggaagaatctggaggaatctgacctgtgagaggaaccacaagcaaacaccctctaggaggctctgagaaacagcagggcacgtgggtgcggcctgggaacagatcaggattgacctgcgtgcgagccagcttgtcacagtgatgtgacgatgagtcaggacacctgggcgtggcgctgtccagagcacgagagtgacaccaaacacatgggacagcagcaccgagtcttggacaaggggcgcgaaggagtcaaggatgttgccaggcctgtggccgaaactgagaacagaatagagaagcaggttgagggtgctgggtgtcaacccttcctttatcaaccccatggtaaatgatcaggatggtcactattactacaagtgaggtaactaatcagaacgcaactttccccaaaaaacccacctgagttacacaggtctgaacttttttaaaaattaaatttttattttgagatcactgtttgtgttcagttgtaagaaacaagagagattctgtgtaccctttacccattcctccatgttgcaaaactagcacaatatcaccgccacggtagacgcagtgaggccataagacatttccgtcagcaaaagggtcacttcttgtgcccctttagaaccacacccacccctgccttccaactattaatgctggcaggacttagccagaccgcaagggcgcctactccgaacaaggaagagggtcaggcgctgggagggcgactgcaagcggacaggcagcacctgcgaccacggtacttggggacaccacaaaagtccgcagagcaggcaccgcggcacttccgcgagcgccgcaggccctgcccctttcgccgtcgccgaccaattgccgcccgaagaccgaaccgcttcagcggagggccggaagtgagccgcagcttttcctttctgccaccgccttgtccaagatggcggacctccaccgccagctgcaggagtacctggcgcaggggaaagctggcggcccggcggccgcggagccgctgctcgccgcggagaaggcggaggagcccggggaccggccggcggaggagtggctgggccgcgcgggcttgcgctggacgtgggcgcggagccctgcggagtcggcagcggccggcctgacgtgcctcccgagcgtgacgcgcgggcagcggctggcggcgggcggcgggtgcctgctgctggctgcactgtgtttcggcctagccgcgctctacgcaccggtgttgctgctgcgcgcgcgcaagttcgcgctgctctggtcactgggctcggcgctggcgttggcgggaagcgcgctgctgcggggcggcgcggcgtgcggacgcctgctgcgctgcgaagaagcgccgtcccggcccgcgctgctctacatggcagcgctgggcgccacgctgttcgccgcgctgggccttcgcagcacgctgctcacggtgctgggcgcgggcgcgcaggtggccgcgctgctggccgcgctggttgggctgctgccctggggcggcggcaccgcgctgcgcctcgcactgggtcgcctgggccgcggcgccggcctcgccaaggtgctgcccgtgtgaggacctcgcgccctcgccgctggggaagtacgcggagccagcgccgtcggagaccgcgccggccgagctgaggactgcacgccgctgtgcggaagcccgtggcgaaggccctgccctaacagcctgcgagtctaatccgggagcggctgctgccagcggaggcgacagcagcgttgggagctcctcgatgtcagctttttgtgctggacttggcacacgctctgaaaactgagattttgtcattgaactggtgacaggatgtgagacggttattagaagttgctttcgaagtaactgtggtcttaggttcggctgagtaaagaaaaaggatttttcttcgagttagctgctcttgtgatttttctcaggctgttttgtcattttaaaatccagtggtagatgtagcttagcgacggtagttttttgttttggctatactaagacttggaaattattctctccagtgtcagcgaatccagaagggtatcagattaaacaccgaattcagccactggacttttaaaagtacttaagatggtttatctcgggttttttcttcagttaacaaaatcataaatatggtgccttataacatgaaaggaaaattagttgtgtatttcacgacgaaagcgacggaccaaaagaaatttcctgccccaagaagcatgggatccaggaaggggcgcgtagatgcttaacggtctcttcggaaatcctgcaaatagaaagataattctagatccggaatacctgtatctggtggaaaccatggatttctacaagctcgaattattcctcattgtatagcctgctttgtaaactagtttacaatttgcaggctgatcttaagatttttttatatctaattgctgctgccttcattttaggttcagcagttacttttaactaccttaatttattgccagaaggtatgagcctaacattctgatgagtccagaaaactacgttttgtcagtagcaatacactaggaagta

SEQ ID NO: 38045 - DNA, 1313 bp, Homo sapiens
catcagatcctaaggaacctgttaccccaagcccctaaataacctgtcttgagacagtccataggatcccaaagctcggtgaacagtctgaaaaccaatacataataagttttatttgaaggtcagaaatggtgtccatgttcccattttatttttcctggatcagaccattttatgaacaaatcttaaaaaaaattcttttatacaaaacttataaaaagcaccaagattttctaatacaggaagaaaaaaggcaaacaaagaattcaagtaccatcttgtacaatattaacagaactgttactcaagaaaatgtgttaaacattaacagcaaactcaggctacttctagccacaagaacataaaatgtaacagatcagtttaagacaaagggtatatgagtacccatggcccatagccagatactccagttggacagaggatttaagattttaaaaaattaagaagcataagtaatctgtgctctggtcaaggaatatgcaatttattagtattttaccttcctttaatgcaaaatgatttcaccacaacccaacagtcaacatcaacttggagtgattactattagtcatctttgttgtccagtctagaaagttacatcagtgaaaaactatagaattaaatggaaagttaattctggaaagggggtatgcctaggcagggcagtgttttcacaatgtatgttccaacaatacagtgcatagaatcatgggtgaaggggtccggcagtcaggtaagttgagcaatgctgaattttaaaatgggtaagtttctttcccagtctgagagccttcagtcctttcaatatgtacattattacaaatctgtgggagaatttggtcacgagtcttcttttctcaagagtacttccaagtctgccagaaggctgattttggaaatgtgaaacactagcttactacatttgtctggcaatgatgaacctgaattcagcagaatggacacttccgggggaggaagaggagactggggaagggcatgtaaaggggcctttaacctttaatttgtaatgtgtatttctttactgaaaattcagaaatgagtgttgcaaaatgtaaggatttgatcagaactgagtggtagcacagaagtgtttttcaagttataaaaaattttgaaatgtatagtgtcaggagcaaccaatacacaaacataaaaaagcaagctcaaatggataaaaaggtagatgcaccataaatctggcagtctctaagtcacacatttactttgcctatgtaggtaaaatggtttctattgatttgtaccaacttgta

SEQ ID NO: 38046 - DNA, 594 bp, Homo sapiens
actttcagttggccagattaaggatacacttctttttaattgagaatttagaaacataaaagcaacaaataatccgtgtcaaagtagaagagtagttaacccatagccatccacagcatcaactgtaatttgaatctatgttttgccagaatcttcttgggtatattcacagaagttggtaaatgtggctccctaaactttgtccacctactgttattcacctcttgacagaaaggaagtaacaacggcagtgatgaaaacatgtatctatcaaaacaagaagggtgcatgaactcttaaatactgtgcaggcaggtatctatcacatgagccctggcagattgtgtaatttccagatatgactgagatttttttctattaatgagtaatctgagataacatatgctccaactggatcttaacaaacatctccatttctgtttcaaagaaaaatgtaatctgagaaaacttcaactgggagctggttatattattaatttccaccatattaaaaacatattcccataaaatatccatttagtccatactgatataagcaaataactgaataaataagtggagaagagtgaagtc

SEQ ID NO: 38047 - DNA, 2122 bp, Homo sapiens
caaagttcctgaacagtcaacttaagatcatgtgtgtagaaactactttaaaacattcttgacaggctttctacaagtagcccgtatttttctgatttgatttaaatagatccaattacggaattccctaccgacctgccgccgccgcctcctccttactccggaaggggccactaatcccaagggttacaaccaagtacaaacattcattgtcatttcttttaagaaggcatgctaagatcctcactacttagttgccagaagacaacttaaaatcagaaacagggatctagcacaaaccaaatagaaatacaactattccaaaaaagcagggctttgcctgtcaagctgtagcctcatccttataataagcaccgatttcaagccacgataacatcacggctaagtcttcagctgttttgcagatttcacgttaacttcccttgaccctttcaaccaactacttcaactcggcccacttctttccactcccgccccaaacctcagttaaaatgcatttccctccaaacttcacgtcttaactgtggcctgacttacgtcttctcgtcgccaccgctcccagtcagggccttagttctaaccatggccgcttttcccggttggcctccagcctccagccccctcccataagtctcgaacctgcctcgaacagccgccccgaggtcgattctcccagttcctccaacctgtgcccaggcgcccgtccaggcccccaaagcacgcaacggccgagcccgaaaatggcggagagtgccgctgcctgctgcaggcgagcagtcccgtgtcgccgccgcactcaccgtctggctttgagcagagctcctaaatggccagcgaagcgttcgccttcagagccagaaatgtctctcttgtttggtctccccaccccgatcctctcaatcccgctcctccaaaggagcagccgccatcttcccctatgggccaccgaacgcacgctctggggtcatcacgcactggcgggacggcgctacgtcacgcgcgcctggaccgcgggcctctgtgaggttcgatctgcgcatgtgcctaggtgaggtgccgagccgcgagaccctgcagagcgcttcctttgttccggagcgagtaggacgcgctacctcctggaggaaagaagcgactgcgtttcgcagtgctgacttttttttacagtgtgagctaacgtgtatgctctgaaaaacaccccgttttccagtatgtgaatgagtatatttgtacggggccagtacggcagacatagcgggtcgttggaccgagcccaccgagagtggatctgtgggaagccactgtggcaccttgctgagtctgttcacccgtgcagctagctggtggcagccctggcagatcccggcacacagtcaggctccacgccttacccgagccagttgtgcctctagattacgcctcgcttaaagtccagcgaccaagatagaaaaacagccccacgatgcaaccattttggaaaaccgctgcagtttctgccaaagctaaatgtacgcttaccttgtgaccccagaaatttcacttcaagaggaatgagtgcatacgtccaccaaaggcatgtgcaagaatgtccatagcacgtttattcgtagtagtaaaaaactggtaacctaaatgtccatcagcagttgagtggctaaattgtggtgtatcatacagtggatttctacagagaaataggaagttacggataaacgcaacagcctgaacgaatagcagctactgttaacttaggcacaaagaagaggacgctgtatgattccattttgatgaggttcaaaatataactgcacagcaagttgttctccagtatgaatcaggaatcgtaccagcctggggaacatggcgagatcccatctttgcgcgtcggggtgcgttcctgtgaccgccttcctgtgatcgttcctgtgatgggtacttgggagactggggtgggaggatcacttgagcccaggagttggagggcgcagtgagccaagatcgtgccagtgcacttaagtcttggaagcagagtaagaccctgtctcaaagaagtcttacttttgactccataatccccttccaaaaatctattctaaggata

SEQ ID NO: 38048 - DNA, 1507 bp, Homo sapiens
gggcgacatagtgagaccctgtctttacgaaaaaaatttttttaatgggccaggtatgggggcgtgcatctgtggtctcagctacttgggaggctgaggtgggaggatagcttgagcggttgagaggttgaggttgcagtgggctctgatcatgccactatactccagcctcaacaagagggcgagaccctatctcaatcaataaatcaataaatcaataaagtgtaagacagctgtatacattttcaagtttttgagctgaagacctcatccctaggaataccctccccaaccacttaaagtgcgtgcgtgagaaaactcaaggctgccaaaataatttgttccagccaacagctgaagataggactctgtctctctgcctctgtgggagggtaggggcctaacttcgacaggtgcgccagtcaacaaaccaagctgcgttcacacggaccaatcctcctcttcccgcttttttacatttctcacttccccgactcccccgagctcccgctcaccacatccttattccctaattctccgttaaaacgcccagaggttctgtactaatcgaagttgagttcggttcacgctgggctcttttccctagtgcaacagtatattactgtttaaaaatctgtccttaccacctgagtgtccggctttgtttatctttgacacaggtccccggaacttcgcagtttatcacataaaataacccagttgcccaggcggtccctcccaaggccatggtccctcccaaggccatgttccctccccagccccacgccgcgctggggcttgcccaagccgccgctgaggcagggccttgggcgaagcgcgcataacgccaggcctgcggcgaccacgcgaagtggcgcgggggagtctggcagccccgagcccaacctttaggaaagatgagctgtgaggcgtcctcctctacgtcgccagcccgcggatcgctgccacccgccgccatcgccgcgccgcgccgcgcgccaccaccagcgccgccggaagcagaagcgcggagcaacggccgcggaaggggcgtggtctcgggaggggccccgaggggtgggcggggccgggagtgcgagccggacggggcgcagcgaggggaccggttggtgaggtcctggaggctccccgccaccgaggggcgccctgcactccctctcttctcccatgctcctcgccgcgcagacgtcctggggcaggtccctacgcctttctggacggaggaggtcagatgagatgcaggaacgcctgctgatggagagcagggcagccggctccgaaagtaccgggtccaatttccttcaccgacttaaacttctaaaattttattgatttgtggtggattatctgatacttctgagtacgcggacaatgatattcagaggcttttaccacacgtctgttggaacatttgggtgatgcgtagaaaattaagcaaatgacggccgggcgcagtggctcacgcctgtaatcccagcactttggg

SEQ ID NO: 38049 - DNA, 2176 bp, Homo sapiens
ggagctggcgggtactatgaccctccataaatacttgtggattgctatgctaaaaaaatcaccattgaatcctgtacaagagtcacatgacaggtattaccacaatgcatgtgtatttctctgtgtaaagttttatggaaaatggcatgtctctttgaaacactcaaatctcacaccaaggtgaacagaactgtgattagtatgtcataggaacattcggaggaagatatccagccctaagaaaagatccgatatcttacatccagacccgatgcaaaaggaattctccaatgcttttcggcaaaggcctccatttacggatttccttttccttctcttccacagatcccctcacagagccagaggaccctacaccttctccatcttccctaaaatcgccccccacttttccctcaggagccaagcgatctcccgattcgcccgcaaccccaccccaccgcgaagcccccgctgagaccggaggacgccggtttccagacacctcggagtgtgagacccccgtctccggggtgggggtgcggacgggcgatctggggacccgaccacaagacgagcactgtgcctctttacctgtagccgccgcccgccgcccgcaccgcccgcttctatctcgccggcctgggggtgccgcggagggcccatctcggcggcggcgatgtgctcggcgggcgcggggagggatcgcggcggcggcgcccggggcccgctgctgtccagccccgctggccccactcacccccgccacccggccgccgctgtgctcgcagtcctcttcccccgaacctgcccctgcctcccccgcccgcccattggccccacgcccgacgcgtcagtggaggcccaggaccaatccacagcgacctgcacgttcagagcccgccccaccctcccgccgactgccagccaatcaggcgcgagcctggccggggcagcccaaacccctcgaggctgagccaatggcagaggaagacaggcgcccccggcgaagggggcggggagcggggaggccccgcctcagccagggtctgaaagcggcgggcgcagggcccggatgtggagagtcactttaaactgctccaggagccaaactccctgggccggccgcccgcccgcccgcccgcccgcgctcccccggccgctctgcttccccgccaaggcccacgtccgccacgcccccacgcccgggtcagcccacccctcccggtgcctctcccttcctcgccacaggacacccagcccctgtcgccggcccaaccgccgtgaccagctcgcgaaagagccgcggtccgagccgcaggagacgaggatcctctgcccttccccggggacgcgcaacgggacggacgctgcagcccggctcagccgccccgccccctcgtctcctccccttccctcccgggcgcccgtcccgccattacctgggtgctgcgcccagtggccgccgcgccgccttgagctcgctcccgcgcgctctccgtctgtggggccgacgtccccaggctccggacccgcagccaccgccggggagctagcactctgccccccacccctcactccagcgccgctgcttccgccgccgtaacgagcctcccgtctattggctggcgcaggccccgccccctgccgagtcagccagtcgccggtggtcgtgagcgggagagcggacgggcccgcccctctgagccgcggcgtcctgtgggaaatgtagtcgccggagtcaggagggcgggccgcgaaggaggtggagagcgccggggcggggccgcaggcgacccggccagggcaacacacccctttgctgtctgaagtcggttctgccttttctcttggctaagtgagaagacagtggatcccaccctatgccttaacctgagggcactgggtttcattttccccgcggggaggcgcggcgcgggaaagggtaatggaggccaactgcggcggccaagggatccgcgggccgggccagtgtcgtgacggtgcccgcctccctatgccgcgagtgggactcggtgtccccaccgggaaccgcggtcggcacagcctacgcgcggcgggagccgccaggcgcagcgcgggcgcggctctgtgaaagcaggccggcagggcgcagggctctgggcggccggggcgcacctgcgcgcgctttccggat

SEQ ID NO: 38050 - DNA, 1617 bp, Homo sapiens
actggggaggctgaggtgggagaatcgcttgaatgcgggtcggggggttggggggtggggggcgcgggcgggggcgcggaggttgcagtgagccgagatcgcgccactgcattccagcctgggagacagagcgagactccaactccaaaaaaatatttttggcttttcattcactttgacttaatatacttaaaaatataccctccaaagaggtattcatttttgggtgggttaaatgctacctattccaaaacaattttaaactggtttatattagttaaaaaaaaaatactaaaaggacaaagtagtccctgtagactaagctgccgctgtccgaataagaaagctcaagcggctcataaaatttaaaaagtcttcctttcatcatgcctcctggaaggtagctatcaaaattttagggtttagtataaagtctaagatgctcagaaacattaagacaattgtccttactgtgccaccgaaaggctaaagggagtaagcttttaacaaaggtttaagggagtaagtcccagagtccaaactggatttcaccgactgactgttgaagctttcgggtctcagctgttggcccaacgaaccttcccaagaccttgaagaccggcagcctacccgccaccctgaaaggcggaagtgaggagagaggcaggactcccccctccccaaccctcggagatgagagggcgaccgcgcgacgctctgggctgctaggtctcgactcggtatccggaagtcctccagcgttcgcctgcaggaagcggaagtaaaagggcggccggcagctgggcaattgctttgcgaggctgggtgttgagtcgagccgcgggaaaggcgcgtgtcggcctctcactggcgcagcctgcactgccgctgccgcctcgccccgccctgccctggcgttgtctctggcactgtggcggactgaccacggcccgggcatgggctgcaagggagacgcgagcggtgcgtgtgccgcgggtgcgctgccggtgacaggtacccaggggtggcgtgaggaggcctcgtggacaaagagagggtttggggcacaaggcgaccctgtgcccctgtcacattgagcttccgcctctaccgtgactcagtttaccctctggtgtcctatcccttcccctattcgcgagcgccccgagttgccctcagtggtcttcttggcaaggtatcgcttccgcgggggtggcggcgggctctgttcagcggtcttgaaccttctttgaagagctttagatccttgtgccaagtgcagaaggaaatgggggaggtatcctaccatggatttagaccaagcttgatcctcagtgagttgagaagcagcactttgcaggaccctgattgcagaacgacgtgctttttaaaatagatttcaatttttcctaaaatgaattcgggttgatgcgtattggttactgttttcttttaacactgtgatctgttggctggaaattggatgatatggtttcacttttagcgtgggacctgccagaatgagatctgcgtccgtcgccaataacttatagatgtgaactgtttttgttccttggccagaatctgcagttgttttgcatttcttgccagatttga

SEQ ID NO: 38051 - DNA, 1078 bp, Homo sapiens
gagtgaatcacgattaatgatttttatttagattcttaaatttaagaatttcctagattcttatttagactttctctgtaattgtgtagtttgtcggggctattcttatcttacagaatattcttataaatattcttatcttatagaattagtatcgtttgttgtatagtaagcataagtatatagtttgttggggctattcttatagaatattcttataaatattcttatcttatagaatatttcactggttttatttccctgcttacattaggaaaccaaatcccttagcacttaatgggactgttttcacaacttacaatctgctgagtcactccttggcttccagtttatctctgtgccttgtaatttttccaaatggactttcacttttcctgccttccattagccactcacacattctttgtagatgtaaatacagctttacatagcccactaccatattgcttctggtagtatatcatttggttccttactattgttttcttgtccagttaggacttgtaacccaagaacctttgaattctctatcatgtggcctttcttcaactcagctgaagtgtgttcttttggtttcacagtgtaataatccgatgaccaaagagccgaaactggaagcagctgtgcggattgtcccggagtggcaggactacgaccaagagatcaaacagctacagatccgctttcagaaggagaaagaaacgggagcactgtacaaagagaagacaaaagaaccaagccgagaaggtaagcacaaaccgttggttttaggacagtacttctttccatttctgatttctgcttgttgtaaagacaatagaataatggataaaaggaagagaaaaatctcctattaatccttccattctaacatcaaccagtatatatttttcattttccttttatgttggtcttctaaacagtatttattagtgcaattgctatgtttttttttttttctcgtttttctggtgagggggagaaagggtattttaattgtgattatagttatttaggttcatgagttttgtgatacataaaccaaaccttttgcaga

SEQ ID NO: 38052 - DNA, 1339 bp, Homo sapiens
agcccaggagttggagaccagcctgggcgctctcacagctcactgcagcctcgacctcctgggcacaagtgatcctcctgccacagcgcctcccaaagtgctgggattacaggcgtgggccaccgcgcccggctaaaaatcagtcttttcctttggcttctggtctcttcgcctcgtttaagaactcctagctgcggccgtccggactctccctggtgctggtggaagtttctggggcgcactctcatgttgctgcctggggagtcttgcaccccacaagtgcgcctctctcctcccgcgtgaggctggggggccggcttggttgtgcaggggagaggaggcccaaggggctgcgcccggtcacccgcgcgaccaccgcgggccgaggcgggagcgcggcggcggctgtggcggagtcaccttgcgctctacctccctgctcttcccttccaggcgagcttggggacgaggaaggccgagcccggcggcgcggcccgagcgcccgcttcctcgccagcattgggttccctgaggggccgccctgccccgcgtcagcctctgcagcctccaaccctcccggggagcacagcgggacgctggaagccccactgccttaggaggccgttctcgggagggccgccccgtttagaagatgggaaaggtgcagaaaaagaagaccaatagacgatgtccccactcgcacacagggccaggttccctgcccgccctgcccttcgctctcccggcggcgacggccgcgcgacctttccggggacggtctcgggagtgccatggggtccctggggctcggatctcggcgcccgcgtctccgccgggggcgaccccacagccaggctccttcttcggcacagaacccgcctcggctaccggcctccagccccctttctaaattcctgccggcctcggggttcgggtgacagggcccggggactgggtggcgaggagagaggacaggtttcctccggtcgggcggggtggcgcggctgcgcgaggggttctgtttggagggcagcgcggagccctctgctggccgcggtggggaccgctggctcccctgaagtcaccaggccggcgacgctgcagccagtccttcctcgtcctccttcctccctgtgcaaaggtgggctcagtaccacgtggaaatcaccgtggcacaggcaccaggtgggtgggtttgagaagctgtgcagtgtccaacatcctgttacaaaggaattgcaggtatttaagaattaaagaaaaactattctcttttctacttacgtgtatcactttctcaaacgccagctgagtaattagcatatacgtgcttgttggg

SEQ ID NO: 38053 - DNA, 836 bp, Homo sapiens
acacgcctggctcccccactctggggagtgacctgcctgcgacttgtcactgggaggagtttgggggaaatcctgcaggcacaggcctgtgtgtgaatcccagctctgccaccggtgaccttaggtgatgagttatttaggctctttgagtctcagtttactcatctgcaaaacagcgcccctgacagtgaggcctgaatgagactgtcacagcccctccctgctcccagactgcaccctcgggacaggaatgccctcctttgtgcctccgctcctcagcagggctagcacgctggtgtcactccacaggacagtgccttccctggctttccctccatcaactgtggtcgggctggaggacgtggccgcgccgctgcgaagatttctctgccagggaatgtggaccaggattccagggagaacgcagctgcacgctccacagcctggctccctgctccaggacgacacccccaccccaccctggccacgatgacgcaaacagaaaacctcagtgcttacagatcccgatctcccacggtcaccaatgctctagagaggtaaatatttacacaggagcctctaaagctcataactcagaggggagatgctccccctgccgcctaggggctgtaaacatttgttcctgcaagccctgcagcagaaggcgctttctaattctcaggtggatggtgatgtgtaggcccttctgtcccaagccagtgggggcatggcagcaggggtactgcaaatatggggctggggtcacatggggtgggggcacattccaaggctgggatgatgagggggctaccacccccatgctcctttctgagggg

SEQ ID NO: 38054 - DNA, 844 bp, Homo sapiens
ccaggcaggaatggggccagagctagaatgcaaactgggctggccccagagatgtccacctgatacagcttctgagcagcggcctgggctgaccagtggagagcccctcctagggaacagctgggatcctggacaaggaccaggcctgccccagcaggaggccctgtcacagggagataacaggcccctgcccctgcccatgaccaccgggggcggtcacccacggccactgacctctgtggccttcaaagcttcgtaaacaattaactccagagtttcaatctctccagtttgtatctttccagacaattagtgatttgctctgatggccctcctgttgggccttttaacgttctctgtgtaaataatcctaggcagctgtgctggtcacgtgtggccttcaaaggcaggccaggtgcaggctgtcgggagctgcctctcactgaagccctggccccgcggtcagtctccccatggcacgcggacagctgctgacggctcgctctccagatgaggaactgggcctgcactaggctgcagaatgctaaggggttatgagtggccatggctcccataagacatggacacagtccgtggctgagggatcatgcggtcaccacggtcacagttaataagtcactggttcctctacagaaccaaatggcagactgccaccccccttttagagatgggaagactgaggctcagacaggtatctatctgggcccatgagacccaccggctccagccacaaggtaggaggggctgcccagggcactcctctcttccttggactcccagcagagctttccagaagcccacccaacacacagcccagggcctg

SEQ ID NO: 38055 - DNA, 1340 bp, Homo sapiens
gaaaagcactggcagctcttctgctcagtggctttgtcccctgaagatccacttcaccaattctttaatgcgtgatctctgacttaatggcaaagaaaagtaaaagaacacggcttagtggcaggctgtgatgatcccagaagaggcattaacattcggcttcaggaatgaagcctcattcccggcccaccgtgcggtctcagagtctgagaaccacgagatcaacagcggcgccccctcccggcgcacagtcccgcggacggccgcgcgggggcagcacgcggcccggcccccgagcgcccgcggttgactttgcaaaaaattgggggattttccacactcgcttccctcgtcgttcgtccggcggccgcccattgttgtttgccaaggggtggaggagggcagtcgtgtctgtcctcagagcctcccgtggggctggccccgctgcccacgcggggcagagagaggggtttcgtttggggacaaacttttagaggggactccggctcgcgcggacccgcggggcccggccccggccccgaccccgacccggcggcaggcttggggcgccgggctgcgcgccgtggacgccaccttctccgaggtcgccaggccccgtccgcagccgcctcctccagggagcccgcggcccctttgccgcccagcggccccgtgccgggctcctcccccagcaccgcggggcgcctgggctcccaggcagcccgcagacgcggcaggtcttcccaggacccgagggacgcgctccggccgctgcccggggacagcaggggtcctgcggttcggttcgaggaccgcgctggaagaggcccggggcttcggaagggccattcccctccctccacgcccgcccagggcctcgctgttctttgtgccctttctctaggccctccaggcccgcttcagtccttaggggaagagggtaggataaacagaagaggagaacctgagcaattcgtaggggcagcgtggtcctgggcttccccggcccttgcccgccccccccgccctgctggctcggtgacctccccctggctggccccctgccctcgcgtgtgacgtggggttgttggcaagtggggggcttggactgctgcctggccgggattcggagtctgtccagtggagcccaccctcctccccgggcagcgggactgtgggcaggcctggcgggttctgccagcttgggaggcaggacagggacctggtaacgttgccccaagggcatcgtcctggttcttctgcttgaaacttcccaagggacatgtctttagacgactagggtggaggcgggatcacagcctggatggggtggggggtga

SEQ ID NO: 38056 - DNA, 562 bp, Homo sapiens
attgttaggctctatttgatttcttgacttttgtttacgaagagtttaaattcacacagaagtagagagggtagcacagtgagccaattcctgcccttacccggagtctccggcttccacggctggcagcacgtgcctgtccctgctgcagcctgccctctccagcggagcaccaaaagccaacccaggacaacacaggctttccctgctagtgctgccctctgctttctagcttcaggtcaccctcgggccctgtctcaaggctgcttggtccctactcacacaccccaagagaatgtgtggtcttccgagatctgaattctttgggagtcccagagggccccaaagcaagagcaaagggcgaggttcataggcagcggctggccccggtgtgagctggccactgtccagctagggaggctgatggagcctgcttggcgtgccatgggcacaggcaccaggcctgcagctggcaggactctgggccttaccacaacccccagacctggctgtcatgggaaaagcccagccccggtgggccatgggggggccagcctgcccc

SEQ ID NO: 38057 - DNA, 518 bp, Homo sapiens
gaatgtaaggtctgcaaaactgatcaggcccaaggaggcatgagcatgagatttcagtcacaacccctgcacccaagcccaaggttaattgtttaaagtcattacagtttctttgttttcttccctgcagtttccagactggctggtaaattaccgaaaatgttaccagttgcacaatgtagccctcgcccattatcttcatgttcctggaatttgtgatacaaaaagtagcacatagccaatcaataggttaggtcaactaaagaactgcctgccccgtcttttttcctttaaaaccccacttgtaactgctgctctcagagcatatattcagggaaacttgagtctatgtcccctgggttgcagtcctcaaacttgtcccaaatgaaccctctacccatattaattttgtctcagtttcttcctttgggttgacatttcagagtgatgctcccttgccactgggctctcttggatgtggcactcagtgccaggatgaacctattgagttccttcga

SEQ ID NO: 38058 - DNA, 1402 bp, Homo sapiens
cagtggacaatggggcctgcttcttgggtggagaatgggaggagggtgagaattgaaaaaccacctattgagtactatgcttattacttgggtgatgaaataacctgcacagcaaccccccacgacacactatttacccatataaccaacccacgcatgtacccctgaacctacaatataagttaaaaaaagttcagaaaatgttgaaaacctgaaagtggaagataaatagtaaacgactttgcaaacctgagaaagctgaaagctaataatctatgaattgatacaaaatccagaaagactcaagaattgaacatgccaggtcccagaggagagggattggggcgggcctggaaactggagaagtggacaatagctttcaaggaaaatccactcagattcaagccctgaaaatgaacctggcctgactggctccgtagcctgtgtttgtgcctctcctacccacagggacaggctgggatttctgagccctgtgcaggctcaggaggaaaggcagattctggggaagaagcccccagcaacaggagcaatcccagctgcagagccaggctcctgtcgtcaggcctggcccatgtcctgccagtcagcgcatggctggaggaccgcacaactagctgtgacggtggctgccttctttccatttctactccagcaagctggccccaggaacagctgcgtgggaggtaaatggaaactttgaggagaaagcccagtggtcacccagggctggcgatgctcctgcctttaaggtgtcctgggcacccgagcagctgtgggctacggcttatactttccctaactgcgggtggctttattggaatgtgagacacaggccattaaccttttaccccagtcatgcagctaatcaccagagcatttcaccacctcagccgtggctgcaaaacactaagctgattatgggaaagtgcagaacacgaatgctcttgtggaattttcagtagagataagcatttgctgagattgaatgtgatgtgaactcagcgccctctccatcttactgtgacctgaagcccaatgagccggtccctgggtggaccctgtccctgggtggaccctgcccctcagtggccccttccaggaaggcctttggtcttcatgcactcagtcagctgtggctggtacctgtcctcctcaggcatcatctcaggtaagacaaggtgtgggacctggggctggcagaaacaagaacccctggtgctggaatggccggcggtgaaggttctccagagcttatcccactgcggcagctcagaaagatgaagcagctctcccgttgtgtcctcccagcacacaaacctgctgtcagtgactccaaggcccaggaggagctccaaaaaccacacactggagaagatctgtc

SEQ ID NO: 38059 - DNA, 831 bp, Homo sapiens
cctgacagcaactccacatttccagaaggaagaaaacaggatcttgggtgttggtggtgggtcccaggaatctcctctcagtgaagccatttcgttcttccaggggctgagatccaaacccagagccttttggccttcctcttccctcactccccatcagcatacacagccaggactgggcctctgctccctctggccttccccactcacccctgggccaaccgtccgcttctcgcctggatgactttggggcctcccacctgtcagattatacctgttacacctgagtcacatcagtcccacctgtgctcaaactccccacggcccccagccctccttttttagccttttcctgcttgttttccccattgcacttgttcgtagctggcctggcttgtatttcccggttcatttgcattttgagtccaccccactgcaaggtgaacatgtgaacagcattttgtttgctttgtcaacagctatatcctcagtgcctacagtgtccccagcagggagctctgctgagcatgttgatgcagcgacacagccagagctccaggcagagaccccatgggtggtggtgtgcactcggcggcacctgtgaggtcacctatgatggcagccatgcagtccagaccgtgggagctccacggcccagccccgcacacagccagtaatggcagccctagctccttaccacccaccatgcaccttttagattcaagcatgggctcaggttccttggcctcaatgttctcatctattaaatgggatgatgacacaccttcctcagtaatagtaatgcagatggacagatctccaaattggatg

SEQ ID NO: 38060 - DNA, 616 bp, Homo sapiens
ggagaggtgagagtgtgtgaatgttttggagagaatgtcatggaaaacaaagtcttattctgatgggacctgtggatgtgcagagctgtatgtggggccatgatgcccccaaagtgggcattcatattccatgcgtgggcagcaccaaacctggtggctaggttctcacccaagaccccgggtgcaggaatgggaggtggtactaagttgccagcacctttgcagcagcaaagttttttttttcttctgttcctgctaccctgagaggtggcagagtgaatgtcccaagtccacagagttagtaaacagccacacctgggctcagggccagtttcctgacatcaggctagctttaaattagaaatgggaatgtcactagagggaagtgctgacgggtcctctgcatactgtgcggcatcctcagacacgcacacacagagcctccacggagtgggtctgaggggtctggccccttttgtcttctctagccaaagatggagtgagggtggacgctcagaactcctggacctccaagctctgggccatctatttaatgtatttgagcttcagtttcctgtttgcagggtggaggcagctgtgagaattggttgagatg

SEQ ID NO: 38061 - DNA, 556 bp, Homo sapiens
tgcatattcttaaacaaccagcttctctctcctagaatggacctgcaagaaacctcccttactaacagtgatgttatttggtttacaaatggatcttacttaaaggatgaatctggaatatcagggcaggttatgctgtagcagctttgactgaggaaacagaaagcgctcatcttccagaagtgacctcaactgaacaagcagagttaatggcattgattacagcctgtcaattggcaagagaaataactgctaatatttacatagatagcagatatgctttcagactaactcatgactttggaatgttatagaaacaaaggggatttttaacttcttccagtcagtccataaaaaatgggcacttcatttcagaattatcggaagccatactattgccaaaataattagtcattattaagattccaggccatttaaaccagacactccaggaagcaaaggaaatcaattagcagatagtaaagtgagagggctgcccttagcgtatctgaacaagatacacttcagaacgctgaccccattagtttggagtgac

SEQ ID NO: 38062 - DNA, 1269 bp, Homo sapiens
ccacatccaatccatcagcaaaaaacagctgggagctggaaaggcaagactctcttcctgtgagtccttcacaccgcctgcacctgtctaagccaccattccactccctttcccacctacagcctggtgatatctcccttctcctctgccttccctctttgcagctcaatctttctttccctaggttatcaattgtataataaagattataaaatcactctatcccaataaatatagcttctatcagtcttaatgactgaagcaccgcagaattctcggtttggaagggggttttgctgcttaaaaagtttcaaaatcactgccagagggaaccagcagcccttttgttgatagcagagccagctcctctcgcacgtgaataaacaaccataaatgagacacggcacatttgagcagtcttttaaaatcatttaagctttaaaaattatttaagacacgtttgttttaaaaaagcaattcaaatcaagcatttgcaacatacctacgatacctctatggagacttagcatctacaagacccagtttgacaactgccagcgccagggaataagtgaagtttctcagcccaagtcacacaaggccctagccaacccacctctgcctgctccctggggctctcctctaccccagccctctctccctaaagccagcgagaggctccgcgattgtcccccccaaatcctttcccccttttcgggaatagcaagcgagtccaagagatgaggtcacgtgatgccgtccgaccaatctggtgtgagcagaggcccccattcttccggggagaggggcgggggcggggccgggccgggagcggaaggagcaggggtggacagaacagcctggggagggggcggggacagggcgaagcagggaggggagggggcgggaacagggccaggtggggcgggcgcgcgtgtgggggggcgggcgcgcgtgtcgggggcgggcgcgcgtgtgggggggcgggcgcgcgtgtcggggggcgggcgcgggggcgggcacagcaggcgcagggtctttcccacatgctgggctgcagagtgaggaaaacccatcccggaggaagctggcggttaggctggctgaaggcattctgcatgatgaacacaacagttctcaaaaaagtaatgatgtcataccagagcagcaggagggggtggtctgtgaccatgtatgcttgataaattctggatttaagcaaagtaggccggcttctttgtcaatagacgtattgggttattcccgggg

SEQ ID NO: 38063 - DNA, 1509 bp, Homo sapiens
ttcggaccccgtttgttttttgttttgttttgtttttctgacagcgacagcccttgggcaacgctaatcattccaagcaaattctgtcatgccaagacctcccttaacagcacgcgcccacttgttcccaactctcctgccaattgggcttcgggagcctccaaaaccaaggctcggagatgtggagcacacaggggaagggtcgagctgggacccacacccggctcttacacccacaccgcctgttgagcccaaggctcaacttcaacacaaagctctccttccctcaattccttcaacgaaggttaaccttcagcgaacacctaccggaccgggacagagtgtacgagccgcgcgggaaggtggcacaaaggcatggcccagaggggtggcagaagactcaaccggggccctccactccccagcctgccctgcctgggcagagccggctggccggcccgagtcctggggctcgcggaggaacggagatggcctccgcaggggctcggggaagcccccagggcgccggaccgtctcaggcgcgcatcccgcgccactcacctgtgggatccatagcgtcgctcgcctcagagatggaagccgccattccgccacggcgccgaaagtcgtcatcaagctgcgcgcagagccacgccccgcggccgggcgggaaaagcgcttccacctctttgggccgttacctcaaaaggcgcgtgcgcaaagcgaaggccggccgggcggggaagagaaatggcgaggcaggagtgcgggggagggagtggtccttagctgaatgcgcctgcgttgtggcggcctccggcgccccaaggtactttctccccagcaaggaatccgcgtgcgcgtaagcagtattgttgattagtgccccccccttccccccgcccgccccgaaaagcgacccctagtggtgcaccggtgcggaccagaaaattgcacgctttcttgaaagaggcatttaccgagcgcccaatgtatgcctggcactgggctgggtgctgccacctaagcgagcacgaccaatgcagtctatcagggaggcccagatcgccaagcagcggacccctgcggtccgccatgccactcccggctcctagagcgccgctcagcacaccgtgagcgcccaataactgttgggcttcaatgacgccgcggaggcggccccgtccccgcgctcccgcccctcccgccagggcagcccgggaggccagacgttgacgctgcagggagagggtggtgggcgcagccgctagggggcgcggcggggcggagcgcacctttccgcgggccgcggggatggcggcgcagggcgtagggcctgggccggggtcggcggcgcccccggggctggaggcggcccggcagaagctggcgctgcggcggaagaaggtgctgagcaccgaggagatggagctgtacgagctggcgcaggcggcgggcggcgctatcgaccccgacgtgttcaagtgagcggggcgggtgggggccgca

SEQ ID NO: 38064 - DNA, 2074 bp, Homo sapiens
agaaggaagagggggctcacctgcttcgcgaggccccacctcctctggggcgtggacaccagctctcaccaccttgaacttctggagtccctcctgggcctcgctgaaggacgagaagggaggatggagctttggcagcccgggcctagaacgcgcccgcccgcccacccagcccagcatggaagcttcctcacctggcgtggaggcagacctggggctccatgtgggaagcatactgcaggggccctaccgacttggcgcccatcgcgtagcgagccttggcgagcgagagccagccctgcagggagaggaaagcggtgagactcagtttacgcccgtgtaccctcctgcccgccccaggcgcctacctcctccacccgggcgttcaacaccgttcgtttcccctccagctcctccaggtccccaagcagctgcaggaccagcgaatccagctccgctcgcaggtcaagcgccgccatggacacacctccagatctggagccaccttcttccttgtcaccctccgcagtttggcaggacagccaataggcacacgagatcctccatcaaggggcgttcccatctggggatccccacgccggcagcaccaaggcctctgggtcagcttctttaagggcaagcgcccttagagaagcagcacggaagcaaccaatcaactggtttctccaattagcccccaagtggatcagcctgctgaactgtcggctagggttataggtggttctgagtccttccggaagctgccgaatcttagaagtcgcgccactgttgtggcgatggaagaaggcgaagctctacagaaaccattttggttgagggaagagtggttttaaagttaatttggaaaggagccggcaagcaaccttcagtcggtgtgcggtttttacagttgaactgtttccagccgctaattatgattgttttagcggttcgtcatctgaaaactgcattctgcacggcggtggtggggggaggacgaggatggagaagcctgggcggacatatttattagctgcggtcctaagtcacgtgtgacattctgtatccagtctatcggttatcccaaggagaacgccctgccggaatggccaatcgccttgagatgtccccgccctattcgccatcttaacatagggcattccccacagctgcaggcaccagtgaagcgtctaagggaccatcttggttgagggcggaagtgaggactgtgtcgcgctggaggagcccacagattctcccggacccacgtggaagcggcactcaagatggtaggagaatgagctcctgtttcggaggtccggggcgcgtgaagtgctggggatgtggctctggggacttggaggctcagcggctccggggctccggggttccggggctcgggagcgagtagtgagtgactgggcctgctgttcccacagctgcgccgcgaggcccgcctgcgccgcgagtacctgtaccgcaaggcccgggaggaggcgcagcgctcagcccaggagaggaaggagcggctgcggcgcgcgctggaaggtaaggcatcggccccgcgggcgtctgcgtggtaaaccaccccggcacgcatttgtgttcgaatatccgagcgtctttccaaatgcttgccggccgttttccttgcccattgggttctcctgttggttttgagagtgtttcttccgtgtgatggtattaattacttgtcactgacgttgcagtacccgggttttgcagcttgcccgctgtgtgcagtgtgtcaagttcgtcccaagttttaaagactttatcttgtcctgtagaaattctctttagagcggtggctcactgctgtaatcccagcactttgggaggccgaggcgggcggatcatgaggtcaggagttcgagcctgaccaacatggtgaaatctcgtctctactaaacatacaaaaattagccggccgtggtggcacgcgcctgtaatcccagctactcaggaggctgaggcaggagaatcgcttgaacccgggaggcggaggttgcagtgagccgagatcctgccactgcactccagcctgggcaaa

SEQ ID NO: 38065 - DNA, 1969 bp, Homo sapiens
gacctttaagaaagtgtgcccttaaatactctgatagcccctagtgaattaaattgaccacctgacatcatgcccctgttgacccttcagagactcaggcacacatccaggccccaatgctacctttcaacccctcaacgacctcaaactggtgtccactgacgccccttccagtgacacccctcttaattcttccgacctcggcgagaagggggctaacctaggcctgtccttgaagagacccaggtgccagtccattctctccagcctcccctcggtgatcccggaagctggaacggcggctctcctctgacctctgcacactttctgaagatgggagtgtcagggcaggcaaaaaagagaagctcttcgttccccagaacccacttccagtgcctcagttctgtttcccagcaggcttgtgcaggtcgagatgctcacacaggactgaccctggtgccccagcgcatccgggaaaaaggaaccacaaattcctcgggaaatacacagagaagatcccgctgccacttggcctttcccacggcgtggctgcccctccccggcctcccttgggcccggctggagcgcacagcgcgggacgcccccgacccggggtcctctggcacgaggggcagcctgatctcggcgaccgtctccacccaaggctgctgcccgccccagctcggactccgcgcggcctggctcccaggggacgggcgggagggcccggcgagaccgctcggccgtccacccagagccggcacccggaggtcggcccctgggcgcggatcccgatctgagggcgggtcccaagcggcagggagcgaacctgggaccgtgccacccccccaccagtgggcgcggcagccgaaaaaaaggggaagcgccggcgctggactctgctcagggcagcccgcgaggacctagggctccggccacagcggcccgagcgcccggggtggggctacgcgggctcagaacacggtggctggggcgccctgcccgccgctgcgcgcttccattggctgccgaggcaagggcggggactcagtcaccggcctccgcctcccgcggcgtccacactcgccgcgcgcgcggcggccgggctggaccttgctggcccgcggcgccatgagccgcagcctggactcggcgcggagcttcctggagcggctggaagcgcggggcggccgggagggggcagtcctcgccggcgagttcagcgtgagtggcacacggggtccgcgagcggcgcgccccggccctggccctgcgtacgcctgtcctccgcgcacggcgggctctgcctttctgtctcggtgtccccggtgtctccccgcctcggggggtctctccgtgtttctctccccagcacttctctgtcgctcttgctgtctccgtcttcactctctgccccccggccccggagcgcgacgtccacggccaggccgggacggaccgtgcacaccctcgttcccggtgtcctcgtcgcgctcccggaacaacctggctgcgggcgggacaggtggggcgggcgccgcaggggagggcgggcggccctgctgcgctggacagccccggccccgccgcttctggcgacctgactgtcccctgtgaccacaggaaggaaggggctgcagcagggcgaagaggaacacggaggctgtggcgtggtgagggtgtgaacgccgggctcgaatccgcgtccgggcccgaatccgcttcccgtcccgaatccgcgtcccggccatccgcgtgtggtccaggcggtctacctggcccctctgacctcggcttctcccttggtgaaatggggacatgaatgaccaaactggtctaaggattaaatgatgtgggtgaaaagcacttagtacatattgggcgcacacttcgtaggggcgttcgtcactgcctataaagattctaaacgtgggccaggtgcggtggctcacacctgtaatcccagcac

SEQ ID NO: 38066 - DNA, 1396 bp, Homo sapiens
cagacgactcagcgtgtctccccagagctgctctgcgaactgcacccgtggaggagcccatactttctgaacagccgctttgatctacttaagcactgccgtgttttcatagctatggcccagctatatcataggacatatatcctatgtcatagcatagcggtgacagcagcaggcggcgttggggcggggcggggccagagtgacaggcagccctgcgggcccctggcccctccccacagcccctgagacttgtgcggcccgcaggaatcttctggcggccacccggttcgccggcagcactgtatcagtttctacatggctcctctcccagccccttacgtggcttatttcgtgtcaattctagggaggttctaccgtttccgttcgccgggggtctggaacgcgcacgggccctgggcgagcctccctgagcgccgccacgtccgccttcgtcgtcctcccaaccggaccccgcacccccgccctccctagcgctgtgctggacgcttctctgtgaggagagtccctcgccccttcttcagatttgggaatggactctcgggcacctgaagcgcctgctcaggatcaggccggcacctggacatgaatcccaaacagaaagcctgagccctgcctggcgctttcgcggctgctggcacggctgcgcagaaacgccagcgtccctggaccgagcgcggggaggggcaggcttccagcagcgctgtccactgggaagaagacacaacccacatttttagattttccagtttccacgttgaaaaagcaaaaagacatgagattgatttgtgacccagtgtatcaaaaatattatttaaccgattaatcaatatgaacaattgttcattagatattttacttgtttttaggactacgttttcaaaatccggtgagaattttatactcacagcacatctcagcgctgcagctcacgcaggggcgcctccagcgtcaggctttctgggctcctggctgcgtgctgctgggcacgttgcttaatatggcaaagtccccatttttctcatccagaaaacggagatcaaagtacaggtgccaatttcataggactacagtgaagatcaaatgagagagctcagccaagaatataagacccatgcatggtctgtggaagtctcgtggtctttaaggtaatttgcatgatttggggattctgaaagattttggagtcaggacagatagattacagcaccactctgccactcaccaatcacttattaggctggtcacctcctctagcctggcccttccatctgcacagcctttgcccctgggcagtgagccttgggtctccttcccagccgtggctcacgcctgtaatcctagcactttggaaggcaggggcggatggatcaca

SEQ ID NO: 38067 - DNA, 1141 bp, Homo sapiens
cttgagccaccgcgcggggcctctttgggggcttttcataagggtgtgtagaatgtcagtaagaggctgcttcttcagagccctcttcgtgctacataagccgggcagggtggatagaagtgggtctcttgctgcctgtggccctgaaacccagccacggggcggggcctgacttcttagcgcagtccccctgccgcgtggaggaccctgctctccggcccagcatagagcgactccctcctgccagcagggggcgcgcggagctgtctctccggaggctcccggcggctcagtctcggaacccgcagccgggagcgcagggcgggccacacagggcgccagcacctcccacgagctccgcgggcctcgcatccggaagacgccccggctgaccgcgcgaatggctcgcgctgccgcggacacccgcctgccagggacggggcctctctcctgggccgtttcatctcaccgagagcgagatccgctttcctagaggctgggaggaccaggcccgggcacaggactggcttcgcaccactggccccgcagtcgggtccccggggacgcgccacgggtcactgctgcctgctaaagcgacacaaggcgccttcattcctcaggccgaggcggccgaacgccttggctctggccgacagtgagcacccactgcgagtccgcacacactgcagcgcccccgggcacgccccgcagtccgcccagcgtcccccggggcggggcacagccagaggacggcccgagagccctgctgtccccgtcagcgccgcaggagggcgcgacttccccgctgggccgaggcctttgccgggccctctactgtacgccggtcctagggctgggaccgccgtcctggaccgacctcagcccactgttctgcggaggccgcgtgttgggcgacagcagccacccagcccggaagcagccgttccgagcgcaggggcgccaagagccccgcgccccgcctgtgcgccggccctgagacttggaacgatggtgcaggcaggaggggtcaccggtagggatgccactggagggactgggccgtccacacggaccagctgacacactaagtgctgggtacacagcaggacaatggcaagggctgctcagactgcgtttttaa

SEQ ID NO: 38068 - DNA, 516 bp, Homo sapiens
aatttaaaatccaaaatcaagactggcctttgtgttgctgggccatgttgtttttgttcatttattcacctgcatacaccgtggggcacatggtcccatcctttaacgctttcctatgaattagctgtgtgagacccacagtagctttgtaagagagtttgagcccagtctaagcagacaagtgactggctctcccactggctgtttgcacagagcctggatctcctggcttcagtcccggagtccttcccccaccttcaccttcactccctctcccacgaatgcctgctcaaccttccgttcatgcagttgtgaaaccctcaggaaacacctcctcaatcccacaccctgtgctgggagctggaatgtaaaatgatgagtaaaagtactgggagactcatgttgaaactcgcttttcttttctcccaggctgcaaatttgctagatgaacaatcattttgtgaactgctgagaccccagctgggactactgaaaagccaagaaaagtagtgactc

SEQ ID NO: 38069 - DNA, 1221 bp, Homo sapiens
cgtcttaaaaaaaaaaaaaaaaaaagactgatcaccttacaaaagtaaaagcttcagaacagcaaaaaataccatagttaagcaaaaggacaaattcagataaagtatctaaattatttagacaaagggctagtacacttaatacgtaagtaacttttaaaaccacaaaaacaaacatcccgccccacccccaccactcaaatcaatagacacagatacacagaattgcaaactacaactacgctgactaacttccgactagcagaaatccagaagctggaaaacacattctgttagccaggctgtggggaaatcgtctcacactgctgataagaactcagcagtatcctaacaatcacatgtgcatttgctctctgacccagcaaccccagctctaggaacccaccctgaggagaattcccagagtcacacaaacatagggctgttcacagaatcattactaaaatagcacacacttcaaacaactccaatgcccatcacaaggaaactggctcaatcaactatggaagcccacaagatggagtgtatgtaacgctattacatttaaaaaaaaaaaaaaaaaaaagaacaaggcaaacttctgtgaactgttatggagtgattccttacaaagcgaagtgagcaacgccgcctgcatctcttttccagaaagaacctactgttcagccaggagaagtatgtgggtcaacagtctcaggagcaggaccaggccgctggtgcctcatgtcggcctccaactgctaacccttgccccagagcacccgtgggctggccatgagttcggcaaatgtgcctcacagtctgaggctctccctaattctacttcctccctgctggattttcctatgtgatagcccccccaaaatgtttatgttcctaactccatcccagtgtccactaccatttgtggaacaaaggagaaattaggatctacagccttgttgacctgggcggtgcttgtcaattctcagcatgggcaagaggccaagtctaggttctccctggacagaaggccgtggctggaggacagagaaacatgggttttggtgatcttgaagggctgtagtgataaaattggacctcagatgagcttcaaaaccagttaaagtctgctttaagacatatgtcaaattctaaagctaccccagcagacagcaaaaaccaaaaatctctgaaacgcagagttttccttactcccct

SEQ ID NO: 38070 - DNA, 2993 bp, Homo sapiens
cctgtttttgccaaaaccaaaaagttttatttaatctagaatctttcatccatagtatttgagaaaagtgatctcaaattacacaaggatgacctgaaagtttaaggagtggaaactatataaacctttttatttataaagcttccttgcatgcgaaaacactgcaaaatattcttgtttgactttaatgattaaacattaactcaaacagcccatgagatgcacacttcatgttcacatacactataaaacagaaatacccttatttgtggacgtcgtaaaggcgcactgcactcttttttcaaagttaacccaggctaggccacgaaacgtcctttctgaaggaaatcttaaaaatctgtaatttaaatcgtgccttttcaagctggaaggagaacgctcagattccgccaagcaaaaaaataaaaataaaaattatctttacttcgtgggtagacaaagtgagcagttacacattggaaatgactattgtcacaaagctctgcccccgggtttcacgctcgcattcctgacggctgtgaccccgacctttaggagaacgccccgcgccgcgaagccacctcggccacctaggcggcaggcccgcgccgcccggaccgcacctgcacgcgtacgtgtccggccgagctccgcccccggcccccgcccggccttgcccgcggcacaaagcgcagcccaggccggtccagacgcccagcgaccccgagccgcgggccgaccttggcgccgccccgagccggccgcacaaagcgccgcacttccggcctggacgcgcagtcgcccgctgcccgcccccactcaccgcgccgcggcggcgacctgggcctcagtgaccagcgcacgccggcccgcggcgggcttggccgtggggcgaaacaaggggggcgtgccgaggagacctgctacgataagaggctgaccctccgagccccgcgtctccgccgcctcccggacgccgcgctcccgctcgctcggctccgcttggcccggcccgcctctccgcagcccgcgctccccgccgacgctgcgcagccaccggagccgccgacctcacttccgcctgagcgcgccgcgacgggggcgcgccgggcacgtgactgcgcagcgtgctcgctcccgccggcgccctcgagacgcccggatggacgagcgcgagcgcgagcgcggagtgggccggtcccagttggcgaaagggccgggtgtagctgtagtttttttattaactgtctgtgaaaaaagtatttaatttatattttgagatagtcccgcgccgcagaaacctttgtgtgtgcccagacgccagggcgcggatcctcaggccgcacccgggagtcgagcacaccccgggtgaccgccactacggggtcggagcggggcggagctcagctcacagattctttgccagtgcggaggctgcgggcgcccgctcaggagtgcagattttagagaatgcaagtcagcgtttcaagtgtagaagtgcgggatcatttctatagacaagagttcagggaagtgtactagaatgttagggggttttttggtttttttttgagacggagtttcgctcttgtcacccaggctggagtacaatggcgcgatcttggctcactgcaacctccgcttcccgggttcaagcgattctcctgcctcagcctcctgagtaattgagattccaggcgcccgccaccacacctggctaatttttgtgttagtagagacgggggtttcaccatgttggtcaggctagtctcgaacccgtgacctcaggtgatccacccacgttggcctcccaaagtgctgggattacaagtgtgagccaccgcacccggccaaatgttagtatttttatgtaaggcttagtgtatagttacaatgatttggttagttcagggtgtctctctgggggaggtatgtttattatttcgtattaaagaggtgcgtgtcttggtgtttgtgtttggggtgtcgtctggtctgagctaggtacaggacgacaaaggagggagttattgcaataaagattagtgatggaagggaggaggcctggctctggtcttttttcagtcgtttatgaaataaaaacagatgggcgcggtgtctcacgcctttaatcccggcacttataggaggccgaggcgggcagatcacgaggtcaggagttcaagaccagcctggccaacatagtgaaaccgcgtctctactaaaaatacaaaaattagctgcgcgtggtggcgcacatctgtaaccttagctgctctggaggctgaggcaggagaatctcttgaacccgggaggcggaggttgcagtgagccgagatcgggccactgcactccagcctgggcgacagaggaagactccgtctcaaaaaaaaaaataaaaataaaatataaatgtgataaaaggacaagaagaaaacatggggaaattcctttttagtattggagtaaagaaggcttttctacattattacttgaaatccagaagtcatgactatgaaaagctttggtcggcaaaaagcaccataagcaaagtcaaaagataaatgattaacaaggaagaaatagtcccaacacatgtaatagacaaagctaatctctttaatattccaaaagcttccagaagtcaacaataaaaagccctaccacccaatagaaaaaggagagttcacagcaaaggactaagtctggctgttagtcatatgaaaaatatccaatctcacttctataaagaaaaatgcaagttaaaactctttgaggtagcagttttcactgtgattggcaaacatccaaaaaattgacaatgctattggtaaggctgccaggaagctcgcactctcagacattgctggatgggaaaggggatcgtctgatgatgtgtgtcaaaataaacgcacaaacaatgtttcattcaacagctgcacttctgggagtttgcctacagagatacttatagatgtgtgaaataaaatgag

SEQ ID NO: 38071 - DNA, 3088 bp, Homo sapiens
tatttttagtctctgagtatctgggattacaagcgcaccaccaggcctgactaatttttttttgtatttttagtatggacggtgtttcaccacgttggtcaggctggtctcaaactcctgacctcgtgatctgcctgcctcggcctcccaaagtgctgggattacaggcgtgagccactgtgcccggccaaaaatgtacaaatgttaagtatagtgttcagcttgataaagttttacttacacacacgtacccaccactcagatcaatgtatagaacattttcagcaccctaggagtggggttgccaggaggctctctcaagcctctttccaggcagtacccctacaccaccccccaacccctgctaggctggaacgcagtggcttgattgcaggtcaaacttctgggctcaagcaatcctcctgcctctggctcgcaaagctctgggattactggcatgaaccatctcacctggctaacatttattttccctctattgtcttcagaaaacccccaacttttcatctggaataattttagactacaaaaaagttataaagctagtatacccttcacacaatttctcctaatgttaacatcttacataaccattatacatttcttataactaaaaactactattacctaaacttaaattttattttaagtttatagcctagctacatcaccatgttgcatatgacagtgtctcagtttttttcttgcttttgattaccttgatagtttgaggagtactggtgaggtgttttgaggaatatcccacaaacgagatttgtctgatgtttatctttcagttagactgaggtcacggttttttttttaatcacatgtcaagggcaagtgcagtgactaatcactttgattttcacgtggagtggctctacagccctctttccacactgtactcttggaaaggtcgtccccaggcataggccacactcagggtgggtgtggacggattaccacacccctctggatgaggtattattagaattcctctgcaaggaagattatcccttctccctcatttatttaatcacgtatttatagcagcacgggctctgggctgttttatactttaggttataacttaatgcaatgtactttatattgctgctcaaattgtcccaggcgcggcccccggaagctctctgggtagatccctgcgcccttggacgcccggtccttcagttttttgagcacctcaagcttctggcctacaaaacgctcccggctcagctggagctttctgcgcccgggtcctagagtcgcccatttctctaaggcgccttggccctatttttagagagcggtatttagaaaccaagattagggtgctaacaatttttttttaaatttttatatttttaagacaggatctcactttgtaacacttccttttagtggaagcgccgacctcctgggagacccacgccccctgccgccttccgtcccgtttctcagaaaaccacccagacaccccgccccaccggccggggcccgccgcgcatgcgcgccgaggcgtgacgtcagaacggcggccaggacgccggacgtgcggcagttgcaggcgagcaggcgaggaatcgccgtggcgtcttggtgttctccacgctggttcgcaggtgagtgtccctgtttagtccggacgaccctagctcctttcccctctggcccgcgcctctccagattctcctctagagctgcccagcctcgcgcccctctgaggggaccccgcaccgcgccacctccgcggtgtccccactccctaattttccctgaggctcctggccacgggtccgcccacctccctggaccaccctgaccttccccaggtccgccctctcagtctcccctagagcagcccattcgagagccctcccagtgggcccccccggcctctcagaccccttcccatcgcttccccggcgtccgcctccggtcctttccccgagcccctcctctccggccccgcggaccctcctcctttcccgactgcagcctccgccttgcatcctttctggccgctcgggagtgtcccacatgtctgactgccgggacctgctgcggcccgccgcctggggtctcccggcgtccgatctctacccctgctgctccctctgctccagggaacttgccttctcagttctcctgcccagaggtctcccctccttaagtcccggggggcgttgaggctttaccctcgcggtgcggtccgcccccgctgcatttcacctgctcttggccttgcaatgtctttagtcataagtgcttggtgtaccttatcttacatatctctcttcatgtttgattctgttactcaactagattgaaaactccggaggtcagggatttgcatagggatccccgccccgccaccccgcttaaatctcaaatgtagaccggttcagggtgggtggaggaaaggaatgaggtggagtggtcactgtaaaaaattaaaggaacatggttaattcaaaataatactgactcatggtctcagcctttaaatttttagtgcttaggaaagggtggaaccaccaccgagggaggagggctgacagctgaggggaggaatattccaaggtcttctgtggcctttggtatgaaccagtaccaattcaggaagtgacttgtccgaagtcacatgaggaattaggacccgagctggcactggtaactgcctgtttagtgtggccctcagtatttgttgactaaactaatgaccaaaacatgtatgcacagacacagctgtgcgtctgtgcccatgcagtgggtgtgtctgcctaaggacctgtgggggtgtgggaatactgctgtgacggttcaattgtggtgctcaggagtgttccctaggttcagaaagttcctaaccctgggctggttggctggatattgataggactggagcttgtctgggcttcctttgtgcctggtgtttactctctgtggtggtgatctctttactcgactcttccctattcgtactgatctccctgaggacaggaatcaaactgtgttgcagggtttccctaataaacagcatagtgtttggcactttgtaggt

SEQ ID NO: 38072 - DNA, 1685 bp, Homo sapiens
ggcgtacccggagagcagaggtcgggggtgtctggcgagcatgcggcccccacccgccccgctcacttgaacacgtcggggtcgataccgccgcccgccgcctgagccagctcgtacagctccatctcctcggtgctcagcaccttcttgcgccgcagcgccagcttctgccgggccgcctccagccccgggggcgccgccgaccccggcccaggccctacgccctgcgccgccatccgcgaggcccgccgaaaggtgcgccccgccccgccgcgccccctagcggatgcgcccaccgccctctccctgcagcgccagcgtctggcctcccgggctgccctggcgggagcggcgggagcgcggggacggggccgcctcctcggcgtcattggagcccaacagttagtgggcgctcacggtgtgctgagcggcgcgctaggcgtcgggagtggcatggcggactgcaggggccagctgcttggcggtcagggcgtccctgatagacttgcattggtcgtgctcgcttaggtggcagcacccagcccagtgccaggcatacattgggcgctcagtcaatacctgtttcaagaaagcgtgcaattttctggtccgcaccggtgcaccactaggggtcgctcttcggggggggtggggggcactaatcaacaaccctgcttacgcgcacgcgcattccttgctagggagaaagtgcgtgagccctaccttggggcgccagaggccgccacaacgcaggcgcattcagctaaggaccactccctccccccgcactcctgcctcgccatttcccctccctggccggccggccggccttcttcgctttgcgcacgtaccttttgaggtaacggcccaaagaggtagaagcgcttttcccgcccggccgcggggcgtggctctgcgcgcagcttgatgacgacgttttggcgcggtggcggaatggcggcttccacctctgaagcgggcgacgctatgggtcccacaggtgagtggcgcgggacgcgcgcgtgagacggtccgacgccctgggggcttccgcgagcccctgcggaggccatctccgttcctccgcgagccccaggactcgggcggcccggcggctctgcccaggccgggcaggctggggagtggagggccccggctgagtcttcctgccactcctctgggccatgcctttgtgccaccttcccgcgccgctcgtacactctgttctggtccggtaggtgttcgttgaaggttacccgtcgttgaaggaattgagggaaggagagctttgtgttgaaattgagccttgggctcaacaggcggtgtgggaggaagagccgggtgtgggtcccagctcgacccttcccctgtgcgctccacatctccgagccttggtttcggaggctcccgaagcccaattcgcaggagagttggaaacaagtgggcgcgtgctgttaagggaggtcttggcatgacagaatttgcttggaatgattagcgttgcccaagggctgtcgctgtcagaaaaacaaaacaaaacgaaacaaaaaaaacaaacgggtccgaagcagctcctggagaaaataggtgttggagagtcgcgacgaagtggactctaggtgcatggcacgcagagacctgtgacgggggagggtggccatggcagggtcagagaacaggggtgt

SEQ ID NO: 38073 - DNA, 441 bp, Homo sapiens
atccccacacgcatgtctctttctaccccctctctccctcccgagttctctggctctcggggcaggtggggccatgcaacgaacaaagggcacgactccgcccatgcatgcgccacaggggaacacggtcagccaaggaggaaggacatggcggcgtctccgtggcttcgctcttctctgttaatgatccctccgcaggttcacctaccgaaactttgttacgacttttacttcctctagatagtcaagttcgactgtcttctcagcgttccgccagggcagtgggctgacccagcgggctgatccgagggcctcactaaaccatccaatcaggagtagcgactgcagtgtgtacaaagggcagggacttcatgcaagcttatgaccagcacttactgggaattcctcattcatggggaaaaattgcaatccctgatcacc

SEQ ID NO: 38074 - DNA, 511 bp, Homo sapiens
tctgtcaattcctttaagtttcagctttgcaaccatactcccctcggaacccaaaaacccaaagactggtttcttggaagctgcccagcgggtcatgggaataacaccgccacatcgccagttggcatcgtttatggtcggaattacaacggtatctgatcgtcttcgaacctccgactttcgttcttgattaatgaaaacattcttggcaaatgctttcgctctggtctaaactgccagtccaagaatttcacctctagcggtgcaatatgaatgcccccggccgtccctcttaatcatggcctcagttccgaaaaccaacaaaatagaactgtggtcctattccattattccaagctgcagtatccaggcggcttgggcctgctttgaacactctaattttttcaaagtaagtgcttcgggccacaggacactcagctaagagcatccagggggcaccgagaggcaagaagcagggacgggctgtggctcgctagcccacccgctccca

SEQ ID NO: 38075 - DNA, 891 bp, Homo sapiens
aaataaattcaaactctagggggaagggagtagagcttgactggcagtataaaattagacggctaaccaaaagagaatagtgactatacaaatactgactatccaaacgagaaagagacgacttaaggggaagtgctgccctgcaagaaattccgggaattgtccagaagatccacagggtcagagacacacgcgccaaaaaggcgcctttcatgcacggtcctccggggaaaacagagaaatatatataggagctctctgcctttggaagcatttcggttccaggaagggagagttaaggaattcctttgggaccggcacatgtgaaatatgatccaggctctccgcttggcaccctgcacttgcgtcctaggcaggcagagagtggagagtttttctaggaattctgggaagtgtagtttgggagccccgtgtagtcgggtaacttccgctctaggaggctgaggccgtctccctgatcccgtcgagaattctgggaagcgtagtccaggaggtctccgtagggagagccacttccgcccaaggtacgctaggccgcggccttcttttctcccagaaaggtgaccctccccgccctgcgtcctgctccttccgtccatactgatgtttgttttgctggaggccagtagcaactggacagtagctctaggggaggagaatccacctgcggcgaagggtgggatttgttttctttgagccttctccagtgtggggcagctggcgcatctccacttagcgccgggggtccgggatcctacatcgcagggactggggatctcctgggttctgtactcccccagccctttcccctgaccatcagccagctctgccatttcctagcagtataataaaaggcgagtatcttaatct

SEQ ID NO: 38076 - DNA, 2633 bp, Homo sapiens
tctgtcactaaccattttttaaaaatcatatatatttaaggtgtgcagcatgatgttttgatatacaaagtgaaatgattaccacagtcaagcaaagtaaggtgtctgtcatcttccacagtgactttttgtgtgtgttgcacctaaaatggactctctctgcaaattttcaatctacattgcaacattattaactgttgtcctgtggctgtatgataaatctgtagacttattcattttgtcctttgacctacatgtccccatttcctctccctcccaggccttggtaaccacctttctactctttgtttctatgtatttaactttattttatattccacatctgagtaagaccttgctctcactcactcttttatggccttggggaagcataggtcctccagacagcagaattgcttcatctttaaaatgattgcatcgatgtggcgattgggataattcagagatgttttcagcacagagggcttgtgctaggcccctagaatgtacagataaaggggatccatgttcttcctttgaggcagaggttctgactttgactttgccactccctggcaaggggcatttagcaatgtctggagacatttggctgtccctatggatgtgtgtatgcaggtgctaaacatcctagaacgcataaggcagccttcctcccccttcattgctcattccctctgattgtggaattaaaagacgaaaatgggtccattcgagggaaaaggtcatgatccttaatgctgtttttacatgacggccttgtcagagccttcagctcctcctgctgtcttcgacgttctaggcacagctccctccggagggcatgcttcccacctggggcttgctggcggagtgccatcctcatccatatacatgtccccaattaaaagacgtcccgctgccgggaaagcggctgcaccttggagcgaaactgaaagaagagaccccggggtcttcgcgtccctccgtgggaaggcgaggcagggccctgcgcagaacaccggcaggctctggggaaaggcagggattctatagtgaatcctgcaagcctgcttggggccgacttcctggagcagcggctgcaagcagcgcagagcccagctgtccttggcaaacaccccacagaggaggcgagggcttgctggctcctctgggacgccccggtcaagccaccaccaaacgggccgtgacctcgccttcgaagggggcccccagggcagcggtggacgtgggggcagtgcgggcgagaggaagtttgtctttctcccagctcgggagggtcgccagcttccccggggctgcacctccttgggacgcttgtcgggttggagcgccgcagctgcctctgcggctgccgcctgggtgacggagggtggggcgggggtgggtcgctcgtagctcgagagccacgatctgatttcagggaccgtgcctatgtgctgagtcaaaccccgccgctgggctgggtctgcagccgggccgctgagcacaatccgctgtggttaatgattaatcgctgaccaccccgcctcccgcagctcgggagagggtgctctgggaatgtggaccggggctctcaagtgccggcagctggaaaggaagaggagtgctgcgaggcggagtgcgccctcggcgaagaggggcagaggcggagcgccaggtgctgcggtctcactcccagccagccaggagtttagaacgttcttcctccgccctctccccgcctcgccccagccacatacactcccaaacctcaacacccaggcgcctcctgggcctctcctaggttgggctgctccagcaagtttccatgaaagcacctgaaatactaagttaccttcgcgaggagaactcgagtgagataaaatcgtgcgcccacgcaggtgagtttgcagccaagaattttggacgctgctgggaggagaaagggaagttgagaaagtctttggacctggtagcctggtgctctttctcatggcttcacccagcctcccgggcagtgactgctcccaaatcattgatcacagtcatgtccccgagtttgaggtggccacctggatcaaaatcacccttattctggtgtacctgatcatcttcgtgatgggccttctggggaacagcgccaccattcgggtcacccaggtgctgcagaagaaaggatacttgcagaaggaggtgacagaccacatggtgagtttggcttgctcggacatcttggtgttcctcatcggcatgcccatggagttctacagcatcatctggaatcccctgaccacgtccagctacaccctgtcctgcaagctgcacactttcctcttcgaggcctgcagctacgctacgctgctgcacgtgctgacactcagctttgagcgctacatcgccatctgtcaccccttcaggtacaaggctgtgtcgggaccttgccaggtgaagctgctgattggcttcgtctgggtcacctccgccctggtggcactgcccttgctgtttgccatgggtactgagtaccccctggtgaacgtgcccagccaccggggtctcacttgcaaccgctccagcacccgccaccacgagcagcccgagacctccaatatgtccatctgtaccaacctctc

SEQ ID NO: 38077 - DNA, 1667 bp, Homo sapiens
aggtaatgaggatacagtgggggtgacattttgaaaatattaaaccatgtgtttatgtctccaccttaaattgcatccacttgcagccatctctctcaagagtgagccacacttatcaccccagggtaggaataagcagctactgcctgggacaaaggtgttgtggatccatcctgggtccagaggatggaattactgacctctttagctgggcaattatcttaaaagccagactttgtgaaggatgaaaaaggattgcctaacttcatatctctccctttaatgtatcatgagcccagcctagtggactggatcagccagttccagatgaaaccatagctaaggggtttggaatttatccttggaagccattgcagggttttaagaagttaaacagcacagttggatttctagtgctgcccctagagtgacagcatttgttgcattccaatttgggtcaaagtacaggcctggctgtgtttatagaataaaaaaacagacaacccttcattggaacacagttctggcagagcagctgacactggtgagttctcctttccattaggcagacctctggcccttggtttctccaagtcttgctgctgccactgtcctccatggccagacagtgactgcttccattcagcaactcccactttcccagcacggaggcccaaaccgcccccatgttgctcaggccctgattaggaggtggccctagggagctaaactaggtcacagtagctctcacctgtcatctctattgctcaatggtctattcgttcttcaacgacaatctccagctacgaccaactcatatatctcccatgacaaaacttcctaccacttacactagcattctgcatatgatatatctcagtgcctcccacttcttccatgaagccttcctggactacgacagcctatactgatgttcctatgcatggtgagccatcttagacatttctcagaagggggcacagatgatgtctctcgactatattggaactccctaagatcagggacccttcactgttgtacatcttcaaccttccttactgggttgggggcagagtagccatgcattgcttgagagattgatggattgaagttctctgacagtggctgctgctcctgaaatggaggaaaagcaccctcactgtgatcctcaggcagctctcttggctctaccttcctttccttctttccctgtgctaggcagaattctgaaatggcctccaaaatgcctggtccataaggtatacgtatcttctcccagttattcaatcaaacactaatctagtgctgcaaggaaggaaagtaattaagttcccaaatctgttgaccttaaaatagggagattttctgtgtggatttaaccaagtcacatgagcctttaaatctgggtctagaggtcagaggcaggagaactaagagtcaaagcatgagaggcatttgaccagggagaaattctctgttgctggctttggagatggagggagctggcagagaatataggtaggttctaggagctgagcaccagcaagaaaatgggccctgaataagcttagaggtaaaattcccccccagaacttctagaaaagaattcagcctggcctacatgttgagaacccaggcataccttgcctggatctctgatctacaga

SEQ ID NO: 38078 - DNA, 931 bp, Homo sapiens
ttccagccagttgtgtgcagctcagggtcccattcttacaaagatgctgcttgccttcttcctaatcattctaacttcccagggctggaacccagtatgggggtgggtgttcagtttccattgtgtgcatgagataatgatgcaggactttttgctccttaactcagctaggtttgcattcttgtctcacgaccaggaagaattaggcaagtggacattaaagagtgagtggagtagaatttattaagcaaaaggagagctctcagcaaagagaagtgtcctgaaagcaggtttctggttgcccctttcacagttgaataccagggattaaggcgtgaattcctggcagctccactccatccttccagtgtgctttcaggcccttagactgagacactccatattgatttacttcccttaccgtgtatgtgttaaggaatggaattttccactgtgggcatgtttaggcaagtcccctatgcaagttcccttatctgtgcaaaacatctgatgtaagcacttgtggggcaggtcagaggttctccagggtcgcttcccttactatcttcctaaagcaagctggctaactcctttcaataacatactaaggataggaaacctgggtgatcactggaacagtgccactttaacccttaggtcacctgcctacttggacttttcatgagagatatagaaacctatttgtttaagtgcgtgttatctgggttgggttaggtcctagcagccacattagtattatcataaacacaggaatgatgggggttagaaagtggggaagaggaatttgtaatggatctttgttactgaactgaactggggtctcctcacccagctcagtaaagccagacactgacactaagatttgcagcaggagaaaagagcatttattgcagggcaccaagggaggaga

SEQ ID NO: 38079 - DNA, 2138 bp, Homo sapiens
atacattcatcaccccttctcgatagctcccaccttttgcctttcccacctctttttcctcaaccataaacctgtttggcaccctcctgtcctacagccactgtgctgggaaactggccctgaacctgggtccccttccactgctctccagtctctccccatcctcacaccctgattgcatcgaagaacaaactcacacttgtagtttctctctccttcgtctcatctgttctatgtaatctatcactaccaccattctgccttccccgctctactgaaatggctcatctggagttaacactggccttccgatttcccagtccaggaatttcaggcccagtccagcttgtcctccagaacactttacagtgttgatcaccagtgcccagtctccctatagctctccagattctctttggccccttctcagcctcttttcctggttcctcttcctccatccagtcctcaccaggtaacatttcccagcttctcctctctccaaacatcctgcgtgggcagattgcccaagcctgggaagtgagccactctttctatgctgttgactcaggaactcagcctccttttgcccatctttctgtctattggtcatatttatgtaggtacctcacattttgtttttttttgttttgttttgttttttgctttttttttttgagatggaatctcactctgttgcccaggctggagtgtgtagtggcgccatctctactcattgcaacctctgcctccaaggctcaagtgattcttctgcctctgcttcccgagtagctgggactacaggaacgtgccaccatgcctggctaaattttgtattttttttttcagtagagaaggggtttcaccatattggccaggctgttctccaactcctgacctcatgatccacccgcctcagactcacaaagtactggaattacaggcatgagccactgcacctggcccagtgcctcacattttcaaaacagattccttcttttctctcctaaacctgcttttcctcctgggtcccactccaggtgaatcatacccctaccatttctcttctacagaaatcaaactagggagttcacttgactcctctcccagcctcacctgccatcagccatggtcctggctcctgccccccattaactgctgccttagtgtaggagatgacttcatttcattactcagattactgcctttgtcgtcacctgacctctctgcaaggagctgtggctttcaactttggccacacattagaatcagttggataatgtgatagggttctccagagaaataaaatcattgaatatgagtgtacacacacacacacacacacacacacacacacacacacagataaggaattggcttacatgatgatggaggctaaatgccaaaatctgcagttggcaagctggatacccaggagagcaaagggtatagttccggtccaagtccaaaggcctgagaaccacgaaagctgacggtataagttccagacaaacctggtaggttcaagacccaggaagactcaatgtttcagtccaagtctaaaggccagaaaaggtcaatgtccccctcaagcattcaggcaggaggagctccctcttactccaacttttcattccatttaggctttcagctgattggaccaggcccacccacattagggacaactgtcagctttactaggcctacctattcaaatgttaatctcaacaagaaataccctcgcagacacactcagaatatttggccaaatatctaggcaccccagtccagtcaagttaacccagaatattaactatcacagagaacttttagcaacctgatgtccaggtcacaccccaatctcattgcattcaaatttctgagggtgaggcccaggcatccatttttttttttaaggctctccatatgattccatcgtgcatccaaggttaagagccactgctttcatctcttctccctcagactgattcttcacactgccaccaaagtggttttcttaaaactcaaattggattatatttgatcccctgttcaaaagctttcaatgactttccatcatatttgggaaaattctttggcatgttatacaagcctttttgcatgttacacaaggcccttca

SEQ ID NO: 38080 - DNA, 1108 bp, Homo sapiens
aaatcgggaaagacctgttgtgtgtctccggtgcttgagtagtttccctttgaccgcagctgcttccctggcttcagccacccatccctagagtccctctcccagctggacctggaagatttccaagttcctgcctcatatctggaattggctgtgctgaaaacgggtccctgaactcaggtgaattcccttagctcattaccagtgtctctcagagagcaagttaacacggaaatgcaagtgtcaccagcgttgctgcagatgaccatgacttggcgcttacctctccctgagcctggtgtctagagctgccagtgcccaaggtctcagcagaccacacagagggtgtcagccacatgtcttgacttgtgataagtactgctttattctgttttccaattgattggttcagaacctgttctaccatcagcactgccagctctctgtgggagagtcagtgcctgagatgtcgcttatcacctacaggcctgggcaaatggcccatgtagtctaacacttgtcaagttgccattttgaggtacaagtagggacagctggggtgccacagaaggtttgagtatggtggaaccagagagattccagctcagaccctgtctccagcccagccagctggtgtctttggacaagcctgtttcccagctgttaagtgggttcagtgatgtccatcttccaaggttattgcagggcgtgaatttataaaaccccaagctgggccttgggcaatgcaatacattgcagccttctggttccttcgtcctaagtaagaaggcatcttctctatttccagcagcttccatagggtgctggggtgtggggcattagagaggtcctgtcacaaatctcaggctggcgatgagagggatatgcatagagatggccacctgtccacctaactctgctcatgctctcctgccccagagggtactcctgctgaggtgaggggtcccctgggctggggagagacctttgagaaggacgatggaaaaataaaagtctgccagaattggcagggtgcagtggcttatgcctgtagtaccagcattttgggaggctgaggtgggtggatcacttgaagtcaggagttcga

SEQ ID NO: 38081 - DNA, 1237 bp, Homo sapiens
gggaggggcggagtcagcctatgatgagtgagaacagtctttgactcaatttaaatgaagtttttcttcttcttcttcttttttttttttttctgagactgattctcaatctgtccctcaggctggagtgcagtggcacaatcttggctcactgcaacctctgcctcctggtttcaagcaatcctcccacctcagcctctggggtagccaggattacaggcatgcaccaccatgcccagctaatttttgtattttactagagacggggcttgccatattggctgggctgttcttgacctcctaacctcaagcgatctgccctcggcctcccaaagtgctgggattataggtgtgagtcactggacccggtcaaatgaattttcatgggcaagtttccttccccaggactgtttccaggcctggcagtgggggtggggtggaagttcttgctttccataaagtaaatccaatcaaaagcagacattctgcaggagtctagcttgccagactcctattcaaagctagtttgcttctttttagcttctctcttagcaacagaaaagtttattgtgtttcccttacaagtaaaaaggcccttccttgtcacagagaggcatcagagaggatctttatttcttgccagctgacattgtgttcttcaccatgacacccacaggaagaaattcattcctgaacttgtggccatttcaattgaattaccttaatttgcatttgcgactcagaaagcattggacttttgatctcctgaggtatgctttccagacaaagcagctggctggggctgtgtgtttcggtgcatgaactctggaccaggctgcctggtcaaacttctggccctgacactttcctgctgtgtgagtttggacaggtcacctaacctatccatgcctccacttttctatttgtataagcattgaaattcagcagtggccacctcatggagcttattgtaaggtttaaataagcaagtgcaagttaagtactcagaagagtgtctgtcatacatgtactatattaattttagctgagtattacctctcttctggggcagatgattggattgtctaataaggagtatgagctgccattgatcactgctgctatgctgagtgcctgacatatgataatgaggtggatactattattttatcagtttcacagagatataggtccatggtcacacagttaataagtagtggggctgagattcaaaccc

SEQ ID NO: 38082 - DNA, 2152 bp, Homo sapiens
gcgcagggctggccccgaggtgggcgccttgggggcaaaagggctggcgggtagatggattgtgcgcacctggcctcggctgctggcctctgggtattctcacctggaagcaagaacaatccgcaaaaagttgccgcgatgcctaggacccacattctcccggagtcccggggccgggagagggcaagcgcatcagaggaggcgacagcagcggaggctgccccggctgcagcggctgtggctgccgaggctgctggggcccgcgctgctgccgcggagacgacggtcgtagcttagaggagccgcaggtgccgctcgcggagcctgcatcgcccgcgctcgggctcccggctgcgggtctctgctcctcccgctcgcgctcccgggccgagcaccgcgcctccggagttggcggctgagactgaaggaactactggcgatcgggagcacccacaaaagtctcgccttttctccccacctcccactccaggcatcacgtgacggctgccgagttggggtgggggtggcgggcggggaaggctgggacggtcgcttcacatccccacccccttcctgtcttcctcttctcccgcctccgcacgttcctgggaaaggggcgccggggggcgggagagaactggtagttttctgagatggggaggttgggggagcggcgaggagggcgcagcaggtgccgtggggacctgccgggtgcggactagggtctgaggactgcgtgcccggctggcccttcgcacataggaaggcagcctccccactccacgtcctctgcgccttccaggactggtcggtaccccagcgactgggtccagcccacacaactgaggctgtcccgctgcgggccgcgggagcctggcgccccgggaggctgacaggaagggcgcgcgttcccgtgcgcctggcaaagttccacgcccgcaggctccgtagggtgtcctgtgcagctgtgccccctcttcctccgcgaaggccttctgtcaagaaccagctcggcgtggccaatctgggtgggggtgtggtggggacactgccttaactgtctcacttgcccgggccgccctcccttctcccgcctgcgcgcaccgctggagggtgcattgacaccgccctggtcgcctagcctaggagaacgccgtcccggggacacctgccgtgaggtcctaccagaaagcaaatcagggtgaggaagagggttgttctcctccattccttgtctcccaaacgccagccggctccattctgctttccccaaagccaccgattattagcacatactcccacgtcctctcctgaaaggccatcccagcctcggactcggcctctggctgctccccacacccctcaaattcgtcttctttccgcaaagtccaagtgacccaccttgcggactcccggggatgccccggtgctatcttcgccttccttcccgagccttgcagcaggtggtgcgggagaccgcttgcccgccggagtgcgttggtgcccccgcccccaatccgcacattcccatcccctttccgcacatccttagggagcatccatttccgtggaaatcgcctcctaagctttagctcctcttcacccttttctcccccggccacttctgggggcagctctctcacgccgggacgctgatcatttatttctgcatcctcccagcagagctggtctgtaaaggggcttaaatgactttctttgtaattcctctgcagagatcgttccatatctgcctcaggctccttctctccctccctccctccctctcccccttctttcatttctatttggttaacccctcggggagactgaaatgctttgaccattactcacctgtctgcagactctgatcttacaattggctaaattactatctctggagcaaaagggccaatttatttattccttctgggaacccattgtaagagcacgtgtgagtcatgattcaagtaactgactgggccaaaaggtccttgagcaagttattttctgttttcagagggtgcaaatgtgatataacttttattcagaaaggaaacaaaaagattttttaaagtctgaaagacaaggacattttacataattttcatttaagataaaataaaacaaattgcacaaattaaccaaataacac

SEQ ID NO: 38083 - DNA, 1052 bp, Homo sapiens
atcaccccatataactggcaggtccactagttaattctctacctcatgaaacactgagagtagtagtaatatggttgccacatgatacaatgcatgttgtatcataaaaatatatttcaactaaagggtagatgtgcttctaaatgaaagaggatatgggtagccagagagagcagtattgctccaaacaaaaatcggacacttgtcctttaggaaatttaaaatatgctgtccttcctttctgtttgctcttggttagggaggttttcactggaatctatttgaggcaagtgctgagtatatttgctgtcattgtgttctttgatctcagtatattgattggatgcagctgcagaaacaggtaatgtgggcaaatatgaagaaaacaaactgctgcctgcagataattttttctggagtgttaggggaaatccaagataattacacattttcttccatttatttttaagaatatgaatagcaatacacacttcagtcttcagaatggaggctgcaccttttaaactcactttgaattatgatttaaaatccattgtgctgcattcattcacttgcttgttcaaaaatatcactgagattttgtgttggacacataaataaggggctacctactctaagactagcatccaggtgtcctattcacacctcagaatgatgcttctctattctctatttccacaacaatcccagagttacataacccattacctcatttatatgttatctccactacttgccagtctagacacctctagtattttgtggtttcaatctatcttatattcaattaacaaaacaatctttccaaatataatttagattagccactggttcaataacacaatatcatgcctcattgattacccatcattcaattaatcactcaacaactaaagttacagagaacctactgctcttctgggcactggtgctagggtcaaaagggagagggaataaagaagaaatacaatgcatggcttgtgctcttaagggctacagtagatagaacaacagcctaccaaagttgtcca

SEQ ID NO: 38084 - DNA, 1750 bp, Homo sapiens
ttaattccaaagtatattttaaaagactgtttctacaaaataccaacatattttagtcaaaaattaagcatattgataattttctacaaacaaattggatcagcggctgtgttacagttgctaagggcaagctgacagtgactttactgcttttaaatttaatacacagttatgcacaaatatacattgatatgcataagtgcatatgcgtatacatgcatatacatatacacccgcatatatgatgttctcattagtatgcactcgggtaagaaagtgaaaatttttctaaggctcctttttttaaaataaaaactaatgaaagctagagaaaggtggcactagctctctttgaaaagggtttaaaagtggttatcctatacctgaattaatcactcacttaggctggtgtatttcagtttacacatcatgaagcaatagaacacagattagcaactatgatgtaatcctatgatttttacccaatggctgaaaaaaaaaatcttccaccacacaaagctgttgaaatgcatcttattccacacatacggtaggaacaatacttagcatcaggaaccaacaagtcagtttcctggcttcctgacttcttagtttaattacgtgtaggacaagcacatcctcctctgtgatctcacatctggcaagcacagctctcatgccaaggacactgatgttacgatttttatttctactattccaaggtgaacttctctcctgaatttccatgttcctactatctatccccgtgtttcctatttctggtaattatacacctcttcctataatcttttattttctgcagctttggtcttgctcacttttacacctaatactaaaatttaaattttatataactaaatattggtgctaatcatgtgaagtgaattattttaagaagaatgcattcatattcctgcattcacagacccagaaaataaagaggtaattattatgctagataaaagagctcgtggaagtatagacagatactagataacagattgttcataggtatatatgaaaaaaatattctagctccattgagttaaaatttaacagtagttgagcaaagttagctgtctactcaccaagactcctcagaacttctaatgtaattacatgtcggatgaatcactaatacaggcatataagatgctgagtttctccagtttatttgaaccactgcttctcataccatatactgcaggtgctatgagccaaaggttcatctcagaagcagtaaccaacagtaaaaagccgcctcacttacttgtgcacgaactctgcagtgtagctagagctgtgtgccaggacaacatgaatgatcagatgggcacaaaatcaagacactcaggttatgagctcaaaaattaggttcttctaaaaagtgtggctatcgaaatgacaaaagttaaaagtttcagaatatatgattattaggtgacacagatttccaagaattgagtgaaagcacttttccaggatgtccagagaatagacgaaatcagaatcatttgcagcacaggctccttgacaacagaaagctcttcaaaataagtgtaaaatccagcatacatgtgtcatgctttcctcttaattcattctgtcttccactcaagccactatcaatcactaggcaaaaggtatttggatgaaagttctccataaatactgaagaggatattttccttgtctgggccattgaagaatggcaaagataaggatggaa

SEQ ID NO: 38085 - DNA, 701 bp, Homo sapiens
ttcattgtcatcaaaaagtaaaaaataattaggattcaggagctctatgccaacaactatcaaatattgctgagagatattaagaaagacctaaatgaacagagatttacatcatatttgtggattaaaagattcaatattttaagatgtcacttctgcccacattgatacagagattcaatgctattattaaaaagtcactggaggtagtgtgaggaaattgacaagctgtttccaatactgacatggaaattacagggacctagaacagcaaaaatatcttggaaacgaacaaagttctttttttaaaatcttattacacaatcaaaataatcaaacagtgtggtatttgcaaagcacaaacaaacagaaataaaagaagttagagtccagatattgagttgtgcatgtagagacaaagggttttcagcaaaggaaccaagaaattcaataaaggaaataaattcatttcaaaaaatgatacaaatgtggatatctacatttaaaaaaatacaacttaacccctaaacacacatcatagataaaaattaagtcccaacagatcatggacctaaaacataaaatctaaaactataaaacttgtagaagaaaacacaaaacaatattttttgtaaacatagggtaggcaaacgttcctagaatacagaaagcataaactagaaaaataaatagagttttaa

SEQ ID NO: 38086 - DNA, 2295 bp, Homo sapiens
gtgtatatttatacaatgaactactaatcagcaactaaaggaaggaactacttactaatttatataatgacatgaatgaatttcaacaacattatgctgtgtggaagaattaagacacacaaaaaagcatatagttcagatttcattcatatgaaaccgaagacccaacagaactaatttgatccattcaatgcaattcctatcaaaatcccagttggctttttttttctttcttttttttttttttttttgcagaaatgaacaagctgatgctaaaattgatatggaaatgcagatgcaaagagcttagaatagaaaaaaatctttaaagaaaagagagaacacacacttctcaattccctcaattctaaagtttactatagtagtatttgtgttatttgattactacagtaacctagagagtttgttactggcacacagatagactaatagatcaatgtaatagaattcaaagttcagaaacaaaccttcacgttcatgttaactgatttttaaaaagagcaccaaagcaattcaataaagacaaaaatattcttttcaacaaatgatgctaggatgattagatagccacatgcaaaagaatgaggttggacccattccttaagccacacaaaaaaaataattcaaaaaagaccacagacttcaatgtaaggaagggctaaaactataaaacttttacaggaaaatcttcatgactctgggttagttaaagccttcttagagattataccagaagtaaaagcaacaaaagaaaaaccaaattgaaattcttcaaaattcaaaacattcatgttttaaaggacaatatcaagaaagctaaaagaatgcctacagaataggagaacatatttgccaatcatttctcgtaacagactgatacgtttacaaaaacaactgcacaagaatttcatagcagccttatttgtaatacgccacactgcaaacagcccaaatatctgtcaaaaggaacgtggataaacaaattgtagtgtattcataaagaaacataccactcagctattttttaaaaaccaagctatagttgtccccgcttatccacagggaatatgttccaggaccctgaaaccacatgtagtaccaaaccctacatatactatttttttcttataatacacatgtacttatgataaaatttagtttctaaattgtgcacagttaagagattaacaacaataataaaatagaatcattacaacaatatcctagagtaaaagtaaaataggtgttccttggaaacaagcactgagataccatgatagttgatgtgataaccaggctggctactaagtgactaacaggcagtggtgactacagcgtgaatctgctggacataagaatgactcacatcgtcagacagcacaagatgccatttgatttcatcacgttactcagcagggcacacaatttataacttatgatttacttacaggatgttctactcaaaattttcagactacagctagacacagataatagaaatggcagctactgaaaccttagataaaagaggactgactactgtaccaagacacacaaaatatagatgaatctcaaaaacattaggttgaagtaaagaagccagacacaaaagagtacacactgtaaacatttacataaagttcaaaaacaggcaagactgatacatatattacataaagtatatcaatgattgtttatgcagtggtgggtatgtggctgacaagagttaaaagagaatttattgtggtgataaagatattctatacctggatcagggtgttgtttcacaagaccatataaactcatcaaattagacaatgaagacatgcatttcaccacatgtaagttttacgacaatttcttaaagtaaaatggaaagaaagtatcatgcttcatggtgtcctatgcttctccgcctcatttcaaaaacaacacagagacatagaaggccattccagccacaagaggaactaggagattctgcgcttaagaaagttgaaggagaactacaaaccactgctcaacgaaataaaagagaacacaaacaaatgcaagaacattccatgctcatggataggaagaatcattatcatcaaaatggccatactgcccaaggtaatttatagattcaatgccatccccatcaggctaccaatgactttcttcacagagttggaaaaaactactttaaagttcatatggaaccaaaaaagagcccacattgccgagtcaatcctaagccaaaagaacaaagctggaggcatcatgctacct

SEQ ID NO: 38087 - DNA, 1508 bp, Homo sapiens
aggactcagcagcagagagggccttgcaccagcgctccgctctgttccagaaaatatcctatttctgaccatcaatcagcattaagccagtttgggggctgagctttaggcacaggcagttgccagtagcaacagggcacacgctcctggtgagctgggcgggaggtggcaacaagggaggggccgcctgggcaagtggcctgcagctgggcagacaaggtcagggatctcccctacacgcgcaagggaggcagtgcggagggtgggggaggggggatcgtggcattaggtggggacaggcgcgccctgctggggccgggccagggagtggcccaggcctctgacctcgctggggagcagggagggagttttcccagtggcacagctatgcccctgccaaacccaatggcctcccggcccgggaaaggcgccactccagtggcccctagacactggagtcaaggccaagcgacaggagaggcgctggccctctgcttgggaggaccacagaactcaagatctgcccctcccctgcagcccctttacgcccccaccctttaggagtctctggaagatgccaacgtggaagtgtttctgcacgtgtgtgtgttttcatttgtgcttcccacacaaaagcgaggccccacaggtggagaggagggcgtgtgtgcgcgcctgtagagcggggctcgggctgcgtgggagctgggcggggatgcgcacacacggaccgactcccacagactgtcccccttcaggtgtcctggtgcaggctttcagggaagggagagcccctaacctcgccccacctcccaaaacttctccccctgccgtcgggctatggtaaaggggaaaggacaggactcaggaccttgagggaggcattgagtcagagggcagagaggggtcaaggagacccaggcgggaggcgcggaagcatacagtctgcggggacaaggactgaacggggtagtgggagccaggtgccgaagggctggggctagggtggcggcgcgcagggggcgcgcctgggcggggagtgggctggcgtctccttacctggccttcggtggagcatgctgctgcgggctgggggcggggtgggcgctgcgtccccaggggttgactccgcagcgccttcacttcgggggcagcaaggcgcgcgctgcagagccgggagttgccaaacttgccatgtccagagcgcggaggcagcctgggccacgcgctcaccgcagcccgggcacctcgcgctcctccgctttgttgtgttccgccgccagtccccctgcgcctgcctgccagtgtccccgagccctctcctgccgcgggacgtttcactggcgctcagggaggcccctcgggtgggcagtgccactttcctcctggaggcgcgcgttaaagatctgcctgggagcgcccggcgggcggctcggcttgcgctctgatgaggaggctggggcccatcgattcccaccccctacccactccccctcccctcccctccg

SEQ ID NO: 38088 - DNA, 533 bp, Homo sapiens
cactgggtgatatggtcatcggactgggccatggccctcacgaaatacaaggatgagaacttgtgaataaatgtgtgcaaccaagcttcatccatggatggcgatgcaacaggagggccacttgccagtagagtgggaatcaccctggtatgcattactgagtaacacatccagttaatgacactcagcaacagcttgctcagcagaagacttgagtcattttaacaaatagaaggctgggtgaatttctgtgagctctgacaagtacaaactgttttcttagactcgttgaggactgagtgttgtagttgcctcatcactgtggtgggccctgccctgaaaatgaacatgcttactgcaccaaaggttgacagccacctgtgaaatataaaacaaccttactccctgatttgtgaaattatttatgttaaaagttctacaaagctatgtacatagagataaggctggaaggaaatactcctaaacgtagtaatgttacggataatgtatttttttctctttattctttttgg

SEQ ID NO: 38089 - DNA, 1055 bp, Homo sapiens
cattttctcatttacccaatatcctccttgaactcacctctgcttgctccctcattccacattacagctaaaaacattgtctaatgcagttttccctccctaccccacccctgcctatataaagcagcatccaggtagcagtgaacatgtttacgcctcctaattcttttgttacacatgtctctaatcattaacatcgaatagtgcttacaaattaattcatatgtacaaattcctcacctgagcattcaaaatgcatgaatcagcatccagccccaatcactttaagaggttacattaaagcacagatcattagggagcatggataaggtgaggagaagggagagagattcaaatagaattcatgttccttgccttaaatgaggatcagtctgagctatatacaagtgggcagccagcagagagcgtctgggatacaagccatctccaagccacaggcacagcctgcgtttactcacatcacaatccattatcttcccagccaggatccaaatcttacctctactgaagcaagagccaaccagtgacctcagctgggtcatcaggaccactgtagccacttccagcctcagctctctgatctgacagcctcagtcagcccttactttcctctttctgaacagggccagtgtgcttcctcctgtctgtcaatatttaactacgctgtcaagtcacattacatcacctgcactaaatcccacccagtgatagctagagggtgtgcctgctctattcaattcaactcagctaacctttatctagtgccttccactcattcatttctttccacatgtactcagcacctactgcatttggcattggggatagagaactgaaagatccactccccagattctagtggaggaaacagacaaaataatgtggtatgtgctattgtgctagagcacagagtgcaggggacactcccattccaggctggctggggaggtatggagcaaacaaagccagagaattcccaaagatggcaacacttagagtgacatctctaatggaccaggctatatcaggaagac

SEQ ID NO: 38090 - DNA, 609 bp, Homo sapiens
cctatgatctaaaagcctccagtttgagttgtcctgcctttctggactgaaccaacatacatcttacatgtattgattgatgtcttatatctccataaaatgtataaaaccaagctgtagcctgaccatttgggcccatgttctcaggatctcctgggactatgtcacagtccatttctcactcatttttggctcagaataaacctctgtaaatattttacagagtttgacctgttgcctcgagacttccaccctacacgcgattccaaaaggcaatcttgattgcataggaaaaccagttgcttagcacagaaacacactgacgcttagtgcagtaggcacagggactgtgtacagatctacacatgcagaataaactggaaaccagccattacctccctcaaaccattgttagactcatccaagatttgtgaagtccagcgacagagcagctccttcagttactgcaactactgtttcatgacagccagtttttgaaggactgtagtcactcaggcacacaaaaagctccgaactactgaataacaggatgatatagaaggattcagtccagagacatgtctgtggagggggaaggtggaagattaa

SEQ ID NO: 38091 - DNA, 576 bp, Homo sapiens
tactgggggtataactgtgaacgagtcaaagctcctgttcccatttaagttctcaaatgatcacagttcttactgttctggagtatgacttttaactttctcaaacaattgcttttggctcttgcctcatctgatccttatataagcccagaagaaaacagaggctcagaagaggttaaagattttgagggtagcacatggctaattagtagcagagctgggtctttttttatgacatggagagctatacatagtttctattagccagtttcattttcctttcaacagaagccctgcagcaacacacttatcaacatgggcagtgatctttggttggaccttctctgggcaaaggactttggacaccaaatatgctttctgtaacaaccactacacccaattttccaatttttcatggggatccggtaaccatataggaaaaaggaggaaccatcttcctgctcctattatactaagactcatcctacttaattcctcatttaaaacaagaacttttgttatttccaaacaatattcaattaccaaagagtttctctggattaattgcaggacgtc

SEQ ID NO: 38092 - DNA, 587 bp, Homo sapiens
tggcagagcttaaagcaattgaaggcataagacaaacaaaggagggttcctcaggccagtcatccagcctgattctatcaggagcatggtgcctggagcaaggagaaccagcgggaccttgtgcacagggagtcattgtacctgtgcttggaagactatgggcacttctggaagcttttggaataaaattacctgttataaatagacactggctgggtttcagggttgagagcaagaggccaagatttccagaaaaatagaatgctccatataagagggtctggtgtacagctcattaataggggactgctgagcaattgaactaagaagaaaggaatttgaggttggtcagacatgacctgtagtaaacacctgggtaaacatttctggcagataacatcatggatatgctattccacttttaaacatcatatatatatatatgtaaaccaaacattaataaaaatcttttctgaatgcttccttccatgtacagacaaagaaagctgccatctggaacggccacatcagctggtccacatgtttccagggtagagaagtctgcatgccaggcatggtactgcatg

SEQ ID NO: 38093 - DNA, 2773 bp, Homo sapiens
cacctcaggtatcccagcctgtacccagtgcaaaatgccttctgaactatttcaactgctgaggctgctccatttgcttttaggccattatctgtaaaataatcacagagttctctttggtttgctagtgaaaacaatgaggaacagacaccttaagaaatgtaacgagagccaaagacaaaacgggaatgttctctctttgccagaccaccttcatctgtacacctgcacatagccctgttcctacaagaaggcataggaaccgcgtgtgggtcccatttctttttcaatatttaagaacttgagaagtgggacacatgctggaatgaacacaggaagctcagtttctagttgtagctttgccaccatcttactgggtgctcttggacaatcacttctcttccttgtgccccaagttttcttctgtgaaaggataaactttgatgaatagtttgaaatctgttttagcagcaagtcccttattttaagcaaagaattgcaaagagcactgagctctaatacacaaaacatatctaagcctaatgtgttctgatggaaaaaaatggagctgacaaagaggcaggatgttacccaccttaggactccctggaaaacagtcaaatattttgaggccttttgacactggcttctcacaattctgagactagagacaaggaaaaggtagtgaaggctgtcaccatgtttctgggctggtgacagagcagctgaattcaggagcaagccaggctcctgagtgagtcatggggttcacatgcggagctaacaggctaacagccacttcttgccaatccgtgcagcgggctgggctgtcaggtctagagggcaggaatcagctgggatttgctactggttgcaagaggctgaactgcaggcactgaggagcagagctggtagcttgaaggacagaaagacaatttttcactgggctcttaagcagaactcccgggtggcaacagagaatagctcacgggccagccggtgcaggtgggataagaggttcctgtccaggctggcggcatacatgaagctcactcttcctatttaaatcccagagaatatctggagagttttaaagagccctgaggcaggcaaaagagaacatgtggattttgtataccgatctagctcagtgtcaaagtttgcctttttcagtagtacattaacttgggttccaactcagaagacaagtcagaacattgaacatttctccagatactcaatgtgaaaagaatccaaatagaaacagtttcaatttcaaaatattttttgatacatacacattcctgaggatgaatgagcctgtgtgtgtgtgtgtgtgtgtgtgtgtgtgtgtgtgtgtgtgtttggggagagagtgtaggtaggaggggacgagagaccataaacatcaacatccacacactagaaatccataaaccacagaaagaatcagagacaaaaagtgggttctccctgcagtgtaccagttcatgaaaaagtagccttcatagttgtctgctaaactttctagatcagcctaatagttttttggttggttgtatctctttaaaaaacaaaaacaaaacaaatgaaaaaccaaacctgacctccctgcagaggcaaatgaggattagccattcagtatctccttatcatctgcatcctggtatttgttctcagagacaaggggtcctctacccctaattccagtccactttagggccctatagttacttagaacaaacgcatacttgctgtgacagccgaaagagcctggagaaatatgtaaacatcatcatctcactttagaaggaaaacaagctgtataaataagaaaaactgttacaagagtttaaaaaaaaaatcccaacagtcttacttgtagttagctcttcagtcaacacatatcacagtcctggagacagacacaggaactacaactctctccagctaaaaatttcctcccgcggttggttatcctctgtttatttttgaagcattcaaaggccacgctaacagaacagactcggttttcctgaacatccacagcggctgggaagtcctgccgtgaatgcggagcaagtttgcggagacttgctccctgggctgcggctccgtagttgcttcgagcttgtaaatacaagctccgtggacaaagtcccaaatgacatcactggcagctgcttattgttgagtctttattaactgactgtcaaaaagaaaggagggggtggggaggaagagtatctcttctgcagcaaaatcggcatcttggagtggattccagttatacatgcgtaaataatcccattgattcacatttttgagaggatggcttctttcaggtctgaaaaagacagagaatcgcctccaccagcttacactggaatagctggagacctggaggaaaagtttgaagtgccagcacagccctaccaaattgtttacccacctgtttcgagtcaacttcagagcctgatgattcatgaatatatgaatactggttgtgtcttacattgcttaattacttttactgtgatatatacacctggccgacatttttcctagatagattgtcttgggtgcaactccttttagatacattctagtgtctcagcttggagtagaaggaagggatccttgaaatcacagcaacattttgtgtgcatttgcaaatatgcaatttttcttttcctgagaagagtgctggaggctttcttctgattcttaaaattttaaccacccacctgcaccacccccgacactccaaaaa

SEQ ID NO: 38094 - DNA, 1552 bp, Homo sapiens
aggcaaaataggtagatttgacgcaacttgggcttccagctacagacttgaatgggtgatgaggaagtgggaaggcaaggctccagggcctaaggtccagaaacttggctgccattcttttctttgttcttcccattcttttttcttcagctactcctcttccaagccacttgtttaataaagattgtcatatctgcctcctctcctagaggcaatcagcatcacttaatagtggtgaaaaatacatggggtgttcacagaaaataatatattactgtgtaacaaagggcaggtaagcttgaagggtacatgaatctactaatctttgaaatcattaatttgttatttattattgaatgtgcttattcattcactgagtcattcaccaaacattatatggaacagtatacaatttataccacaaatcctcactgcaaacatatagtacttcaggttctatgtatattttgcaatctgaatgcctatagaacattctgtgggtgtctactgattgggagacacaattgaaaaatacattgaaatatttccacctctgttttgataaaaaaataaagtcaaagcataggcgctgtttgtctgagtgagagggggtaactaagattgtacagaactggaaaagttaggacaatctgaaaataaagtgcagctaattgaacatgatacactaatctcttggatacagagaattcagttattagtggaaacccagttcatcaatggaaatgtaattgttgacagagcatgaactatgattgacatgaggtcagaaagtccaaaggtcgcagggttagtgattcatatcagcttgtcagagcctttcctgtaatacactccatacttggaaaccagagtgattggaacatgctctcctttcatctcagagatgagaccagtttccacctaagcctctggtatttggacttgggctggtaaggcaactcatagaaatgcattcccagaagcagggaaccttcccacccccaacatcaaacttccataccaacaccaaattatgtccagtccccaggagagactcatctcaccctaggagggggcagtgggtgatatgcccagggcttcctgctaactttggccccagggactgctgaagaatgcaccacccctgtggtgagagagaaggaagaaaagaaggaaaggacattctagaattgatgtggtgaggttgtgggtagaatgaaggcccagggttgttctgtaatacacatgaatacaaaagtacctggtctggcctggaagacagggactccaggaagacccctatagcattgtaatgtttgggagcattatcacatttagctctggtttgctccctagatatattccctattttaccattatttccctgttctcagcagtttgttctctttttttcttcttttttttaataggatttttaaattattattattatactttaagttttagggtacatgtgcacaacgtgcaggtttgttacattgtacacatgtgccatgttggtgtgctgcacccattaactcgtcatttagca

SEQ ID NO: 38095 - DNA, 1151 bp, Homo sapiens
ctcttctgaaacaatatacagcaatgtccttattcaatcaatacgcagtctcatttcagtgtctgcttctagagaacccagtctgcgtcatgacctcaagaactttaagtaccaaaaggagaagtttggtttctccagagtccacagtaaaatctgtttgttcttagataactggaacactgactcagggtaagaaattaaaatctggagagccacacaatgagctctggtaacccaacaaataatctgttcttaagaaacacatacttaaagcagagcagagtagcagcttagacaattaaataagatatataaggccaggtaataataacagtaaccgtaatggtcataaacatttggatagcacttaggatatgccaaacacctttcatagccctttacatatcttaactcatttaatcttcaccataatcatatgagtcaggtactttcattatcctattttccaacaaggaaactgaggcacatacaggttgagtaatttgctaaaaattgcacagctactgagtgggcagagctagggttttaaactctagcaactgtctctaaagtctccaccaaactgtaattgtatgttaatgtagtgtatgtactctgactatagacttataatgaaactaaagaaggaggtttgtccgtaagtgagaaatcaagcaatcaggaatctggagacacatagaactcaaagggtcaggtcaaaatggaacatgagaagagtgaatcacagcagagactttgattctctggcagagactttgattttctggctggattctggcccagactccacccttcttttgcagggcaggaggccagttgagggttggccagcataggtctgcatgtgaaggcagataagtaggtgtccctggatagaataaaggatttagatgcaggaatgcagacaggttttgacagagataggaaataaaactgactcagtggaagggaaacaagcagtaagattcatatcctcatccaacccatggcaataaacactgccctccatcatcaacaggctgcatcaatatttcgatgacattcctttttccttaaataaggaaatcctctgtgttaaactgaggtatacccaggcccaatttcaaccccccattttaatgtccctctgg

SEQ ID NO: 38096 - DNA, 1083 bp, Homo sapiens
ccatcctagcttctgctggttgctggcagtccttgctattccctggcctagttagctgcatcgtgccaatttctgcctctgacatcacatggcattctccccgtgtgtcagtgtgtctgcaaatctcccactctttgtaaggactgtcattggaatagaactctttataagaaccagtcagtggattagggttcaccctaatgttctcatcttaactggagtacatctccacaggtcctatttccaaataagttcacagctactgaaaggttaagatttcaacatgttttgtaggggacacaattcaacccaaaagagatggcagatgtttcatctcaggtgaaaacttggagatgttgacagtgacatcctagaaggcactttgagaataattgtgaggtccttgcaggacccagaggggaagagtacggagatcagatactggtgtctctaggggtagtgggagcactcagaggctctcctgccaggtgtctgcatcattcacagatacaaagtacaggattgcacaaggaagtgcaatgcccacatgcaatgttgaggtgaggaatacaggagtctggcttggcagcataaggatactgattggcttttggctaaagagaagcatttactggagccctttctaagtgccaggcatactggataattggataatgcatacattatcatgcatataagacacacttcactgacctaaagcaggcccagccttgactgtgtggactgaaaagaagagactgatgggagagagggaagggcaggcagtggcagttgtgggatcctgaggtgctgggaggcacaccgaagcccttcttgccctcctggggccctgggtgagatgccgggagagcatgaggagcgcctgcacatgtgtccgcctgggaaccctgtctacagcccaagagggcatgaaatcagaaatcaggatgggagaggggctttcccagtgccccttgggaagaatccaatctgtttatcaatgcctagcaacaactttaaagccaatccgtcacacaccctgtggtggggtgagcgaatgccaaaagatttctgaagagctgg

SEQ ID NO: 38097 - DNA, 1857 bp, Homo sapiens
caggtgatccacccacctcagcctcccgaagtgctgggattacaggtgtgagccaccgtgcccggccttacatgagtttttaatggctgcacactattctattcactattacttatttaacagtcacctactgatggacttcagattattttcaatttttcactagttttttatgttttaccattaaaataatgttgtaatgaataattttataatcacacattatttcctttgaatagattaaattataatagattaaaatattctaaattataatagaatagatgataatggaatcgatttaaatactctaacatcaattggtaaaatgctttccataaaagtcacacaaattggcactccaccatcaaattatgagacagcctgtctcatagcaacccacctcatatctggtcagagtattacagcaagatgcagagaaagatataaaatagtatagcatataagtctgagagggaggcaactgtcaatcttgttgcaggatctgtaaaaaccagggctaaagaggaaggacttgaactatttggtagaactgaaatggagaggcatgcaatcttaatttccttcaaaatttggccaaaacctagcttcttcatagtttcttgaaaatatgtgattgctgctaatttaagattgaaagcctgattaacattcagtctcttaccttcccatattctaccaacttagcccaattacctattgtgctaatacctgcttctctttgaaatgcaaaatcacagtgagactaatgaaatgagaacatgttccaaatattggatcatttcctggtgatgatgtgacaatagtgaactctgaaactagggctgataacatcatcctgagtcatggaaactctaaacatcaaccagcctctctctttcctctcatcctttatcctctttccactccatctctgctgattcagcttacaggatgtctgctgtatctgtcatactccctccacaccaacaaattggtttgggtcctcctcagtctctggtaggatcattgccatagtttactaactgcatccccaggttgttttccactcagacctcgacagggctgattccctatcctaactaaagcccttgctgactttctactacaaacaggacaaaggtgatccaaaggtatgttggtcaaagcagaagagtagaacttacttaaaatttcattttcttgatttacaattgtaaaatatttgatatatggcatattgacatctatttacacccttgccttatgcccccaaattggtaaggttgactgaactctaatatgtccaattaactagtttccttcaatagcatttttaatcatgtttattgagatataatttatatgtaataaaattttccttttcaaagagcacaattcagtaggctttaatatattcacagagttgtactatcagcaccactatctaattccagaacattttgtcaaccccaaaaagaaagcccatacccattaccagttacttcccagtatcccttttcccagcctctagaaacaattgtctactttatttttctatggatttgcctattctgaacatttcacatggaattatacaatatgtgacctcttacatttggctttttaaacttaacataatgtttccaaggttcattcatgtggtatataaatcagggcttcattcctttatatggctagataatattctattgtatggatataccacatttcctttatccatttatcaaatgattatcatttgggttctttccacttctgggaaagtatgcataatgttgctatgaacatccatgtacaagtttcatgtggacatatatttattattctcttgga

SEQ ID NO: 38098 - DNA, 3113 bp, Homo sapiens
aataaatatttagaagttttatagcaatatgacatcaccataacattcatgcaacatttctattatatttaaagaaactatcagtgcataacggattagaaatttaaaacacaaaacaggttcttcaccacagatagtttgagaagcattgttctatatgtttagcctctcaaacttttcctttaaagaacccaatagtaaatgttttaggcttttcagggccatagagtctctgttgcaactactcagccctgccatggtaacacaaaagcagccatagataatatatgaacaaatgggtgtggctctgtttccataaaactttatttacaaaaaaacacatggtggcagatttgggcctgtgatctgtagtttgtcaacccctgttctaggccacaggaaggagattggacttgactttaaagccaacaaaaccacctgattaactgaggccatcctttactcttgatcacccctcattactgcctacacatattcataaagtctttgtgtgactgactcaaaatcagaaaggaccttggaactcctctcagctctaattccatgttcctctcatagcaatcttgtaagtgaagttcctgcttacaggacttgtgtccaaaggcagactccattttgtctcttacctgcatcccccaaaatgatgatgacaccatatactctgtgttaacctgatgagccactcagagccccacatgaggtcacagccttatgttctccaggacctggccaatcaatcacaggttcatatagtcctctgagtcattaagtcacctccactgccccattttcagaggtgtgccatcccacttttctttttctgcaaggctgtgcttttgtccaagtgaacctccgtggccatggtacacctctgatgctgttatgtctgaaatagttgcattggacaggcagcacaccacatatataaccttgtttttctctgggctcaaaacacagccacaggcaggaaagctttctgcgttcacacatgtctctgttgcatggcacccatttcataaacacagcccaccaagcacacagcagaaagcctattccctcccactctggagcgtatactactgtgtgtgtgaggaggtggactcttcccagcaggtctctcacacagagggtacagagctgaggcagctctttctgaaatctcttttatttaaggtttctttcattgactcaggacaaacttaatgggtaaaactttgctgttgcaagtttccttaaaatatccccttctgggcctaccaccgtttatcttggcagcaggtagcttggagaattttggaaagtctcagcttggcatagcctcagagctactggcacattaaagattaataaagcacatttaactgagctcaggacgctgcaatgtgatccttcaccgtgaaatgtgcaagattctttgtttgcaatgaacaaaattggagccagaaagggcctaccgtgacaagctaagatagggaacaatcaggaactttgtatgtctttcattgatcaattgatggttaggaatcaatgcccctgctcagccatactccaacttagcattcttaggaatttaagataggtgtctgagtatgatccaagagctgggtatttactgaacttgcagcaccacagaaatcatgcaactgcacctgcctccttaaaatattagaaaaggatgattcagagcgaattcccaagttagcagcttctccagtgaatatcagaataaagcaaggcatttccaaatattttgactttgctttagtaaaccagaatgcttgggtctggctgaatattaacccaggaagagggaaaaaagaaaaaaaaaaacacgattgacatgcatagtgtgcggctggctgcggaatgaatcagacaacatgaaaattaaaataaaaattaatcaggcatgtacatcataactgttggttccaaggaggaattaatctccaggcacctggatacacagcagcaagtactaggctaggtcagcaaaggcaaacatttaaaaatgtaccatcctgaattctggaaaggcactcgcagacaccacgtgccatgtaatgccctgtgtctatttacatagtgagtgtgatcccttcatgtcctccagaaaaatcacaggcaaactctgcacgctgcaaatcagagctccagaccagagcacttaacacattgggtgctttcctctataccaacatcaacattcaaggaacaaaaaaaaaagaagagaaaattctgtccttaccgagaaggcataccagacagggatgctgaatgtttcactttagcccactcattgctttctctttcattcgatcaatgttctaatgctattgaggagagttcctggggttttcggatcttccttcaagagttttaatcactggtttccccaggccgggtttaacaaacaccgctgtgttctgtcaacatttgtatgcggcaccacattgggcaaccagccaacacacagagtttcaagaggcaaggagagaaaactgacaccctgacaaacatgcttccctcttttgtgtcctgtaaggtggtgctcaaagtgtcatctttgattctgacgggggctaaagatagcctctttttatgactttctctactgcccccgaacgaatgccttgctgggctgctggatctgggttccgcaaagtttgttttttgtctcactgccctgaagttcgccgcacaatcgcgtggtttgcctctccaccagctgcactttaaatgtattttaattggctggaatgtcgaaagaatccatttggcagtcgtttacatgtgaagcacgcccagggcagctgaaagaggccccagaagcagccgattacttcatcaaaagctgcagtttgaataccattgactcctacataactacagtgaactcaattctataggcaagaaggagtaattaataatttgctgagaaaattcttcattcatctaaatgtcaaaaaagcaaaggaaaaaaaatccctgcagacacaacagttcttctgaaaggcttgatttatagccgccagttctactcttcacaaacattgactttgtatagcattacaggaggggtgtaatgcata

SEQ ID NO: 38099 - DNA, 823 bp, Homo sapiens
gttacagcaaaagtgagtaaaatattaaaagaattataaggtcatagatatggcagaaattgagaaaaacctcaaataacagaagtttcttgatcaccccctaagatctggatcctcatcccgctccctattctctcactcaggcatagttcctgggggtcccactttggggcagccagccaaagtcagggcactttaagtcattggtgtttgattcttttatcttgttcaaatggtttccattgatgtttgtctttcaccccatttgcccattatggggcgaactccttgagggcaaatctgacatctctgttttctttccaacttgcttgcagctgccagtggcggtacgaggcgcacagtgggtgttcgataaacaccactgatcgacattcaacactcaggcaacaccaacatcccagctcgtaccagacactggaaaactaggtcatctatttggcagaggcatcatgattcatcaggacaggatctgtgaatggtgtaaattaaccaaacacacacacacacacacacacacacacacaactcagccttttggaaaaattacatctttgttgcaaagatgccagaatgtctgaaaatggccaaaacctggggattttccatagattagtcatgtggtttaaataattagatttgaaggcccagtatgagattgcccccagtgaaacaggagcaggttccaggccaagttcagtcatgtataaagagaagaagctcctcaaactgacagcaatgaattaaaagaaggaagaaatcaagaaatgacctgtatcctggagaggagagagaatgcgtgtgt

SEQ ID NO: 38100 - DNA, 863 bp, Homo sapiens
aagaattagaaagaaggtttcaggacacccagtttccattatgtcctgtgactttaagatttccttaggaaaacacacacacacatacacacacacaaccctgggcttcctcatgaaagaaggagagattggtatggcagaaagggcataggcctaaacaattcagcctatggaattcaagcccaactctggccagcaggatgagtgacttggtacatgtaatatcacccatgtgtacatctgtggtcaggagtcccttgtacagccgctgagagctctggatcccttccctggctccagatattataggcatgtgacactcccctaaagagcaatagaacacccagggtgtgcttggctaacaaactcacttggagttctttcctcactctgtccaaataaaggcaactgctctctgaccatcttttgtcaatagcatttttgtgctatcatccgcagggtcactggttgtttgttcttggactgtattctgggaagcttttttactgccacactgagcctttgcaatgagcctagaagagcctttatcacacaggatgcttcaaagaggggaaaaaaaaggcagggtggggagggcaacaagtggggaaaattgcaatattaagctggcagatgccaaattgtataatggcaaaactggaaaaatagaattgtggtttcctttgctccaaaatcccctgttactaaggtagaacagagcaggtcaaaagctcaaatctttgtaggctaaagcaagagtgagtctttggatgtaaaattctctttcttggcataaattcaactcaaccagtatgcactaagtggctaccttaagctgagccagacattgtgttagggactgc

SEQ ID NO: 38101 - DNA, 706 bp, Homo sapiens
aagcagaggatgcccgcatcaagcctcaggagcacctaaaaagcaggtgttccttacagcctcccctgccgctgtgagccactgattctgtggagtgtgcttgaagggcacggtagatgggcaggaaggcaaatgtgcaaatttacctgtctgccaagcggaccaggtccaacagatagtcaaagtccacagatactctctctcagtcggtctgattttaagcccccccacacagctccagcccttgagcctggactgtgacaatccccaggtaccctgagggctgaccttcagatgtcctgacccctgccttcccagtgtccagcggcttttctagaatcaccaattccgacattcccaaaactccccaagcctacttctagattgctttaatgtttgattacaacacagttttttgaccttgaccttggactgcatcaaaaatctgataaccctcctgattgtggcttaaaagtcaggagtcaaattccctcccttagcacttcctaaaagtagtgtgcagctgacccacaaaataacccactctgggtataacagctggtggttgattttccttttccaaaaccaatgctcttcatttcagaaaccctggagaacccgtacaattaaaaagtgcaattaattagaatacttaaaatccaccagcagctacattcaaaacagcagccacatgtaaagcagcagc

SEQ ID NO: 38102 - DNA, 2221 bp, Homo sapiens
gttgcctgcacctctaagatggttgagaccacagtctccccatcagtgggcttcgctgctggaaggccccttgtcctttggggcttggactgcaccactccggaggatgcatcgtcatatcaatatttgcacactgcccctgaccttgttaggatattatttatggccgcgatcagaaggtcccgctcgctcctttctctccccttgggctgcggaacagagtggctgggagaagtcctcctagacagggttgagagtttgccgacggcccctgagaagctggggcgttccgaattggctgagcgcgcggccgggggcggggagtttgccaaacgtccccggccggaatttctgccttctagagccgcgagcccagaagcggggagaagttggtgaggttggctaggggaaggttgccagaaattgaggacggactcccgccctggtcgactgagctcccacaggagcgcctctgctgcgtctcggggctgagtgtggacgcgccgcgcgcggccccgccagggctggtagtttgcagaccgtccctgccgcggcccgctcggcggcggccctgcggctcccgcggcggcggccccgggcgcgatccagcccaggtagccgcgccgcaggctcggggcgtcgcgacctcgcgcctcgggccgcgtgggcacggcggccggcgggtgctcccggctgctgctgctgcccaacaaggaggtaagagctgccggatccgggtgatcgcgtcggagggagctcgtcatccccgcggggtgatgcgcgcagaggggaccgcggggggcacggggaaccaggcgcgggcgaggagagcccgcaccggggtcggcgcggtcgggggcttccttccgtcgctcctctgccgcctgcgtgggtgccccggccccggccgctctgcaggacgccggagtggagccgggagacgcgccttgagaagcccacctgccccgggcagcccctcccaggggaggctgaaccccccccgccccgtgacgagggggcttgttggcattcctagggacagtccaaaggaagctctggttgcgcgggctggaggcgagcggcgggggatggcagatgggcgctcggaccgcggaggagcccggtgggggtcacgccgcaggcgtgggccgggccgggccggggtcctcgggacccaggcgcactgggcgggctcggccaggggccagtggggaggaaggaagaaggagggaggctggccccgagcccctagggaggagggatgcggcgggctggcgctccgggccagaggatccaggaggcccgggggcgccccggctgttaggggacggcccgcgggtccgtgatcccgccggcgcgctcagccctgctgccgggtctgggaggctgcagggagcgcagagcccacacccgcgcacacactccccgagagcatgctcagtgcggccctgggaacttcctgccgagtcgtgagccgccccggcccactcccggccctcagctcgcaaagttgggggcggcggggctagggagacgtgggcgccgctctcgcctgtggctctttcgcgcccctggcccctgcctcgcctcagttgagctacgcgcactgctctccccggctgccctcacagccgggattgggggcgtgggtgttagcccctgctccccgtggcggggtggccagaggcctggagcgcggctctcagcctggtggacccgcgcgcggtgcgcccgcttggtgcccggacctggcgcggcgagcaggcagggtgcaagggggtgtgtgagcccagggacgctcgcgcatacacttgctgtcacacacaaagccgcggttttgtagccgccgcgcggaagagccgaagagggaagggggtggcgcttgcattgtccagaggcgtttggagcgcagagggggtgcttggctcctcagggctgcgggaaccgggcgatgtggatggatttggtatagggcccggccctcctgggaccgactgccaggcctggccccgggcggccgccgctatctgcacctggctctggcggcccagttagggaagatgagtacttctgggtctgtgacgttgggaaggggcaaactcagttgtgtgtggggttcgggtggatggcaacatcgcacttgtaaacatacccagaccaaagtgttagaggtatctcattctaaggagatgcgagtgggaagctgggtcgttgaactgac

SEQ ID NO: 38103 - DNA, 1200 bp, Homo sapiens
agtgcaggttttaccaggctgcctttaaagttaataattgctttgaagtatggaatcactcttagtagccagaagatggctacactttcaaatttctctttgaaattaagtaatgatctctccaacccttaaagtctctaatctaagccatatccctatactgttttacatcctatgtcaacatccacatttgtgactgatgctggctgctgatgagcatttttccagcatctgccatgtgctgtgcactgggctggtgctgggtataaagatgtcctcctaaattatctcacttttaatttagcagaccttctcttactgtgtgttaatacaaactaatagctcttggaaagctgccaaggtgggtcccaggagccttagcactgtaaccacgttctcagctagaggagtttggactcgagctgtgtgtttgcccatttggactgttgtatttatttttttcattgccacaattaagtgcatccttccctgactttgtcatatctgcagggctatgtgtgtgcatgggaggggttggaggaatcactttatttgttcaaaatcccacagttctcttgtctaaacatacaatcttctggaatgggaacagggctttcctctcgggactctgcccagtcttaaaaatcaggacaggcaagggttataagctactgtggcttggtttggtgggagcagtttgtcttgtaaactagcactctctctttgtcaccttcactgccaggctggcattaatgcctgctggaccttgacccttgctcaggtggctccctgcaatggctaaggaatatttctccactctatttcctgacaaagtgaactcaggagtgagttacacccaagtacttctgttactagtaagagttaactactggtgcttgcaataggtttactttttaaaatgtcagcacttcaaggttatccctagaataataacagcctcacttatttgcatccctttgtgatttttgtggctggcccttgagggaacatgtgccacccacccactcctgtttgaacttcacgctttaaagttgtagttcggtgcacagacttcttataagtcctgtcatgctggtaaaatgttttttaaaaattattattataaatatcctacacagaaaagtcttccactctattagttttgggtcttttccatgtctgggtcccctcatgggagtg

SEQ ID NO: 38104 - DNA, 801 bp, Homo sapiens
cagagccagggtacaaaaggctgaattcccgaaattagtattcttttcactctgcttttctgccttacaagcgataaggcaaaaacacagtgagaaatggtaatggaaaacgttaaaataatgtaaaacctctctgcttctgccagggtgatgatgatacacgataaatatttgcctgtggtagattgatttttttttttttttttttttttttttttactattggcctctgttaatggcctccctgaactccctgtatccactatccacactctttgccctataactttgcaggttctcttcctccttccttcttcccccaccctggtcccccgcccccttttggctatgtgacttgctttggccagtgggatgttagcacatgctgtgtataaacagagttgtaaaaagaggctgtttctgatatccttttacaggactgggcttgcaccttcagaccccgccacctccatgagatcgtgcccaggctagcccagtggagggggccaggtttgtgcttgccgatttcatcatagaccagccaatgccatctgacctgtcagctgtgtgctgtctcctgagcaggtctaggtcggccagggttacctgaatcacccactggctgacctgtagagatgtgtaaatcatccatggttgttgtaagccactgagtttggggtaagtttgctatagagcagtggttaactgatgcacagctcgtatcagatgtttgaatagtgtagaaagtaattttagtgtccttttaaaaatctttttgttagttacttgtaactaatattc

SEQ ID NO: 38105 - DNA, 1341 bp, Homo sapiens
aggctcagacatgaagacagatgaagcgcagggttcttataaatgatattacagcccagccatgaaaaggaatgaaaaacctcgcacagtatcgcaggaattatttgttcgcagtgtcatgttctcttgcagccttctaagccagctgaggtgcaaaatcaaaagtttcataacagagtggttctgtaaataccaaagactgtaaaacagccctgctagattaccacttgtcatcaggtaagcagtgccagaggatgacatgccatccacaggccaggccactgctggcaacccagagcaagcagagggaggggtgctggttatgcacttgctggccattcgagaacagcttttagttgagagttgttatgtggccttccttctacacccaggtttagggaggacctgccttctgactcttggaacacctgtaaaagcatgaatcctaaagtaggtaaagtgaaacttgctggtgatgaagaaaaagtccttcctccatcaggagtgaccagcaggacctggagaggcacttgggggctcacggcctgcacctgccccactgggttgtgtgagccactccctgaagaggacaatgatctctggctgtctttatgaatggtcagctctccccctggaaataggagaaccactggctacaaaacagggagaaaaagaaaaaagagaggcatgagaaggcaaagccaacagagaaggaggcggcctgggtgtgggagctgtggccgttccaccgtgggaaaggagagatgggacgatgtggagcagctgtgctgctgtgggcgccacaagtctgcttagaatgggggacaaggcactggctggcaagtcaggagatctggggactgacgctttccctgccactttgtgagcctctgtgtcttccacaaaagtgggcgagttgggtcagatgttatccagcgtgactgccagctctaaaagtctttaatgccgagccaatgagccattcttgtagggcttaccagtgtgactcagtaaacatttgatgagtactttatatcagaaacagggcacaaaggttaatataacacctgtgcccacatccagggtggggccatgtcataagcagtcccattgctccaataatcggagaatagctaacttgtaccaggcagtgttctggatactttccattgatttatctattcatgaaatacattagcaaaatgaattagcaggaaaaaaaagtgctagctgggcactactgttctgattagagagaggaggaaactaaggcacggagaggttaagtaatttgccccaggtttcgtagctaacaagtgaaggagccagaatttcaaccta

SEQ ID NO: 38106 - DNA, 1274 bp, Homo sapiens
atgtggccttgcacaagtcccttaaccactttatgcctcagtgctctcatctgcaaagtgggaatgatacagtacctatcctatgaggttgctgtgatgattgagttaatacatgtggaaggtcttagaaccatgtctggggtagtaagtacttaaaacattttagctgttactaaaaggaagaagattgttggtcattaacagttggcataaatattggcaggtaaaagttgtgttatttggacctgagtgttgaactggtgtgtagcacttgaattaactggaaaaaggaggtggtgggggtgtgttctgacacctcctagtatactacaatataattctattgtaaccacccagagttagtgcagaccccatcagttaaagggtatggttcccaaaaggctgttcccacttcagatgcccactgtaagtgggacttccaggccattcacccttttgactgactggttacaatccaaggggttcccatggccttcttaggtttgataatttactagaatgaatctcagaactcaggaaagcactatattttcaactatggttttattataaagggtctaagtgaaggtcagtcaaatgaagagacacatgggctgatgtctgggagggtcgcgaatgcagagctcctgtgtcttgtcccttggaactagggtgtgtcacctgcctggcacgttgatgtgtttaccaaccaaaaagctccagtgagcctggtgtccagtttctattggggtttcgttacataggcaggattgattgagtacaaccacatggccaatgattcaatttccagtcccctcctttcccctctctggattgggctggcttagagccctgatcctctaattgcatggttggtttttctggtgaccagactccagcctgagtcatctcatcttagtgtaaactcaggtgtgatccaaggggtttatcaaaaataaatacactcctactacagcaggtagtccaaggattttgaaccatccctcttcccaaccaggggcaaaggccagtcagattctttactgtacaatagggaaattatatgtgagatagcaaaatataagatggtggcctgggaagggcttcttgggagaagtgggcccagctcttttctcatgttggtgctgctgctctaatccaatgtcaggttgggtttctggttatgcaataacatatgactaacctcatggctctagtttttttttgttttttttttttttttttaagacagagtctcgctctgttgccaggct

SEQ ID NO: 38107 - DNA, 539 bp, Homo sapiens
caaatacaagaaaaggggtttggttgtgcttctaatagtataagtaaaattactcttgaatgtttcagggctcatcaaaatttacatttattctcttttttctacttttatctacctgagtattctcattatctctccagctgtgagaaactctcatcttcccatgatcccaaattaggtgggatccagttctgacaacatgagttaatcatcactagaaacattggcaagagctggggaatgtttgtattcctctgggacagcttagcatctctgggtaaatgttgcagtccaactgactgccttccccgggctgtccttccccaaacttcctctcctagaggtaggaagagccaaaatcaactgttaggtctgtggtaatttacaaagcaaggatgatatttcaaaacagttggctatataatgtatttcctcttgcaaaattatacagttggtattcagtaatatgttgccatataatgtatttcttcttaaaaaattatacaatggctatatgactgtttatgtccacaaagtcc

SEQ ID NO: 38108 - DNA, 2737 bp, Homo sapiens
gggggcctattttgagtttatctcagagattctattgaacccagaatgttcctctgatgccagaaggaagataggaagccaagaccccattggttcacagattgggtctgctacctcttttagctccagaccccagtgttttagaggttggagtattcattattttttgcagctagacgaatatcttcaaagggcagcgaggatggagaggaggtgttcctggtatgaacaagaaagcctgcagctccgaggaggcccttcccatcccttgaatggtaggagcactgcagccctaattaggccaatatctgccttcagagttctccatgtgatctgcaaggagaacacagaagcttttaccccagaaacctttcagggttgtccgtcatgctcagccaaggcagtgggagccagacggagccaacagacagcaatcgagggcacgccgggcttcagtgtgcagttgagcagtcgccagcaggaaacccacctcatacccagtcctccctgggtacaggcacccaatgagaaagactcctggatctaggaaaaccacttgctcttttctcttaatgtccccacttcctttactgtactgaaaatgttgattcagagtgcatgctcttttaaatgagctttctcaaagagacgctgtctccagcagggagaacttctttgtaatctaagatcaagcactgttgttccctatcctcagtatgtgtgggcttgttaaggttttcattatgcatttcttgggaaagtcttttgtattagcctcaggtcagagagtatagcaggacttttttgaaggaatggcaatttcagattgatttattaaaaccatacatatgctcttgaattatattttctgtttcctgtaaagacactgtaaatatatagcatggtcacagtcatgttaatttgtaaagagctgtgtgattcatctgagaagcattctggagagagggagggtaaaaaaaagagttaactccaacaatggctgtggaatcagctgaaggtcctaggatgtctgttcatcagagcccagaataagcccactatggagtgttctggatgcaaggacaagcctgttatgaatctggatagtccaaaggtgggagcaatggtagaggtgacagattgcaaggaaagagggagaaattgaaaaggggagaaggttggtactagcttgaggaatgtttactcttgagaaatcaatagcttttgtttacccagcctttcctgcacccagagagactaggcaggtaatgattaagcacagaaccctagcagctgactgcctgggttcacatcttagctctgcttgtcactgtgtttctgaccttgggcaagttacctaacatctctatgctctttcctcttctgagaaatagggataatgcaacctacccatcaggctggtgaaggaaaaggtagtttgataatgtttagcactaagaacaatgcctggcccatgtgggtgctctcaaagccttcgctacgagttgccgcaggagcccagaaaccaaccaaggtgtgtttttcaaactggctcactgaggtatagtttacagaccataaagttcactgcatataaggacacaattcaattttttttttagcaaattggtagtgttacacaactaccaccacactctagttttgcagcatttccgtcaccccaaaaaactcatttgtccctgttagcaatcaatccttgctcccaccccaggcctaggaaaccactgatctgtttcctgcctttttagatgagccttttctggagatttctggctttcacttagcatgatgttttgggggttcacccatgttgttaaatgtgtcagaactgattttattgctgaatagtattccatgtatgtacagattaatatcacaatttgtttatccgttcaccaattgataggcttttgggttatatccacgttttgactaatgtggtaggtgctgttgtgaacattcacatgcaatctgtgtatggacctgttttcgtttctcctgcgtagactcctagaagtgtgtgaataaggtagatttctgttctggctcttcaaaggtgagttttttgctcagtggaattttgcatgtgtagagataatccatggagattgctgcctactgctcagttttataggcaccgtcactgtttcttttgtggaaacaaaaattcacactcacttctgggaaacaacctctggggccgtgtgtggacacagttcactgtgttttaagggaaagcacacgccgagaatggtcggtttcagcctggcacctgaggtgtgctaatccagtcagttactcaatatttatggaacacttcctgtgccaggccctggatttctcagctgtaacacagataaccaatatgtgccttatccctcaaatagctgaccgaacgggacccaaaccccattttcatggtcctacctgtcctaccaacttttttttttttttttgccaatttctggtttttcttcctctagatcctgcctgcagacatttatatttgaacctgtgttcttggttccagacaatgtgggttcccaccaaaacccacttgcaccgaactctcatgggcttattagtaactctgtgaaagagttggctgcagtgggtggggtgaggggtttctggacccccttcacacaccacttagccctctctgactggcccttctgttaccactcctccgctttgctctgaacaagtgaccctt

SEQ ID NO: 38109 - DNA, 990 bp, Homo sapiens
acacaaatgtgcagccagccttttttcttaggcccactgagatccctgctcagtgcgtctcaattgtatctccagtctaagaggagggtggggggcacccggggcctcctccactccttaggtggcccccaagcacatctgccaggtagagtaccatggggaggcctctgccctgagcatcatcacaggggcgcctccagacctggctgagaatagcctctgcttgggcctaggaagaagggcagaagtccaaaggaaaccttggtgagtgagtgtgtgtgtgtgtgtgtgtgtgtgtgtgtgtgtgtgtgtgtgtgtgtatgagcctgtgcatttcttttaagcaagggcagtttcctgcagtaggagggcagatgactggcatccttgctgtaaggaagagctttttccttgtgaatgggcctcttggctgtaccctagggtgtgggaatttgctagagttccctgacctgcaatccctgggccagtgccgccctctcctgggctcttccaggagcattgaacactgaggatgtcaatgcaagtatctgaccaacagggggagcctgcaggccgagcaaagtttaacccacttagccactgctacttaagcaaggaagctgaaaggtaaccttagccctgccttgtgttccaaaagctgcaaggatcatttgctggctgtccctaagttcaaggcctccctaccttccccttcttttccaagtcacaacccgccctgcccgggccagacagcccagaagaacacttttctgccatttaaaaatccctctttcatcccccccagtccagtattgagtggaagtgcgccggagttccactgacagggcagctgctcttggagcaaacaagcccacactccagttgtttagggcattatctgaagagtcagtgacccctgaatgtgtactggctcccaggcctcctcagacttggcccaggtctagtcagtgatcctggagaggaaactgg

SEQ ID NO: 38110 - DNA, 883 bp, Homo sapiens
aaagaaaagaaaatggaaacctaaactaaactcatttgtgaagccataaaccaccagaacaacttttctgatcatagagcaaacaacaggggtggcaattacaaaacatgaataacttgacactattacctaaatttctgcttattagtggttctgcaactctgctgactaaatccataataagtcatgctgattactgggcatgctgaatgacaggccttactcattcctctgtctccaccacagaccctggctcaatagcaggtgtttagtagacgctgggagggaaggaggaagaagtttatcagattttgctatgaaaacaaatatggccagcaacaggcaaaagggcaatgatagcaactagagtgactcatttctgcaattccctgaacttgacacgtcaacaccaaggtcatcattgggggaaacacagaacaaacacttttagcactggtgactatggacataatatgccctcaatttatagaggcctctgaagggtacagtttaacttctggtcaattcaaagcagtaaaatgggcattttaccagcaatgactaatgataatcactgccatttatttgtgctaaaatgacctaagcagttgcatgtgttaggaccaatactcaccatgtcctggaagtaagtactattatcttgctttactgatgaggaaagcaagacctataacaaggtttagtgacttgttcaaggtcacagaacaaacaaacagctcttggtctttgcctgatgatatataccactcccctgattctcttaacaaatgttgaagtgagcaccttctatctgcgagtaaatgaaaagatgtatcaagcataaaccttaccatcgagaggcttcactagtgaaggttacaga

SEQ ID NO: 38111 - DNA, 1345 bp, Homo sapiens
gtgtacttataaatataaggagagagagagagacagagagagagatttactataaggaattggctcacatgattgttaaaggccttcaactgactggatgaggctcatccacattatggagggtaaacacttttactcaaagtctattgattgaaatgttaatcccaccttaaaaacccccagagaaacatctcgaataatgtttgacaaaatatctaggtgctgtgtgacctggccaagttgacacaaaatgaaccatcgcaagcacctactcaattgcttttcactgagaatgtaatccaagataaacatggcccctgtccccatggtgtttactcaaaaacttaattcaacaatgcccagatatagacaaattcaaactcaagtgcaaaagactgaaaccagctcctttcccatagcaagtatttataaggaggagaaagagactaagaggtctctgggtatcaaaagctagggactgggaaaaggcagcagaaagggactctggtatcttctaagatgaaattgaaattattcactgctttgtcaaggtcattggtactcccactcctccaactaactcttccaggaggatatggtcccttttaccatttagggacagtagtagtcaggagaggcttcacagaggaggtgatgtttaaactaaatgttgagtaacggacaggagtaactttggcagaaagaagggcaggcaaaggtcattctagacatcagaggccaaggagccataaataaagacagaagggggaatgtactgcatttgctaggcacaaagtgcttcctgtgcctgagggatagggcacagtggcaaagcacagagacaagagaggtagagaagtacctcggaggccttatttcccataaatgcttggacttagcagtgagaacccatgaaaagtgttacactggaaggagatgtgatcattttgtattttagagagatcacatgctggccaagagaatcttccagatgaatcactgtggaccaagactagagtcagagaccattagtagttaatttaaaaatcctggagtgagacgatgagggcctgaaagtgagactagagacaaggaaacagagttgctataaaaaggggttatgataatgcaatgggattagaataaacagacttggtgatctattgattgtgaagagagagagacaggcagagatgggggagtttggcttggatagtgtatcatccactgagagaaagaacacaagaagaggagcagatgtcaaggtaaggaatcccattttggaatgggagcttccagaagtggtccgttcaacctgtggagctcccacattcaagtggatcac

SEQ ID NO: 38112 - DNA, 4782 bp, Homo sapiens
tttattgtgagacaatactttgttgggggtgcttaatctgtggcaatactgaggagacagaattgggatgtttttcttcagggaggatttacatttcctttttctggtcaaaagtagtactagggtttggatgtaatttctccctaccaaaacatgttaacatataattgccaatgtagcagcattgggaggtggtgtttttaagaggtgattaggctgttaagatgggtttttcacaagcctggtttagttcttgaggttggattaattctcatagaaatagattagttcttccaagagtgggttgttataaaactcattagcctcctttgtcctgtccctctttgcacacatctgcatacctttctgcttttctaccatgttgtacctcagcatgtggccctcaccagaagccaaacagctcctggtgcaatgttcttggactttccagccagcagaactgtgagccaaatgagtttcttttctttataaattatccagactcaggtattctattaaagcaacactaaattgactaagacagggtgggaggaagtaggtgagtggtactttaactaaaatcttagtgggtgaccttgaatagtaattctcaaagaaattctcagagaaaattgttatttcttctctttttttcccctcatagtgaagacaggtttcattacagactccctctttttggccaatggatttttttcctagactactttttccctgagggtctagatccttcaagacttttagtgtaatgagggcatttcagttttgtacaagcccatattattatctcccattcccttgtgggatattaaccctgaaatctctaggagtctgaagccacattttctggattctaattccagttctcccacacactattgtgtaaccatgaacaaggtacttctccgtgcttcagtttcctcttctataaaatgaatattggtcctagttcttcccccacaggaatgttatgagtaataagtgaaccgactttattaaaattcatggaccagtgcctggcccattgggagtgctctaaaaatgcttgcacttacttactcagtattagcaagtgcctccatgttagtttaaggcttactcattcagttttagctcactgaacttctaaaaaaatggatttcaaggatttcctttattttctttcaagctgtctgttataatttatccagaatctagctgaattacagaaggaagctttttgactactcaatttatgtgttgtggagtctgagctgaaggcagcaaccaaggcaggtttaagggtttgccaggggacctggggtcccttgaacattttaagctgttcaggaagaggaaagggtaaacacagaacaatcaagggctgttttgttccaggctctctttagaggcatgaccatataagccccactttctgctatattggaagccctccctgactgctctgataatgctaaatggaaatggctactatcttcttttccctacactttaggatatgtatcatctttctctcagtcaaccttacatcgtcagcatatagcagttctccataaatgtttgttaaatgcatgaatgaagctgggtgcagtggctctcgcctgtaatcccagcactttgggaggcaaaggtgggtggattgcttgagcccaggaattccataccagcctgggcaatatagtgagaccgcatctcaaattaaaaaacaaaaaaaaaaggaaaaaaatgcatgaatgaatgagtccaagacaaaggcactggaggaaaaaacatatatgaagagtggactctttctgtgatttaaaatgtgaaacctccccataacttttcaacacgttaaattttcatgaacaagacaactgttaaatattatttaaagatatgggagtaactaactgaacaaaaagcaaaatcataaaaactggctgcttctgaatagtgcaaggaaaagtaagaaaaggtgagtcagggatctatcctttttctgtaaaagccctctgcatggttttatttttaactacaaactatttaattattaactatgtacaactaagttaaaatatttaaaatgaaaaatcagtcaatttttgacctgctgtaagtcaaagcatcctgctgtgcttttgacctcatacagttgagtacagttgtttttttgtttttgtttttgtttttgtttttttaagttttgtgccaagagtcctgactaccaaactgtgttgacccaaagcttgattaacaaataaagcttggttaaccaaagcttggttaacaaataaacagaactttgaactttaataaagcagttctaatggacctagactgggttgggcaggcctactgactgctgcctgaaggttgctgtaaagggactaagtaaatcaattaactccacagttttcacaaaggtctcttgatatcaaaacttctttccttgcatgcttctctgatcctgtggagatgaaaattgacatccatagtcatattctaccaaaagaatggccagatctaaaaaaggtaatggtaattaatttgctgaattatttctgaaacttctccagggtttctcaatgcctttctcttctttgtggaattagatgtctagtttatctgctttggtggggggcgagggggttaaatcatttggtagttctgattttctagcttttaaaaatgacttttatatttattttgaaataacattggattaaagaaataagtgctttctcagaaacccttttttccctcaaatgaaccattctttaaaatatctggacaatttaaataaggcagatttaccttttcaaaaatcacatattcagctgctgggaagatacatgccaactacagaatttaaagttacaattttaagtagaagaccattaaaaatggaatgtgatcggtttcaaggacttctaaaatatatctcctttccaaaatgtttaaaataagttttagaagcaccaagagatagctttgtgaatttttttagtctattttaggacactgcctgaaacctttactgtttgatgttctttattctataaatctttgtcctgaagaactaggaagtaggtacatcaaaaaacccgagaataaatgacatgaagcttttgcacagtgacatctcctaagagagtattctttgtgtttctctaaagatggaaatttccttttgtcattaagaacttttgaatgaatataaaaagaggaaggtgaggaacatgaaagaaatgtaaaattggctagaggtttgttcaggcttaatatcaggttttacccaatcttcagcattctgccagtactttcacaccaccgataatgtttcaacttttttatcccaagtgagggaaaatgaattaacccaaacttgaattaaatgtggttcattgtgcaaatagatgaaactattttcttctcatagttgtctcattgaagaatgtttatcttaagtatttctttgtccattggtatcttaggtaagaggggtggtagaaactgtggattgaaaaacaaaatctttgaaagcctatcctatgcacagctaacgataaaagataaacctctcaacctgctcttcctaaaaggactctacatgtttacacaggaacatgctgttctgagtgctgttgtcctcatcatagtttactgaagtgtaaaccacttcacaatgttaatgatttcatgaagggaatgcaccagttactttgtgggagtgcatctgccttgtttagaagctgcatgcagtttcttacatcttatggcgcccaccactttctacccctcatttatgagtatttgcctgatgaatgatgcaatgaacacattgactaacttgtgatacaggtaatggaagcaatagattatactccctaatctgagagttttagaaaaatccaaattttagtatttggtattttaaaatagccataaactatacctagcaaaaaaaaaaaaaaaaaaaaaaaaaaccactaattcctctgttacagcttttttctctatttgagtatgaaagaatatccacatgaaatgctttggaaaccaccacggtggtctctagaggacaacgcccccctgtactatcccactgagaaagctagctagcatgatcgaccctccaagcagggctccaagctccagggcatacacctccttgtgcagacaggattttgaggcttagagagagctacagtctgaatgtgtatgtcccccccaaaattcaggtgaaaccctcatccacaaggcaatggtattaggagatgcagccttctggaggtgattaggtaatgagagcagagccctcatgtatgagattagtgcccttataaagtaagcccaaggaagcttgttcgccccttctgccacgtgagggcacagcaagaaggcaccatcttagaaccaggaagcgggttctcaccagatcttggacttcccagcttccaaactccctctcctttctatcaccagctattgctttaaagagggagaggaattttgtcccaataaaccaggtttcttcttctttttttatttttatgtatttatttttatttccataggctattggggaacaggtggtgtttggttacatgagtaagttctttagtggtgatttgtgagattttggtgcacccatcacccaagcagtatacactgcacccaattttagtcttttatccctcatctgcttcccaccctttccccgagtccccaaagtccatcgtgtcattcttatgcctttgcatcctcataacttagcta

SEQ ID NO: 38113 - DNA, 2892 bp, Homo sapiens
acctgccttttcaaggagaaaactagtgagcatgagacttgaatgactggtgtcagaaaccactacttacggctgcacggtaaacgaagtgtgtgtgtcaactttggtttttgttgtgtgttgcattccttggctgtccctgagagaacagtcatgaccaaccctcattgagtatttactttgtgccaggcactattctaagaacctaacatgtattaactcatttaatccctacaacaaccctaggaagtagaccctcttgaagacaaaagattcttggcatcctggatgctggagtcaaactcagggtcccattctgggtatttcagatcatgggactccttctaggatcacttaggagctgaattaaaggggcagggaaggtggctgagagacatgctctgttgtgcataacctaagacagaaagcctgaaaaagtcttgcttaaataaaatttcacaggaaggagggcagaaataactctttggaaatggggtcagttagttttccttgaatgatctcatttgtgtccaatctttacttacttccctagaatctggggctgggggctgaggggggtccagggagaggactgagagggacgcagggagggagagcaggaggagtttagggtggaggcttgctgccgcttggccttgggaaaggaaggagtgcccagcctattcttctcaccagctttgcccttctttgtgtccatgtctaggagtaacagtgcaagccctttccacagttcctgtcatgtttagctactgggtgagtgtgaaacctcaagccatctccttggtgttgaaggttcgtgttgagctcccaaaaagtgaacagatgcctcaagtttggacaccagtaccactaactgcccccaacaactgtcctcccctttagcgatcagcagggtcccctctcaggcctgtcttcttagccatgtctttgctccagtacggtagccagtagtcacatgttgctatgtgacttgcattatagtttcactgtacagtggtactagaccagccttaatctccaccagaacttacctgtctggtgactcattcctgcaatgccttgccggggaactgacaagctaatatcttctgagacgagaatgattttgaggtaggaataataatcatgacctaatatatcacctctccaagggaaaaacacaattcagaagggtaatcctgaagtgggatgccctttcccaagtgaataaatctcaagcactaaaagtttcaggcatgatttccagcctgtggaggaaaatttttgtacgtagccgggaatgtgctagtccctgctcatccaagcagatactcactctcgtgatttaaggagcagtggaaatatcacctgttcatacatacttccgtgatctgtgttcataaatccagtattagtgagtgactcagtctttgcctgttcctgcgattgcattcactacttaaaagtgccctgagacctcaaaatgcctgaatttatcagattggctaccactctgattagacaactgaggctgcaggagaggaccagattcctggcagtgggcagtggggtgacagaggaaagtaaacagtgaagaagggagcattaggaaaaccaacagtaaacttcaactgcctcagcattttgccaaggacagccctgaatgtcacagccaacaagaaggacagagaggaggacaggcaggggcaggacaagtcagtgagccagcctggcggccctcaatggggcatgacaaggaggtgccttgatggtggcctggggcccttggccaggcccgacctcctgggaggtaggggggcattaagatctttctgcagttggcagtggcccatgctcattccatctctagtgttgggataccatgccagtaattgtgttcttcccttctgattctggcctcaatttttccaatgaatcagcaatatacctgcagttttctttgctttacaaagattggcttctcggttgtctgtggccagcacctttcccaatctgtgcctctgttttctgatgtggtaaagccactgaaaatgacaaatattatagccatgaggaggcactgttcagagtgaatgtctaaaagaagtaggttttcaacaatgcggttttccctttcctgtctccaccaggccaaacctgaggacactttaaacctgtgccagcttttaaacaacgaccttgccagcaccgttgtgagctaccccaggaggttcgtgggtctggggacgttgcccatgcaggcccctgagctggcggtcaaggagatggagcgctgtgtgaaagagctgggctttcccggggtccaaattggcacccacgtcaacgagtgggacctgaacgcgcaggagctctttcctgtctatgcggtgagtagcggggctgctcagccaacgccagccgcccagtgcctgggccgggggcaccgctgggtgctggcagggaggaggtgaagcgtcaccccactgggaggggagagcggtgtccacgacttgtttgatgtaggtagaaggtgtggaaatagcccccgcaaaggagtgggccattccaaagaggaactggtggaagggttcctaggccagcactgagttaacagtgaaatctcttttctttccatcccccttgccctccttttaatctttcacttggaagacaaaataccctctttacagccactgtgcaaaagaatcgtgttaatgacatacaaatatatatatatattttggccaggtgcagcagctcacacctgtaatcccagcacttcgggaggcccaggtgggcggatcacttgaggccagaagttcgaggccagcctgaccaacatagcaaaaccccatctctactaaaaatacaaaaaaattagccaggcgtagt

SEQ ID NO: 38114 - DNA, 3274 bp, Homo sapiens
acctgaaattctgttacacatgtgattttgtatgctaattaaaaatttccaacataagtgaaaattcttttaatgcacgatttttaaataactgcagaatattccaatatatggctatgctttgatttatttaaccaatctgtaattaagatatttttaagtcatatattttggaaatgtactttaaaatacctaataaaaaataataccatgaaaatgttaacatttgatgaaactaggtggtgggtatagggatgctcattgtgttattgtttatactttctatacttaaaatatctcatggtaaaatgtatgttcaaaaattcagtgccattcatttctgaaatatccaacttcaagtgtccatagttccacagtcatctccatcagtcttcttcttcctcctccactttcaactctttctataaccaaaccttctcatctcagtaccaggattcatgatgcataattctttactcaattgcattttttaattttttatttccctcctagaattataataatattgctttctattattttcattataaatgcaaaatctttaataatgacttaaatagatgtttgtggactcaccaggcactgtgactactgatcatttactcatttagtatttactgaggtctaactacaggcaaaaaattttccatgtttgtatctatggcgactgcccaccagtcaggagattgcctgttaaattgccttctaatgacttgaaagatttaatgttcctcaatatactgaactccctgaagcttactggctgcagtggtttagctgatgcagtgaatgttttctagaaactttaatgagctttgaaagaggatttatttacttatgcatccaagttgtttcagcacagtgtgatcgagacttcagctgcaagtcattttagcattcattggatttgggtttatgaattactaagggacttaggaagcaacagcagccggttgaggtccacatggatattttcatttgtgtgactagctcgacccatcaatccttctaactgggctgttttgaggacatccagtctctgaagggattcaggagcacatcctgtccccaggtgacttatgatgtcctgggggtggcagcatatttgtttggttagcaaggtttgcctgcctctctgctctctagtttgcgtcaataatgtgctgaaatgaattatcatgagccaggttggctttgtcatctcaaggtgatcctggtactccaaaggtctaactgtcccctttatctcctagacctccctttttagtgagtaaacccaatcatacatgctcaggtcagttttcagttgcaaaaacaacttcgttattggtataaggcagactgaatggtagtgccaactgcccagctccaccatctatcagccacaaggcctaagtaagttagcttctatctgccttagttttcttctccataaaatgagggtagtaaaagtgcgcatctcacaaaaaattaaactagttaataattataaaattcttataacagcttgggcacataataagttctcagtcaatgttaattataattgtgagagtataacttctttttctattctctacaaaccccacatatagaaggagatcaacaatatgttaatttgaactgaacagaaatgagggtgggaggagggtgaggatcaaaaatctacctattgggtacaatggttattacctgggtgataaaataatctgtatgccaagcccctgtgacatgcaatttacctatataaccaacctgcacatgtacccttaacataaaagttaacaaaaaaataaaaaggaaaaattttaaaaagaaaagaaccaccagaggcacatagaataaacttgtatccaaatgaggagtcaaatcccactgagataccatgaccatgcacctttgccaaacccaaaccatcccaagaggtcaatattttctttccaacaggcacctattatcagaaaccaattagcttctctctctttaaaaggcttatatctcttctgctacccaagacctgttgaattaaaagtcctttcttcaacttacccttttcctgacacttccagaatcccttgttgtcccagaattgcttttccattttaaaaatgcttatgtacacaagtcacattgcatcagcctggttagcacaaacatttatgtatgagggtaggatgaatcactccagaacctcaatatatgtggtgaggaattattctaagggaaatctcttttgaatcttgacgagcactaatattcaatgcctgttgaggagacttcttttaattaaactttttgttgcataaaggtcattccatccagatggtatttccatttctcagaaggccctggagcatgcctatgacattcatgtcagtgcctgtctggctaaggcactgacctcttccatttctgaggtcatctcactcacagccaactgttcagagactcatctgggcttctggggatgggtgaatgcctgtagaccccagggattccacccagtgctgggctctgagtaaccaggtggcttgggtcaggccagccagccccagcccagcactgagcctctggctccagcacatcacttcttcactttccacaaactctggtttccaagtggggaaaaggagggggcactctcgccctgactccaaggatacaatctcagcagtccttccaaaagtgtagaccaagtaggagccagaaggagccaaatgtaggggaaattttcccctacatttcagctgtgggattagtccttgagcattttgctgtcagccaaaacatttgaatgatggatatttcctgacgcttgttttaccagatgatatattaagttcatcaacctcaatggtaaatctaccaaccccctttgttaattccaagtgtcccttttattttctaagcaggagaagtttgtcaatatctcttctatatagatcataaaacaacttaaaaagcattttagtttatttgtgcagaccaatatagactcagagaaaagcagtttccccaaaacagtacctggtatctgctcactcatcaaagtaaccctctctctctctctcattgcttctttgaaggcagccgaaaggctgaagtgttccctgttcgtgcatccctgggacatgcagatggatggacgaatggccaaatactggctcccttggcttgtaggtttgtgtctgtgtggggtctggaacagaggaccaactcttgggtttttccaatcatctatggaaacctatta

SEQ ID NO: 38115 - DNA, 1371 bp, Homo sapiens
agtgaccagccccgggcagaatgagcatcctgtgaagcctagctccgcagcctacagagtcaggcttccccagaaggtgcagggcacagctgtggagcggtcagatttctgagtcatggtctgaaaagcagtcaatggcaatgtagcttggactggctcctcagggatgaaggcattagacatggaccagctgcttctcctaggagcacaaagcacttgaaataattcattttaatccagttattttcaatctcagctaccagaggcagcaaagattttgcaggaatgaccataatgatagttaatatttagtgagcccttactaaatgccaggtgctgtctgccaatcctcaaaacaactcactggcaggaactcaccattttacagatgaggaaattgagagagagacagctaatatttttgttgagcacctccattgtgaagttctgtccgggaacttggccgacatcattatttgcaaggctccacaacagtcttgcaaaatgggcaacacagacgtcatcttacagatgaaatgtgggctcagagccattagataacttgccagaggccaggaggcagaaaactggaggagctagggtccagcttggacttggcacactccatctgtcccactgcatcccaaactgaagtcgggggaattagggcaaaaaccaagtcctctggctcctcaatctctctagccattagatgactctcccttcaagtggcaagtaggaagtttcacgtggttctccttgccaaagtaatgtcctatataatacagccaaactatgccagggtacaagggcctcaagtttctttgcactgacaattccccagccactaacatcactgaattcttcttggtggggtgatcatccctgaaccttgtgactatttcctctttcaggaatgccagcagagaccaccatagccatttgctccatgatcatgggtggagtatttgagaagtttcccaaactgaaagtgtgtttcgcacatggtggtaagaccctatctttattagtcagctcaggctgtcacaacaaaatcccacagatggggtgactgtaagaaaacagaaatttattttctcacagtcctggaggctagaagtccaagatcaaggtgctggcagggttggtttctagtgagggctctcttcctagcttgcacatggccaccttcctcacatggcctttggtttctcctccttttcttacaaggacatcagtacaccagtcctgttggattaaggccccaccttatgacctcatgtaaccttaattatctccttaaaggtcctttctccaagcacagtcacatttggcattagggcttcagcatatgagttttgaaggaattca

SEQ ID NO: 38116 - DNA, 3078 bp, Homo sapiens
gagtttttatcatgaatggatgttgaggatgggcacttcttttatttgtgtgtgtgtgtgacaggatctcactctgtcacccaggctggggtgcaacctcacctctcaggttgaagcgatactcccaaggagctaggactacagacgccaccacatccagctaattttttaaaaaacttttgtagaggtggggtctcattatgttgcccaggctggtctagaacactttggcctcccaaagtgctgggattacagccgggaaacactgcacctggccaagggtttgcacttttaaaatgttgctttaaatcaatctattccagaaattgtaagcaacataaaacgtaaagcaagggaagtgagtatgaaatagcaactgttacaaaaactgcctactataatcaatattcttgtgcaatgcagtatgctgagcgtgggagccccataacaatcacttgcctccatggtctttggcaaatagatattactttattttttattttcgagacaaggtcttgcactatcgcccaagctggggtgcagcagcgagatctagctcaccgcagcctccacctcctgggctcaagccatcctcccacttcagcctcgggagtagctgggactacaggcgcgccaccaaacctggctaatttttgtatttttggtagagacggggtatcgccatgttgcccttgccctcgaactcctgacctcaagtgatcggcccactggacctccccaagtgctgagattacaggcgtgagccaccgtgcccggcctccaaatagttaagactttaaacttagaaaccctattcacaacacaaactccgagtgaagctcagtggcattttcttacaggaagaaatacaggagttaatcaacaggtatgtgggatgttcccacatcaaatcctaaagataaaattttaactcagttcctcctgcactatctgattctccccaaccttgtctcgcagaaaccacagcgcagcctgaaaacacgccccgtctagattcaacacctcatttagaaattcaatttctcgttgctagttggatagcgtttgccaagtaatttgaaaaaataaaaataaaccaagtggtctgggatttaaacaagataatgtagggtgaaaaaagcactcaggtgcggacagccatggagcgtgacttcctgtgcactctttccccgccagctcaacgccagagccgcgcgctaggcggagactgttggtggcggaggccggagtcgcacgcctacgagactgcgcggacccgcccaaaaggaaaatggaagtagtggcgtgaggctgcgacagtgaaggttatttttctctttttaaagggccgctagacctcccgtctaaaggaagcgcccgacgggcctccgaagtacacgcccaggcccccacagcgcagccgcccgaccgcctctcttcacaccggccagagtccaccctctcccactttcccctcccctcccctccccgccccttccctccccaccccttcgccccgccaaccctagacccggcatgcgctgcgccgaccttttccttccgagccgacctctccaccttcggcgcctcccaatgacaagcggcgcggagcattgtggtcccgtgcgcaagagcgaggccgagggcagaaaaagaaagcaaaagactagggcgagtcggtagagcgggccccgcgcatgcgcaagggcggaggcggtggtgaaaaagggtggtgcgtggtctacggcgagcggagtggggcggggtcgcgcgccttggcggggagtccgcgagccaggaggggcggggggtgaatgaaggagcgggcggaggaggaagtgtcatggcgtcgggccgtggagcttcttctcgctggttctttactcgggaacagctggagaacacgccgagccgccgctgcggagtggaggcggataaagagctctcgtgccgccagcaggcggccaacctcatccaggagatgggacagcgtctcaatgtgtatccttttctgttcgccgccgctcacgccctgtttcccttgcccggtcgccgggcctggtgccccgcgaacatggcgccgccggcctcggccttcgctgggcctcggcgccgcggtcagggaagtaatgttccggctcgggcagtcgcgaggggtcagcagaggaagggaggaggagataggaccccaggaatgcgggccaggagcctgcgttgtgtaatctgtttggggcagcgcgtggtggtggcggcgggggttgggagtgtggctcaggcgaaagaggaattttagggattattgcagaaaaggggcggctccctggacttgtccctgaccccgaagggtttgagaggtaggagggttagcgatgctgaaaggcctaagtgtttgccgcagcctttcccggctctcgtcgccggcttgatggcggctctcttctaccttgggagcgtactggagttctttatgttcttggcgtggttttgtatgggtgtgtgcgcgcgcgtttcaactgtttcattttgagtttagttagtcgtagccattgataaatagttccagggccctcagcgctgttagagtgaaaagatcagcagttcttattcccatttatttggcgtcaagcctattctcttcctgccgccccaccccccgcgggcatttatttctttatttccagtttggggtttggatttgaatgggaggtattggaaaagaacctgggaattttccatcaaaattgttctgggaatgagatcttgcttttgtcagatatttcctaaatattacgttccagctctcagcttacaataaacactgcgattgtttatatgcacaggttttatatgcaccattctttcaccaaattcaacaaaaatgtaagtactagttgtctgtttttactgtccgcaaatttgagggtaaatcgatacgcagaaaaaaagttggtcattgcgttgttggatttagtgttctgaattaacggtaaacgtatatcacgtgataaatattttgcttcagatgcggtgtttttgtgtttttaaaatttatgatgaattaaactgcaaggcactgtt

SEQ ID NO: 38117 - DNA, 2397 bp, Homo sapiens
attttggtttgataggctcacacttggcaaatgccaattaacaaatgggcattttgacttattccacttcctttgtcagtttgttacctctcttgtctttcctctactttccttttcttattctaagaccttctttctataagcctgtagtaaggttatacaactatcccttctcctgaactatagccttagcaagaaagttccaatttctgagctgtaatagtctgactagagcttgctgaatatttattaatgaagtccgtttcaaggcactgaaaatagttatcctagtgttagtcagggattggataggggggtgtttagggcaatgggagaaatggcatcactagcctatagaacctaaagatgaaacacaagaacaggttagaatgaacctgttggtaatagtaagtgaaaagcaaacttggaatccttttctttgcttctgttggggttttcctggattgggagatttaatgttgaagagtaatcagatagctttggctagttcttaaatacaaatacacccacaaagtgtttgcacaggattaattattaatattaagagaataaggactagaatgattcattgaaactgaatacagccatcttgggtgacttagaaattacccagactttttgttaactcagcctgaccttgcctccgctatcaaggttgaagccagcagcggagagtgaagaatatcagcagtaagggtatcaggagcagagaggggagacagcagccaggagtgggcaggaggagaaaaaatggagaaggaagggagtcagatcaagaagtaggaatggaaacaaaaaggaataaaaaagagaaggagtgaaaggaatatggatgtaaatcactgaagtaatgtcaaatatcataaattcagtgtttggatatgcttgcttagactgcagcaggaccctccaagaattaagtttacctgtgaaaggaagaaggtgagcaagagagaagggaatttaaaaaatacacttgttaaattgttttttaaatttaaaatcaacattaacatgcacaattttaaaaatttttcaacataataataatatttgagtcatattactagggagcactattctaagtcctgtgtatattggttcatttaatcctcacacaactttacaagcaggtactattaatatttctcccattttacagatgcagaaactgagccacaaagagaataagtaaattgtctaggctagtcagatcacagagccaagattccacttgaggcagcatggctatggctggctctgtcatctctacctccccgtctccatgatttgtatgatatatttctatagagaaattccacaaatatctatttgtctcattttgagaatgttacatttccttgaaatagttatatatctgctagagtaacaaactcatgacactattcagagttcaaacaattctaaacactattcgcatcaacttccttttacttttttccctttaatttgagaacgtttattaaactaggtccaaaatacaaaaataaatagtgcatggtccctgtcctcagtgaactgaatctcagtttgtaattgtttgattacttgaaccaaaccagctgtactcctccaatactagtgtgaattatttggcttgaaccaagcttgcatgtgccagtgaatgtttgttggcttcaaaagtatgctcacctttaaaagctttggaccaactagtaatatttctgttacccaaaacatttggaattcttttaagcctcacaacaaaatcaccttccatacaaaaagcagtagtacctagtttgatcaccttccttaatcatccttgaaattaaagcctcacatggatactcacaaaatatttatctaaaaaggtgttttgttttgtttttacagccttgatggaggaaaatatttgcaggttatagagaaggaaatgtgaatggaattagtggatttcaccaggaactttggaagagtgttgggaattagtgtttagctggaaagtatttcttgatcagtgtctttcaggcaagtaagagaaattctggatcatctgacaggaaggaagtttaagtactaaattcggtctaatttgacttttgacctgagcctctattgcttcactctgacaaatagttttagcatttgaaggcttgattaaccattcccctgttagacatgaataatgacaataaatgagagattgtgggaaactgagagtgtcttcattttcttgaatgtcttatgtgggcatcagctctcagatttttatagtggcatttggaatactttgaatttaatattagtgccactatatattatacatattcattcaacaaattgaacaacagccacatagtgctaaatcctaggaacacaaataaagaactc

SEQ ID NO: 38118 - DNA, 1769 bp, Homo sapiens
aaaaaaaaaaaaaaaaaatgaagcgtttgttgaacaccatgttgctcttcccagaaaccaggtaactagtatgattttatttcaggacaatcaactgagcaacttcttgcagggtcaggggcagagggtagaagtggtattacagcacctagtttattgccttacaatcaataaatagagggtgaatgaaaagaaacccaatagttaaagtgtaagctaattggtactaactacaaatatgggttgaatgaaaacaaacccaacatgctttaggttttttaatacaatcttatccacatgagtttagggtcttgtcctatcaccttggcttctgttccctttctgtattcatcacaggaaattttcaagttttatgaaaccagctagagcggagttttattaaccagctgagggcggactaaagacttaacagacctgggcgaagaagcagcactcctacttactagggcaagactcatgaacagggggcgggggctccgggggcggggacgcgccccgttctctttcgctcttcttcccggcagccttagcgccaggcccggcgctcctcaagatggctgccgacagtgaggtgatttctttgctccctacttaatccttgtcactatctaaattcgttcctcatgtcttcgccttggggcttaatttctttttctctccttccccttcccgcagcccgaatccgaggtatttgagatcacggacttcaccactgcctcggaatgggaaaggtgagtgaatcgcatttttggttaccagctcccatgggccctggcgtcccctagccgcttccctgaccccagacacaccacaagtgacgccacttgtgcgggaacggtaataccgtgggtcccgggtctcctcccccagtcttctttggtcaaccgcaagcctcttccgcgtctcgcgtctggcaacacccggcccgcccccgtcagccaatccctgaggctcaggctctcagaaagttttgttttctctcctgtcagaccgcttcccttagactttggttttctggttgttacccactcgcaagaaaaatttccgaggctgcaacaaccgttccggttttcattaccgtttaactcattatcgtaagcagtaaacttggtaggttgtgccgcacctcatcccgtgtacgttggtatacccttttcaggaggaagtctttcttcagagtattggtagttgtccatctgtcacactcccaccatctccatgctgtctttaattttttatttttatttatttttggagacagagtctcagtctgtccgcccaggccggagtgcagtggcgaggtcatagcttactgcggcctcgaactcctaggctcaagtgaagctcccgctttagcctcgggaggagctgggaccacaggcacgcgctattacgcccaactaattttttaaagatctcgctgtgttgcccaggctagtcttgaactcctgggctcaagcctgggccgcccaaagtgctgagattacaggcgtgagcctccgcccatcctgtcttttagaataacctttttaaaaagtctgcatatggttttggaatgctttgatttaagttgttacattaaagtgggtactgtgcccaggcttcctgtgcctgtcaaattcagatgaacagctgtctgggtgaaactgttctattactgaaattagttgaaagccaagtttgtggaggagtgatagcttagatcgagaaggtttctgttaagtgtcacagaaacccttcagtttcct

SEQ ID NO: 38119 - DNA, 701 bp, Homo sapiens
agaattaagcaagtaagtttggctttgaaggattacaaataaaggaaaatctgttgattagagggtagtattttggatttactctagattttggagtcaaaacaagtggtttaaaattttattttttctacttgctagttagttgccccatctaagcttgagttatctcagttgtaaaatgaagtaatactacctggagggctaagtgaagatttaatgagaaattgtacataagcaagtatctcagtacctgacccatgccaggtactcaataaatggtgtctataattgttaataggtcaaatcatccaaaatcttctgtccttagataaactagtgcataacagtgagtgagcaagatactgaataaacatgaactttggagctgccagtcaaatatccttcttcattcactaagcaaataaataggtagaatgtgttaaattttttctgatcataacagattatcatttgtaagctcagacctgaaaaaatctgtgctttttcttgtgtaggaatagaattttgttaccttttctgttacgtatattcttcttagaaacaaaacaattagataacatatgcattcagattcataaaccagggcagataacattaaccatatatacatatatgtaaggcagttatacagcaaaagaaaataattaagccagaatgtgaatatgagaactttaagagga

SEQ ID NO: 38120 - DNA, 2778 bp, Homo sapiens
tgggaggccaaggtgggcggatcacgaggtcaggagatcgagaccatcctggccaacatggtgaaaccccgtctctactaaaaatacaaaaaattagctgggctgagtggcgcgcgcctgtaatcccagctactccggaggctgagacaggagaatggcgtgaatcagtgagccaagatcccaccactgcactccagcctggggacagagcaagactccgtctcaaaaaaaaaaaaaaaaagtgtgtctgtaaatgtagttcagaacttcggagccctgtctttacagttcaaactgaccacgcgaagactaaaggcagtagaggtactttctacaaatttagccgtgcaatctaatagcgagcaggccgagacgcccgcgattgaaggccggggtggagaaagtaataagggccctggaaattacccccatcccatgtcacccactctttcttaaaatgccattaaattccgttcaactttttatctcccatgcaagaaactagcgacttgccagccacgccacttccagccagtcacacctggcgtattcgccgcagaatctccaactcccgccacaggtttgggacgtgtccgcccctaagcggaagtgacgttcaacgggacaacgtgaaagtagatgagtttaaatacgtactaataatttaaaacccctatggtattttgaggaaactcttccggctacccttcttccatcacttctctcccgttagggttgcgaaaagggctctgtacagcctcgcgacaactcgttctccgccctaatttcaagtcattcaaaactctgtcccttttcattggctgaagcggcggcatgggtacctctcaggaactacaattccagccaagcaccgcgacaagtgaacggaggagaagttatgagtaggggaaaagcatgttgggaatcgtagtccgctccaggccgaaaagagcaatcaccccgccctccgccactgaagctggagaaaccaggtgttcgtttcagaacccgttagcgctaaggggaggagccaaccccttaagcagcatgcctcacttcgccccacatggaggataattttcctttacccctaaaaagcactataaatacccactgaggagatctggttgtcttttaaatacctcgagtcagtaaaaactcacgaaactccgcacctcaggctccaactcgtgggaaaaggtagctcttttacaagtgggcaaaatggctgtcctcctagttttaccattggttggcttttgcgtccttcaagggcggttacttaccacggattggttctttttctcttgaggttggaggaagatttggcacggctctccgcggcctgggaggaggtaaaggggtggagagaagacagtttttttcaagcttgattgggcaaaactcatgtcactccggggacgtacaacctatgaatagtcggctgccgctcaaagagaacgaagaggcggggctagtgcgtggtgggaaggggcgggattctgccagccgcggctgccgctggagccggtgtccgggctggtgatggggttaattccctttcgtaagactcttacttgcacccacccagccccgccgtcgccccgccgcgccgcgctccaaccgcctcctcctcctcagtaacgcgggtaagagatgcccttccctcccccgtccagctccccgggaataacgcgccttgctcccctcccccgcccgccaaccggtagcgctaacggagaaggaggcaggcaggggagagatgtggtgtgtggaaaggtggccttccccgccgggtcgtcggcgcttcagccagggccttctgacgtcccgctgctgccagcccgccgttaggtcgggttccgagtgagccaggctcgcctggcccgcggctgcggctccggctgcagctgcagccactgccttgtgcccaccgcccccacccgggggccatgtgaaaagcaaacccctcgaggcctagcggaggaggcaggggaaaggtttccgagtccctgccatggctgctgctgctgcctccgcggctgctcttgcagccccagggactcgggagccagccacagcaggcctgccaagagcgtggtactgctctctcgtgtggctggcgccggtgccccgggctcccccggccgccccacggccgcatcccctggccttgcaccaagagaattttcagcttcgaccggttggtaaaatgtaggtacattttccctgtggtaccagaaaaagcacaatgggaatattaaaaagaaagttgaatgactgtcagtgccacggtcccccgggatcagatttacacacgttttgattcctgagccttaggctgccaacaaatctttgtgggctttgaagttttttggtgttttgttttcttttgttgctgtgactaggtgcaaagggtgactctgttgagcttgtttttataaagaaacttaaattattgggactatcatgctccgtgtgtaattgtcctgggatagttaagtaaaaggtgaagaagaggtgctttccaaattaggattagtgaacagcaaatggtttttctaataaaattttctaaatatatatatatatatcttcatggttatagtttacctaattgtaactgtaagaaaccttttttagcttaaatatcattgatgacaaaaacttttaaatgaaaagatgattaaagtcaaactgaaagtctacccatttataatatgtgaaacaagatcttctaagtaataggataccagtctgacaggaataattggacac

SEQ ID NO: 38121 - DNA, 1104 bp, Homo sapiens
cttaggttattcacatatatcatttgatatttgaactataaaaactacctaggagttcaatgagattttctctaaagccatttaatatattgttatatttcatatttcaaaagaataattccagttttataatagaatgatagtcacaggagtattgattcaattaatttgttgaagctgagaatgtattttgggaggtgaaattttatataattgtaattttccaagggccacaaccttgtgtttgtcctctagatcacagtggaacttgcaacatttctgtggaagaaagatgagtccactataaaatgtattgctaagatttcataatcgttactttaggtcacaactttgacttctataaaagaacatctcttttctaacctgttccagttaatgttagcaaacctgtgccctactgtaatttaaaattaatggatgcactttgaagtagtctgtaagtttttagctaattgaatgacaaaatattttattactttcaggtataacaccaaactaggtaccataggagtagcataagatacggcactgcactttccttgtcccagcattttttcgtaggtttagacgaggcagtacaggctttgggtctaactgacctgagctccaactatggcttaatcatatgcctgcctttgaccttgcatatttgcttaagccatttgaacctcggtttgttcaataatatttatatcagtaactaacttctgagtgtttactgttttatgtgttactgacattttcatttcatcttcagaacaaccctaagaagtaggtacactatataattcccattttacaaataaagaaaccgggaaagagaaaggttaagtaacttgtgcaagtcataaagcagctaaagtgctaaagctcaacctttgaatccaagcggactgactccagagccaacattgtatttgatatggcctctcaaccataacatggaatagttagtattttctcatgagattattgtgaggactaaatgagactgcataagcatctatggatggcactaaaaagtggtaacttattttatttcttttcataaaatgttatgtttaacttctttgctaatattgt

SEQ ID NO: 38122 - DNA, 2374 bp, Homo sapiens
ctattctctgctttgtgttactttaaaaagtagctgtggcaatagcctaacgcgttttgaagttttgaaatgatctctatccagtgtctaggaaattgctgaaggcctgcgttctaccaattcctccgcttaggcacatggactacaggttattaaagaaggtgacttgcggtttttatcccgtttttctgcaaggttgggctacgttcagaagaaatcaaagcctcggagttaatcccgacaaagcccatttagttccatgcgaggactatttcctccacactgagagtctcaacgaggccgagaatagcatatgccagttggagtgacacttatttctccctctcccctttatagaatgtgtagtggccctcactactgccccctttagctgtgcctcagaacccacagttacatgctccacaatatggaggcgaataagcctaagtggactacaattcccatcatgcctcactgcaggcgccgccgacgtgtcttagcggttagtcatccctcttaccgctttcctccacttcctggactgcgcgaccggaggcctagcgggcgcgcgcccgcaccatcgactcgccaacgagagaaggtcctggggcacggacaccgacgggttgcgactgtgacgtgaggtgttctcgcgcgcgctagcgcgcgtctccgggtgccgctgacgggcgtgcgcgcttgtgcggagccggaggtgggggccgaaccagccaaggttgcgggggccgcagagccggacgaagacggagggcggagccggcttcgggactgcggagactacacaccgagcgagcgcctgggcccgaagggagcgatgctgtggttccagggcgccattccggccgccatcgcgacggccaaaaggagcggcgcggtcttcgtggtgttcgtggcaggtgaaggaggcaggggttcgagaggcggccgggacacccctccggcctaccttcatcctcttgtatacctcagccgccggcccgccctccccgagacgcgggctcctgtcggctcgcacaattgccactactaccccgcgccccagggacggctgcgactccgccgccagatcccccagaggggccatgcagaccctcagcgccctgctccttcaggccccgggcgcccccagcctttcctcagtgtctgcgaggcccgggctgccggcccgtggctgttcagcgcctccccggttcgtttgagatacagtgggcctggccccaccgctgcgtctcccggcagccgggccggaggcaccgtctggccctggtctccaaagcgccccgaggcccgccgaaatctccccgctcggggcgacggacgcggccagcaggccccagccgcccagccccgctcgtcgccccgagcctctcccctgcgcagccagacccccgcgaccctctccctgacgtccctctctgtcaccaaggaccctctttgtgctgcttgaacgcccgtttcgttactgctgtttagatggaggtaggaacgggccattaggcaagcagttgggttgtaattagttgtggactgtcgggaagaaagctgtgtcatcgataagcaacaaagagaaaccacctgatgttcacggttactggtgttagtacgttcctgaaacgtaaacttttgagctgaatagaggtttaatttttctttatggcagtcttggtaggggatctagtgtgaaataatgtaagtttaaaaaaaatccattagtttcaaagaaaatagacgttcagtccttggtttcttccctttgttgtcttcttaggctaaaatctacacgactttgagaacgtttattaactcatatattctctgttgctctaggctattttgctccatattctcctgttttattactgaaatcttgtagatttacagtgaactccctgcctctacggttctgctcatactcattacatggaccaaatcaatgtttgtggctgttgttaatttgaggtgtatttcttcaactatttgtgtttaataacggtttattcataattaactcgtcttttaatagctctataactttatgcactgcagtgaagaacgaattactgaaatgtgaatgtcatttagcattaaatttggaatttataattgttttgttacgccaagtttttagctcaatgctgtttattagaagagcttgaatagtttagattctgtgatgctgtctgggggttatattatactttacataaattaattctgtaatcccgtaaggaaaaaaatggattgaaaatgaaaggaaaagtaaatgacactatgcttattgtgtacattagtaggtttttgacattttaaattgtttttctcctaatatctcagttgatccttgcagtaaata

SEQ ID NO: 38123 - DNA, 558 bp, Homo sapiens
gccagtaacgcaaaatgttaaacatagtgttatcataggacccaggagttctacagcagcagtttatacagcagtttatatccaagagaattgaaaacgtcaacacaaaaacctgtacatgagtatagcagcattagtcaaaatagctaaaatgtggtaataacccaaatgtccagcaactgaagaatgtgtaaactgtatctcatacaacaatgtttttcagcaataggaataagaactgatacctgcaacaacatggatgaaccttgaaaatacaatttccatgaaaaaagcaagttacaaaggtcacatactgtatgattctattacacaacatgcccaaaatagacaaatccgtagagatagtagattagtggttgccagggtctggaggagggagggatggggagtgactgctgatggggttggagttcctttttggcatgatgaaaatgttctggaattagataatgttgatagttgcacaattctgaatatatttaaaaatcactgaactgtacactttaaaaggcttaatttttgtttgtttgagatgga

SEQ ID NO: 38124 - DNA, 976 bp, Homo sapiens
aaaggaaaggaaggccagagggaaaggggagcaagggacccagaagaagggatatggtgagctactctctgcagggcagggctccgccccccagcagctttcaaaccacagttgacgcagaaactttcatcagcacaagaggcgagggtggcccgtgccctgcgaacccccagcaccatgctcccggctgcgtggcccagcagggcaccgacgagattcaatggcacttcggcctcccactcgacctggccgcacccagcggcccagttactatactcagcgagcccaggtttccgcgccggtcaccgagggctgtgcaaataccaggctcgcggggtggtgagcatcaagtgacagaagcaaagcgctgagcactgggcacgagcgtcttagggctcgagatgggttttactccagaaaaacccagcctgtcccaggctcctcgcggccgccgggctcggagcctaaagttggggggcgggcggggaggcgcttcccggacgcgcgacccccaggttccggaacacccgccgcccacacggcaccgcctggcccagacgccgcaggctccggaggcgggcgaggcccggggcgctcgccgacttactcctccaagaagtccaggaacagtttctggcacttctcggccacctcgtcgcggacctccaggtgctggctgccggcgcccggctccgctgccgccgcgaggtccatatttgcttagtgccgaggattcgcctgcgccacgctcgaccgccacaagtcgcttttttccagacgctgcagctttgcgcgcgccgccgccgcttccgccccgccccctcttccgacctgcacggccggaaccaatcgtgacacaggagctggagatttcgcgccaaacctgaccaatgaacggcgcctctccaagagccccagcccacggaaagggatttcgcgccaaatgcaaagcccttctggagaaagcccatctgcc

SEQ ID NO: 38125 - DNA, 1952 bp, Homo sapiens
tatacaaagttatatttagcccaggagaattaatcccacaaacgatctgaaaatttctgacagcagattttagacccgttttttttcttagcacacctttagcattatccaaattttcaatacagatgttgcagtggacaggactgaaaatagaagctgtttttcctctaacagataaataccctgttccaacaaagaggtataaaatgtaggtgcaactgttcaaggagttgcaatacacaacagtataatggccttgcctacattcaccaacttatccatatggatgctcaaggggtatccacatgcacacctctctttgggcctcaactacagacaatatacactcctatcacagcacctgtataccctgcctctgcatgcagttgtttatctcccttgccctctcccaaaattaagcttctcctaagatatatatgacacacataaatctttgcatactcaagcccagcagagtacctggaccagagcacgtgctaaatacaagtttgtaaaaatcaatgagacttcttctgagtattattttggtattttccagatctaatagttaatgtaggctgggtacagtggctcatgcctgtaatctcagcactttgggaggccagggcgggtggatcacttgaggtcaggagtttgagagcagcctggccaacatggtgaaaccccgtctccactaaaagtacacaaaaaaaatttagctgggcgtggtagcgtgtgcctgtagtcctagatactcgggaggctgaggtagagaatcgctttaacctgggaggcagaggctgcagagagtcaagattgtgccactgcattccagcctaggtgacaaagcgagactccgtctcccgtctccaaaaaaaaaaaaaaagttaatgtagcaaactgaaattttaacctaccaactagtaaaacacctattttaggtgaaagatctagaaaggaaagaaaataaacaaacttgtaggtagctaggtgactcattagagaatgagaaacatacttgtgactcatcagctaccaataaatcatttaaccacaatgactaatataaagaaaaataaaataaaatatatatgtatacacataatggtactaaaaaaggcttattttcagaatcagaatacctctatgtttggggagagtgggaagtattatataagcacaaacagcgatatataaattttaactttaaaactacttttcacattaattgtagtcctttatagtgggcactgtaactttaaactttaaaaacttgtgtttacactcactgtcctctctaacagtcaatacaaaaaggcctccaggacttcctttaaaaaaaaactggctttataacacttaaccaaaactaacacaaactactctgttaattactttaaaatggcacacatacaaaaaaattttttttaaaagaataaagggataatatctcaacttcaggatcaactattaaatattagataagatggggatccagaaatacaggcctggatagatgggtattgcatcttcctgcttctagacaaatttcatttaaaaacctcaaaccatttcagatatataattaagaacctgttcctagaacctctagggaattagatgtgccaaccttcctatgtaactcattcaattgcttcatttttatatgcattcatccatgagaaaattgatctttccaacaaattgattaaaataatgtgtgaagagtcctgtggcacttaaatccaattagtgaatcaactttttagattactctattgatgaattggatattcctaagacagacaatttgaggcaaaatagttggctccgtattaaattccaatgtttcttttaaggaaaatactccaaagctagaaactgctagtagtattgtctagccagtaaggcaaaagataagcacttcagatttaatatctaaagtaaatgct

SEQ ID NO: 38126 - DNA, 2478 bp, Homo sapiens
tttgtaaaacatcatcaaaaaattcaccagcttcctgtttctaaaaaccagattcaggataccaggttacaggagtttgacactgacaatataataatatcaaatttcttgttacagattagagttaggaacaggaaacagaagacctagggtccaatctgttaacaaaatatacttattaaatagataagtggcctttatttcaatcttactttacctctaaaatgatctaagattcttctagctataaaatggcataactctgccacaatgtctaccttgtatctagacctatactatctgtaagggtacactgatagtttatgtaattaagcagattaagagtacacaaaaataattgccctagtttttacaaggtaacttaagatctgtatgaaacaattaagtttctgtcactttacagctacctgttggaatcctctcctttagagcaggagggtgctggattttgtgtttacaccaaaataaaaccagacatgtttaaggcgcttactgaacaatttaaagaaaaagataaccctggccagagtagagagatacagtcacacaatgaagcctgagggcaacagaaggagattaaattgtgtgaaggacaaaaaagttgcattcataattagtactattaatatttcagtgactcttcctcatttagtattctaagatgaccttacttctcatgttgcttaccacaaactcagaactccttatagaaaaattagggagccagacggaaattaaggcttaacagtactacagcacacataacttgtaggatggtttcaaactttgatttctgaaaagcaccgaaggatcactgggtgttatgaattatccacgtgatttggggtcacttcacctcaaatgcattctcggtaactcctattacctaccttaccgggtcactgagagggagaaagtaaataaaaatgacatgtgttctttaaagctgtcacatgggaaatggtcattaaacatattggcagatggttttgctaagtactgtcattacttgctaaagcattaggaacacgagggctgagtacatatcgattactagtgcttattaaaattttcccagggattgtgcattacgtgcaggacgtgcctaacccagagagactcaagtgtgacgccgcgctcctacttccggggcggctggttcttcccgtcctccccaccccggggacacgcttctagtaggccaaactcccaggtgacccccgcaagaaacgcggtccggagagggtctggccccactgctggggcaagggctctaggcgcccggaccccacgcccgcagcctgcggagaacgtgccgacaaggacctgtagggccccactccccctcctccctccctcggcgcagcccggcccaggggtctgtcctcccaggcccaggaaaggaggaaacccacttccgccgcgtccatgatctcccgcggcttctcctgactcttgcggctggcgctggcgctgggcatcgggacacggaactgggcagtggacaccaccctccctcgcaggcttccgtaaggcaggccaaaggggcttctccctccctcccagtctccgccctcccgaccctggggtctcagcacacgcgctcggactccgcgtggaggtgcggctccagaaagatcgcgagagctgcggctatctcgagatcccggagcgctggcggccgcgcgcagggtctcctcccactcttgccccgcccctccgggagttttcccggagttggagggaattcccgggaattcgcggtagtttcgctggattggctctgggggcgggggcaggggttaccaggtggctggctgtagacctgggcgaatgccagctctcttcagcttcgtcccaactgcgacttctgctccattcttctaacagccctttcaactccgctcggctgtaaccgcagactcgtcactaaaacacccacctaagcgcgggccttggtttctcctctcttggactttcccgccttctctcttcccctgggcgacgtagctgcttggggacggaggaggcctcttcgcaatccattgccctgcttgttgggacagaggagtgcagttggcttgccaaggcagcatgggttaccagtccctgtgtaagtgaggtgtaaatacagtggcaacgacaacaagaaacgcatacaattgcattgattgcctggatctgttgcagtgttagggacagtgcatagtgttggttgcccaatgggcgaatatccccaagttaggcttttttaaaaaactgattttttaaaaaagctatcattcatgagttttgaatcgaaattgaaaataatttggagatttggtttaatactgtttcccctgccagagtttgcactccgtcgtttcaactgacttggtagtgtcttagtctggcacaaagtgttaaggggtgcacatagatcccagcgcaagtgaaaggctctctctggaggct

SEQ ID NO: 38127 - DNA, 519 bp, Homo sapiens
catgtcctaaacaatgtttgaaattactaaatcagtacaatccacacgatgcttccatatttgtaatatggccagactacttacattctttcctgttgttgttattgattgttttgttctagttttgctattgttactgtttggttttctttactatttccttaggggtgagcacagattactggcataatgggagggcatgctgagaatcctgagagtgtaatagcctaggaatgtggttggcaaacgaacaggatcaggtcttcagatatatattaactttgaggcccctctggggcctgtggggaaatatctctgctggcttgagcacctttcaagaatagtgctttaggtttcagcaatctgggagcagtttcatggagaaagaagagtccaatagtgtgtcctcagtctatggagtaactctgccaggagggagaaagcaaggtgaactacagacaactagagtggagtataaacaaaacatgctctttagcaaaaggtgccaagcaggagtgg

SEQ ID NO: 38128 - DNA, 1237 bp, Homo sapiens
aggccatttgtaaactctagcagagactggagttatgctgccacagaccaagaaatgccaagacccatcagaagctgaaagaggcaaggaaggattgcagctttccaaggaagggtgtccctactaacacaccttgattttggacttctgaccttcacaacagtgagagaatacattcttgttgtttaagccacccagtttgtggtactttgttatggtggcctcaggaaactaatacaggaggttttctgtttagcatattataggatattgacttgagtaggagctcagattccacagagagatagttggatgaggtctatgtattaacaccatattgaatacaaactctgtaagtgggaagcattgtttccaggaagagcaaataccacattccaaccatatttatggttgttgagtcagggagattcctgtcaacactaccttatcagcaactgtctggctgagagtaagaataaacttttgcctcttttatatacagattttatgtagttaattaaataaatgttaataaaaaccatattaaagcaatttctaaaaatatcttttttagccacttttttttaggtcttcaatagaataatgaaatccgtgaaaaatcctcaggtcttcagggtttcatcttgatatcttatcattctgtcaaactataggctgagggagaaacattctgcagcttcccttagaagacctgctttcaatctatctttccacagaggcatttttcaggattcctgtgtctagatttcaccctgggaaaaccagggataaaaccatcagtcacattaattgcggcccagggaatgttcagctggcacatgtgactagaccagtggtagaaggcatgcaggacttaggattttacatttctttacatttggcctttacatttcttgttacagacattgtttattaatgtcatttcacacaggaaaaaaatgaagatcaggatatttaagtgaattgctcaagattacacagctagtaaatgacagactcaagtcctgagcccgacatagtcttgccccagggctgtgcgccatgttgcttttctcaaaatgtgcttaagcctatttgcttgatcaccctccttcttgagctctagaagggcaaacaccatctgtctgttgaaaacaaaatgagagtgcctattttttgccagacactgtgagagtaaacagtggtttataatccaagctcaaacagtgtattggct

SEQ ID NO: 38129 - DNA, 2418 bp, Homo sapiens
ggctgatcaagacatgaaaaggttataatttcactactttttatataaacataactgcatattttcacagcattgctttaagacttaagctcctccagctgatcgtaaattgccaggaaatgtctgcccagtctatcacagtgtcttaattaagcaaaggcatagaaattatatgggggcctcggcccatgggactcaccaggtgtaatgaattctgaagaagcagtagttacagatttcccagggcatgctaataataaatactagttaaaggacaacagaaataaaaaagttttttctcttttctaccaatctcttcctttttaaaaagatagcaactattagatctttaagcctcaattttgatgccatttctttccagagaatttcttggtttctcctttccacactccattataggctgtgctaagggactctcctttgcactcctattggtaaacaacattattattgcattattcgcacctgctataattgtcttgttatatatatttgtctccctcagtaagtctgtggcattgccttgcagatgttttattcatcaaaatatcactagaattatagaaaatgtgtggtccttagttatttctcaaaacaaagatcaaataaaacatacaaaaattacctttttaagctcccagaggactttagtaaccacagatgcagagaagttacttattttttgtttttatttttggctatgaacaagccttcagtgagtaaaccttcagttagttcactacctgtttctgccaaactgggaactaaaatatttgcattgtattctctgtgaatgcttgtgtttccaataattcactcctcagagggctttcccaggaggctgggggtggagaggggcccactgataaacagcagatgcccagcaggcctgaggcatgtctgacacatggatgatgaaggagatgggaaaaaaggagcagcagctcctgggatgacatatttaagagcccgaggaggtgcattgctttaaaattactgatcataagaaatagttcctgcaaatggtgtggggtatgtgcccttctgtccatgccaattcagttggtaaacacacagaaacagaattctcgttgagtacttgaagctcatagaaatgtcaacagtaaaaggaatggggcagttggaattcctgtgcaatttgaagctctcacttgaaaatgagagaggaacaaggagccaggagtgaacagatcaggggatcaagcaggaataatatatggttcaatacttgtgtgaagtaagagagaagaaatattcgctaccttagaaaaagtaaagtgcttacttttctgaggtcatggccttccaagaaaagatattttagttgcaataaatgagctctttcttcatgaggctgagagtttggcttccttaatcctgctttaaaaaaaacaaaaaaaaagagagagagagcaagagagagaaataaaatgcacccactgatgttcaaagaggaagagcaaaagcctgaacttgccgtatcaatgattaactacagagttactcgttggaataagatacataggatttgcaccccaagagagggcactgaccctgtttgagaaatatcatttggttaagaattaatttccttccttttagaatttgaaacaacaaaatctattaagcaaaaagtggtaagggagcacaagatgcaggagactttctctgtcccaaaggaccttatagacttgttgagaagattgtatgaataggtgaaagtcaccaaacaatggcatatgtgcttggcatagagtgagcaattggttaatatctatatggattgctgtttagctaatgaagtctgtggtgtatttactagccttaagtacataatgttgactaaactatgctctgctcagacagacaatgaggcctgctctttgtgctgcccctgactcggtcctttacaatgagtccctgtgctccctgtcctcaggagccactgccctttggtctcatgaaacctttcagaccacatcccttctgccctaaccttctcacttaattgtcacaattctagtttatttgccaaaggaaactaatctgtgtgattatgaaagtaagaagtaatatgaagtattataaacaagtgggataaagtgtgatgattttgtatttagatgagaagttgatcagctcgaactacagagggaaggtagtgcccttggagtcagaagtataaattgatgatccaggtctgtctcttctaagtgtgcacccttgagcaactcaccaattcgcaaaacccgtttcctcatgtttgcagagaagggatcccaactgtagcacaggctttgttgggccagtggggtgagcccagctggagtggacagacttaagtccattttgcatgaacaatggcttgtttgaata

SEQ ID NO: 38130 - DNA, 1924 bp, Homo sapiens
tcttagctcagaggttacccatggtgaaaagcatgattcatacctcaagtcaaacttccacatcctagtcctgcgaccagtggcaattcactgttctgggccatggtctcttcatctggaaaatgcgggcaatgcaggttgatggagtattaaagaagttaattgaagatgactataaactataacacagtttacaaatataaggtatgattattataatatccttctcttcttctctctctttagacccacagggttcttgcaaaaaataaaaataaaagagtgaaagcatgcccctctcccacccacacacactttccctatgatccttttctatcagcacattctcctgacttttggaacattccttctcaggtctgaattctttaatcaccataattaatctgaggccttggttctcaaagttggtgtttttctgtttgttttgtttgtttgtttggtgtgtgtgcaaaggaagagaagtcaggaaatcccagcaaaatttaaggaagtgggaaactgaggagaggtgggaagaaggaattagggaggtggaggggacaggttaaacgtcaagtctactgataagcatgtctaatctaaagcgaaactgacacacttgttcaaagtttccaagttgacaatgttcatttttttatttttaaaaatttacatacagtaaaatccattctttttagtgtacagttctaggagttttgacaaatgccactgagatgagaagtcttctcccaatcgaaagtcttttcttgatccaatgtttcgtggtctcaggggcttcaagaaatgaagccatggactgcagcggcgagtgttacagctcaatgagagaaacacgtggatccaaagagtgtgcggcggcaagatttattaaagtgaaagggaaagtaaagcttccacgtggtggaagcggacctggaaggcttgccgtttctggcttgggtgtcttatgcttatatctccttatgatccctccttttttccttttttagtcctgtagaattagcttattttttatccacttgtggattggcgggcctgattagttaaaaacatcaggctgcagctagagcttaaactccctatatgattggttgaagtttcaataccttagcttgcagctatgactcattttggcttaggggcaagtccccttagggaagtccctattgacccaggaagtccagccaacttagccaattagtccctcaccaccattattttcagaatgcagaatggtgctgtctctccatacaaactccctcttgctgttcctttgtagctcaccctcccacagcccttaacccctgaaagtcactgatcttctctggttctctcttggaatttaaaaatttgaaatgaaaattttttacctgagcagcagatgtgatttacctcttacctcagtattgcctgtggtctggatttttgtcgtatgtacttatagtaataaagtttagagaagagctgttgtcttcagagcattcctatcattattttggcaaatgctcttccgtctgggtgctaaaggaaggtcctgagggtagggaggatatattgtgtttgcaaaaatgaacaagatctcatagaaaggccatttttagcacagaattgcaacactggtctaaaattaaaattgcttctccatgagaaacaacctttattaaagtaagtacaaattctttcaggagaatcccagatttgatataatttttaattaaatttctcaaaagctggagctcatttattcttccctctgtctgccacctagcagcaagctgcaacatcctctattcatggggatcttgctttgaattctaatttcaagttgagttttcatacataattttggctcattccaaatttactgaaattattttcttgaatatcatcaatatctactttc

SEQ ID NO: 38131 - DNA, 4004 bp, Homo sapiens
tctctactaaaagtacaaaaattagccaggcgtggtggcgggtgcctgtaatcccagttattcgggaggctaagacaggagaatcacttgagtccaggaagcggaggttgcagtgagtggagatcgcaccattgcactccaggctgggcgacagagcgatactctgtctcaaaaaaaaaaagagagttgggaagtgttttgaatgcttagagggcagcttgggaactcaattagaagaagggacggtttaagcagacatatttctaagagacttatatgagttaactcatttgatcctcagcactcctccatgagttggatgctattattaacaacccaatattagataaaggatgaccttcttaaagacctcttcccaggaaaaagactgtgtgtgggtactctgaagctttggctcttctggtggggacaccactgggtttccaaaggctcatccagccaagcgaagtatctatgacctcgtcgtgttcagcgcgcttagggaaggattctatggactgcacttttaccctggtgtcctgcattcttgctccaagacttctcttaccactctcattcccctaaatgcagcttctgacaccttctagctacgagttcttgggctcctccttcgtgacttccttttaagataatttctgagttacaacaaatcagcatttgaagaaatgcagcagataagttgaaaattcaagtgctgaggaatgtaaaggcccaaaacaatcccgtagaaagcacagaggcagatgacagtcttccgttaaagatttcactgctgtagatttctgagagtgctgtgtagctgtcctctttatcctggtgtttgccacttcgaacagtcactttcccacttggaacttacttgtggctttgctgacaaaacaggaagtgatttgaatacagtttgtttttatgacctttcaacctcaggaatttgaaaagttttagcagtggatttacagccttgcttaatacttctatttcttacaaaacaaccgtataggggttaaagtatcagtgcaaagtcccgttcaaatattgactcagtaatgagctctacaagccagcctttgtggcatgttaaattcaaaacaagcttagcatttttttttttttttttggatagaaactggtgggggtggggaaagaaagagggaactgggaagagaaggaggggaacttaaaccttgcttcctgctctgtctttctcagaaaaccaaatatggcatcttccatgaggagcttgttttctgaccacgggaaatatgttgaatctttccggaggtttctcaaccattccacggaacaccagtgcatgcaggaattcatggacaagaagctgccaggcataataggaaggtaacaaaagggacgttgttgtcaaagggacaagcctcagactggctgtgcgtcagtgatagatgggtctcgctcagcctcgcaggctgggcacagggataagggcgaattactgatagcagctccccgtcgtcccctcctcgctgccctgccctgcctttctcctgcagtgctttggttccacgtttgctttgaacactcaaaggctcccatttgtgttgtatttccagctgcatagagataagcgttaaccatttgaaggcacaaatccatgttcatttgggaaaagataagatgctaatcttcgaactcagatttttcagccctcctccaaattttacatcccaaaaaagtcccaaagggagtctggtatgcttttcattagaatcaaatataaataattgccaaagtacgatttgccctgaggattgagtgcctcagttctcataatatccatttaaattaattttccttatccattgttatagttatcactctcttcctcaaaattgtctttttctttcagcttaatattagcaatgtgttccttaaaaaaagaaccattttcccattatcagtgaaactcactggttcctatccttcttgcagagttcttttttttgggtgattaatgtgttcaatttgtgccagagctgataagcattatgagagtaacagattccacatgctaaagataatcaaatcacctatctgggggtgatttgctgtaactcattctacttcaggaaataataatggaaaactgggaagaaatgactatggatccaatttgcaaacagcaaaggaaagtggtattttatcttttgctgaatttctctattgcaggcctgaaattctttcaccagggcagtacctatgtctgaccagagcaggcattattagatgtacataaaattttatttccttttctatttaacatgattcagattttaaatgttagctttcaaaaaataggatattatatattaaaaattaatatgtaataggataaggatgcaaacatcaaagcaaatagcaaatatagagaacttcttacctaggaactaattatagttaacctctttgggtttctttgctcatttctaaagttaaaggtaatgagttaatttctcaattctttttcagtactaaaagtatttgctcatgtctgtagcttaccagatccttggttttcttcagccatacacagtttggtttgaagaggtaccgtggatggagataacataatcgatgatgaatgaccccttccttatcttcaaagtttaaatctaactggaaatattataaaatctgtgaaagactgaagaatttttaagggcacactgtttgtcttataacagtagtatatagttaggaatgatcagattcagtgtcatttatttttttcctgaaggtaatgtttgaaataagatttagctgaaggacttttaaaattgttacttagagttgtctataagttatgaagtaccaaaatgtgattaggatactctttgtgtatgttagggcagggtttgttgagtttgtggctcactgtgctaattgagtgtggagcgagcctattaaatttttattaaagcaagacatgccatattttaaaacatcaaatggttctaaagtgtgtggggactataacaaaccccacccactccattcttgattcccactctccggaagcaaccactttcagcactttgaaatcttttagttatttatggaattttctttcataattcaaaataacatgttattgttctatttcttcatttcgctgtattaaaatagctaagtaagcatgcatatttcccaccctatcatgtcactatatgtagtcaaaattttggttaaataatttgagtgtttatgttattttgcctatgtacatattcttaataattgagcaatatattcgactatgcttatatttccttttacgtacaactttttgttctccctagagttgactattgccttgattttggtttcttttcttagttctccatgtacctattactattttgatccccaagcagatatattaatctcctctcaatatatgcaaacatatcaaggaatctgtttattttaccccaagggaacaacttttctgaagccctctgttctttttttcagtttaggaagatctgctttggcctgctatacaactattaaggagggaatttatttcactttctgagaatcattttctttctccattatttgattccctgattctatatctcatgcctttcttttctttgtttcctcggtcctttgtttcctgaacaattctttaagaactttaagagtgaacgagaggtaaactttttgagactttgtatgtttaaaaatcccttggttctatgttaatcgtttgactggatatagaactctatactgaaaatggttttgtataatagatctaaaggtacttttccactgtcttttagataccagaattgctgttaacaaataaaatactggccagatgtgttggttcacgcctgtaatcctagcacttcgggaggctgaggcgggaggattacttgagcctaggagtttgagaccagcctgggcaacatagcaagatcccatctctacaaaaaagt

SEQ ID NO: 38132 - DNA, 351 bp, Homo sapiens
ttcaggtcaattggagaagtttctggaaaacagaaatgtggtctctattacactgaaaaagaggcagggtgttagactgcccagaaattaaactttctgctggtatacgtgtggcattgctccagtgagcacaatccatttggccagccagatggaccagtcctggcagcttttcagtctcatgcacaaaacatttcagcctgggaaagaaaaaaatccccaaacaaaaatataaatagagaagattcagcattgtggcgaaacaatggggaagactcatggtctcacaaatgaggtttctacaacattgtctgtgcatttcacacattctgtttctttttttcttgattt

SEQ ID NO: 38133 - DNA, 1473 bp, Homo sapiens
tcttatcaataataattactattgatcaaaaacaatcatgaaagaagctgatctcagctttttaggaataatacaatcgcattatagtaatttatttctaagttagaaatgatcgctaaacctaataaatacaagttcttattgagttatattgggataattgtagctttccatgaagtcataaggaataatacagagagagctcatgtaccatttacccagtcttacccttacattttgtaatagcaaaatccacaatcagaatattgacactgatataactcaccagtctcagagttctctagttttacatgtacacacttttgtgcgtgcgtatttacttctatacggttttatcacatatgcagtatgtgtatacagattggaaaaagacaatcccaaaaggttacacactgtacaattccattcatattctattcatataacatttttgaaatggcaaagttacagaaatggagaacagacagtggttgctggggtttacagatggggaaagggaaataagaaggtgtggctttccttgagtaccctttttccactccatataatttttgtgagattcatccaagttgtttatatccgtggttcagtgggtttttttccttttttttttttttttttcctgactagtgttccacagtatggttatgccacagtttgtttaaccattaacccattgaaaaacatctgggcagactccagattttggctaatacaaataaaattcctgtgaacattcgtgtacaggtttttgtgtgaacaaatgttctcatttgtctggaataaatacccaggaatgcaaacgatggtacatacagtaattgcatacttagttttataagaaactgcctcttttccagaatggctgtgccatttcacatctataccagcaatatatgaacaatctagtttctctgcatccttgtcagcatgtggtatcatcactatttattattttagccattctggtaagtggataataatatttcattgtggttttaatttgcatttccctaatgactaataatgttgaaccttttttgtgtagttatttgccatttgtatagcttcttcagtgaaatctcttcatgtttcttactcattttttaattgaattatttgttttttactgttgagttttcatggttttttatatagcctaaaaactagtcctttgtcataatggattttgcaatggttttccttagtctgtagcttgtcttttttgtctcttcatatgagttttcacagagcaaaagttaattttggagatgttcaataatttatcaattataatttataatttataaaaaataattatcaatttttcctttcatgaattgtgctttttatgtcaagctacaaatattttaaagaaggtttcattagtcaaaaagcaactttaggaattgataaattatagtatattcacacaatggaatattacacagt

SEQ ID NO: 38134 - DNA, 1177 bp, Homo sapiens
cttctcaataatgtctggttgtcctgtggtcctaatctcagggtctggggctaacccctagctccagccttgtctttcacaaaggcccacttgagaaaactcagatcatctttcaggggagcatttgtgaattctgatgaattccaccttagatttctacacggcagattttgcctagggaatatatggattgcgtattgtgattgttcaagcaagcaccagagctctgcccttacccagcaaagaggaaagttcttgggcaagtctaagagtataagaaaagcatcaaccaaggagaagtgtctagtatactaattgcatatgcacccagactggtcattctgtttaatctgtactcacctatggaccctgaacttctgtaccaaattccagcttttatctccaaactgtattgacctcattgtggttttcctgctcttgtttggacatccagatcttacatgaaatgtcaggttcctggctactttgttactgattgttttttgcctgtttgagctaatttcttaactctagtgtctaccctggcctttctaaatgttgctagagagtcaaaaaattggtagaactcgtgaggacattattgccatataaactggtatggtctgagtaattacacaggtgattccagtatgtggtaaaggttaggagctactgttttatgttcttagtattcagccgaaactgaatttcagagagaatggccattgtgagggaagagtgggttcatgaagcagagggaataagcaagtgggaaaatgatttttacaaagggatggtgccagtgtggtaaggaggagatagaataaaagagagaagagcatgtcctggaagctgtgtccagggacaacagaaaaaaatgtgctcagcacgtaggagtgaatccaacctagattaactggtactggacacagtgtgagcccataatggacatagtgaactcacacttagtcacactatctatctgattaaaacaccagtgagtcctaggcttatatgcaaccctagaggccatacaatctaccttcctatctcctcatggcatctctgagcaacaagaactaccacttagttataacaacccactagttgacaaaatccaatctcatactgattatcattttcttagcaattctgtgaagcagacaggacagttatt

SEQ ID NO: 38135 - DNA, 1956 bp, Homo sapiens
cacttttccagtgcaacatgaaagttcaaacaaaacttcctccttatcaaaatataattaaaatataaaaatctgatggaaaaataaaaattttaaagcaagattctccttaaattttgtttctacagaatgacagtatcttcatagtgaaagaaaaaaaagaaaagagtggtttgtggtcaagtaaatttggcaaatgttgcaataaacttttttttcagatttctctgaacttgatataatatttttgcctgtgtaaaggagaagggcatattttgctgtgctttttgaacttattttaccatgaaatttcttctttacatggagcatctccaaggacatgtgttccacagcatatacttaaagtcgcttgaaattaatagctgtatttttctcttgtcctaagctggaggtgcctgctcttccctgctgggttctgctctatccagaatggtggctagagtgccatattcaacaagagggtgagaagcacagaaaagctagcaggagggctgttctgcatgtgcataggaggtacaggcgcaggttcacacccaggtgaagaactttcccaggtccttgtgcttctctgtactcccaggcttctgggaccttgtgagtcttgtcaaaatctgtgagattttgctcacctcacacaggccctgcacactgtcctctgtgagggcccgcggtctcacacctacactcagggtcaagtaaagacactgtctaggagccccgctcccagtgagcccacctagagagcccactttcacagcaccaaacttttcactgttgggtagttatgtgagtttcttctgagattctctacattgctgttttggaaactgcttaattataagtaattcagtccctaaatttcatttgatagagaacatatttcactgttgaatcacaaattgcatatgaataagtcatagtctgtttcctgcctgccccatgatttcattatacataagttttatcactgggaccatttccaaaacataaaccaaagagctttcattattagtaggactgagcatcattttgtgttttctggtcttctttttactcattgtaattctaaaggccatgttaatcaatttctgaaactcacttaacctggttctaattgattaatgcatttcctctccatgtattaggcattttctttactcttgcttttcttctcagaaaaataaatgtgtatgtatgtgtgtgtgtctatataccttgtaatcattaatatgacttggaaaatgttaaattaactaaagtgaatgtgtaaaataagttgggtgaaaatataacttcattgcaatattgagattttctctagggatgagcaggtccctctgctcaagtctctaattccccttttcacagtttagtgattccatgcctctcccacacatggcttaattggtgcagtcttttgaacttcttggagtgatgttatatttagttgccaatattatttctgctttctgttcccatggtttctcagtcaggcaatcagatcatctgaaaatgctacttggcctttgtttctgtatttcccaattttgtctaaaggttttgcttattttttctgatcagtcataaatattagtggggacggtggcttctttgtctttttcctaatggcactgagacaggagtatgccagcacaggctgaggttcttctctctttgagatctatctgataaataatgttacagaattatgcaaatgctaccagtttttgtgagtcttgaatcaacataaaatactgaattttagaaaataccttttttttgcatcttttcagatgagcatgtatttttcctcctctgacattgtaaatattaaatctttatattttttgaaaataccacactctagtcatggccaagaaaaccagcccggttttacgctccttctttaggagacctgatcaacagaaccaagta

SEQ ID NO: 38136 - DNA, 2957 bp, Homo sapiens
actgagtcagttcctgggtgggggccacaaaatcagatgagccacttgatcaatctgggtggtgccaggtgatccatcaagtgcagggtctgcaaaatagctcaagcactgatcttaggagcactttagggagggccagaatcatgtagcctccagcttcatgagtcataaaccataatttctaatcttgtggctaatgttagctctacaaaggcaatctagtccccaggcaagaaggaagtctgccctgggaaagggctgttactgtctttgtcctaaactataagctataaaccaagtttctcccaaagtaagttcagcatacgcccaggaaagaacacggacagcttggaggttagaaacaggatagagttgattaagttagatctatttcactgactcagccataattttgcaaatgtagtttcagctccaactccctgtgatttcatccccaacccaactaatcagtattccccattccgttgccctctgcacaccaaactatacttaaaaatccctagcctccaaatttttagggagactgatttaagcaataataaaatgcctgtccttcaacttaggcagttctgagtttactaaactccttctctattgcaaaaggctgttctcagtgcatcaggttttctgggaagcaggcaagatgaacacatcaggtgattacatatacaagttatttaatttcttgctgccacttctgacaaattatgtttagaaacaagccttcttacctcatagaacttgggttatcataagcaaaagaaactttgaaattttgaaattgtaagcagacagggaaggtctccagggattataggaatttaatcaactttagcaatcagcctgttttactgccttctgccctgaagtctgtttttttccaaaccctatgtggaatgcagttaccttgttgattggaaccagctcctgacagaccccagcaacttatagatgagtctgagtgaacttcccttgttaccatgctgaagtctccacctgggagaagcagtagcttcattaccttaacatgcaacctgtgaactggcataatcactggctgcttctgcacaactggaacccctcctctacatgtggtgacgcaccctctccctatatattgccccatataatcctcttgtcactttccctcgaggagacagtgctttggagaatactctcagtgttctccttacttgggccaggtaataaaactcctattgatcaaaaccttcattcttgtggagagttatttgttatcaggcaaataaaccctgttttttggggaaaaacaaaattactctaaaaccataaagtaaaaaataaaataaaaaattatcaagacaatagctgttaacagttctgagaagattcgcgagattcaggggtttttgaactttttttttaatcatctagaatatttgggtatacctagtagtttctttccacagcattcaaacacaggatctgggaaagtaacctgtatcagatttgttagatttttctctagctctcagagggcaagaactaagccttctcgtcagggaacttccacaaaagtaaatatttgatcatgataattaaataaatgtgtaacccaagagtcaaaaacgtgaatcatcagcataatagctctgtgctgcttctacctctagtctgagaaaatccaccttgaaatattaaaattgtaagcagacagggaaggtctgcttacaataaaaaaaaattaggattttttttattacaaaaagactaatattaaactgtaggagcaaaaggaatttccttccctcccttttctgaaggtttgataactttattctataaaccaaacttaaaatagacagattaacaggagaagggcacacaaatatatttatacatacatgaacataggagccttgcaaacatgaaattcaaaggacagaacagatggctgaagtttttacaccatcctgaggggacagaaagattaggggcttgaggcttctagaggagggaggaggtggcattccaagagaatgatgggaggaaagcatggtgtgaaaacaagtaattcagaatctaagctgttggaactttcagatattttgagccttaagggaatgtgattatgggacctgagtcatgtgacaggcagttgtaacgcaggcagctgtaatctttgttgttttggttatcaattagccttttctttacctacagtgttttataaaatgtggtaaatgacagaaggttgccagagaagaccccttccctgttcactgttgatcttcattgtagattaactttcctctttcctctcttacacaaagacttcattactgtcacattgtctaagatggaacattaaatatgcttttaaattggaaaggatatgaaaacaagctgttaaaaaaaagttagttgtaactcataaacgaggcttatatagaaaatgttataatcctactaactgtccttgttttctgctaatataaggaagaacttaacttttaacttcagagcactgaccccatttctcaggagtccatgtttcttggatagttattctcagcttttcacttaaataaactttttaaaattgggttctgatcctgtcaattatttcaggttgacaatggcaagcaaagtttttcttattatgcagatgaaagctcattggtagcagctcttggtatagataggagcctgaggaaaaagttttagtctcctttgtttgtgagttaatcttttctagatgtggataaaggcagataagggatggggctcagagaaagcctgtttgtattcactgtcaacttcacttatgtagatttcctctacagttgcaaatcttcctcacaaaaggacagcttgtaaaaggtattcctatggtctgcagcctctctgaatagccacatcaaaatatattaaagacatatatttgaaagtggtgt

SEQ ID NO: 38137 - DNA, 543 bp, Homo sapiens
taatgttcttttatatcagggaattcttaacttaaggattatttttcacagccagtttttgccaagcaatgagagaacagaaaaaaaaatatcttaggtctttcctgtcactgtagctttcataatcaccacaattcaacatgacaccataacttgtaagaaattctccccggcatccatttaagtgaacactaattggaaagttcagtgaacagaaaaaggctgtgaacaatatatatttcaacatgctgtgcccgatcctgaccttaaatgacaaggaggaaaaaaatagtccaacacagcctctgcattcagtcctgtattgtgaaatcatgatgtggattagctccaggaaaaatgtcaggctcgtggtgaaacctcaataaaacctggaaactccatgtgaatcaatctgctccacacacacggttttataaaagagcatctggatcccctgcactgaagtcaggaactccacaggtgagaggcaataataagacattgctgaaaacatgagctctgaagccagacaaacaaggggtt

SEQ ID NO: 38138 - DNA, 2075 bp, Homo sapiens
gtctttttcaataaatggtactggggcagctggacttccacatgcaagaaaaaaaataaatttagacacaaatcttacatcctatacaaaaattaactcaaaatggatcatagacttaaatgtaaaatgcaaaactataaaacccttacaagataacaaaggagaaaaaatagataacctagaatttggcaataactttttatatataacaacaaaggcacaatctaggaaagaaataactggattttattaaaactaaaaatttatgctctggagaaaggaggtggagtaatatggcctgaccaaatataaacttctactgatcatcacccctgacaggaacaccaaatttaacaactatctacacaaaaaatcaccttcataagaaccaaaaattaggtgagtaatcacagtacctggctttaactttctatcactgaaagaggcactgaagagggtaggaaagacagccttggatcaccaatgcaactcctctcccatgccctggcatagagagaatatgtgtgttgtggggagagagactgcagtgactgtgggacttttccttggaccttagtgctgccccgtcacaacagaaagcaaaactgggctgaactcagatgatatctatggaggaagggtttagtcaagtgctagccagagaggaatcacccatggaacttgagtttcatcaagcttagccaccacaggctaaagtgctctggggtcctaaataaacttgaaaggcagtctaggccacaaggaccgtaactcctaggcaaatcctaacactgtgctgggctcagagccagtgtacttgttgggcatgtgacctagtgagacaccagccatggcagacaagggagtgctcttgctacacctccccaaaccccaggcagtgcagtttgcagccagaaaagtgactcatttcttctatttgatgaaaggagaggaaagagtaaagaggattttgtcttgcaacttggatgccagctcagtcacagtaggatagggcagcagggagagtcatgaggccattacaatacaccctacctcctggaaaatgtttctgtatacaccctgagccagaagggaacctgctgccttgaagggaagcatccagtcatagcaggatttattccctgctgactaaggagcacttggcccctgaataatcagcagtgatacccaggtagtaagtcatggtccttgagcgagattttgagacatgctgacttcaagtgtgaaacagcacatttcaagccgtggtggctgtggtgatagactctttctgcttgaaaaaagtagaagaaagagtaaagggaactttgccttgaaccttaggtaccaggtcagccacagtgggagagaacatagggtaggctcttagagtctctgatcccaggcctaggctcttagatggcatttatagatctgctctaggccagagggaaagctcactgccctgaagggtgagtcctaggcttcgcagcattcaccataagctgactgaagagcccttgggccttaaggaaacataaatggtagcctggcagtactccccatgaacctgaggttgtggtggccacagggtgaggtttctctacctgtggaaaggggaggaaagagtgggaagaattgagtcttacggtttcagtgccagctcaactgcagtacaatagaacaccaggtaggcttctaagatttttgactccagtctctggtttctggatggcacctgtgaatgtacctggggcctggaggagctcatctccctgaagggagaaacacaggcatggctggcttcaccacttgctgattatagagccctaggaccttgggcaaacataagcagtagccaggtaagggttacagcagaccttgagcgagacccggtgctgtgttggcttaaagtctaacccagcacagtcccactggtggtggccacagggttgcttgtgtcactccacccacaactccaagcacagagagacactgcatttgtttggagaaagtaaacggagagagcaaaagtttctggtaatccagagaattcttccagatcttatccaaca

SEQ ID NO: 38139 - DNA, 2549 bp, Homo sapiens
tgacactggcatcatgtcactagaaccctgtactgctcagttcccaggtaattgctattccacacctcttgccctacaaactcaactgtgcccttatgtggtgaatgtatgaggactgtgctaattccagtatcagagtcagaagctgcctcccagttgctgtggattgaatgtgttcctccaaagttcatgtattggaaacaatccccaaagcaaaagtgttgggaaatggggccctttggaacgtgaattgattagtgccaccataaaaagggcttgaaggagtgggttcactttcttctgctcatctgccatgtggggacacagcaagaaagccctaaccagatgctagcaccttgatcttagacttcccagcgtccagaactatgagaatataaatttctgttcttaataattatattcagatgtctttggtattttaccaatttttagttatgtaaaaaccatggatgtaattcacatatcttttaatttggttttatatgtgctataaaagttatattagaaacaattggaagataaaatatatgttatgtaacagcttttaggatgatttatcacatttaaatattagcatatggcatgtaggcctccatttctttatcttgctgcagacttcacaaatgtaaaatgaaggtctgcaataagtcagataaaactctatcacctcattaataccatttgtagtttttagtcttcatatttattctctgatgtgaaggttattttttaaaaagtaaaaacaaaagaattattaggagttttagcaccaaaacctaatgtaatattatactagtaacttttttatcttcctaagtcttttaataatcagaggtggtttttcctgttttcaaatgttagaatctgattatcttttaatcaaacattagtttattcataatcatctgcatttttattttttatttacaggatactttatatgcataatatttcccaaatctgcctaatcctaaaaagtcacatggaccacttccaacacacaaatttctacatcccaacctatatccatatttcctgtatcgaaatatctaggaaagagaagcttgtgtatctttttttttccttttttccctcttctctcctcccctttttaacgaacacctgaaaggattctcatcaaagaagtctgagtaacactgttttgtaaggaagcatttttcagtgacgaatcacagattattattcaacttctcccagcttgttaggtcaaagaacaaacataggtcatctcttttatgacctagagttgggtcatataacatctctctctctgtctcttttactctctttctctctctcaccctcctcaaaaccaaatgtcttttagtaacatcttacagttattcaaagcactttcacatctatagtattgtcttaatttattctcaaaaccaggctatgatagaggtgttattatcctcaagtagtagattgagagactggacatagaagggctgaggatcctgttgacatcatcatgtatctaggcacagatgagactaaactaggtctccagttctagtgtcagttagctcttacagtatgatatacaaccacaaaaactcagtggtattcagcaaagagcatatagtttgggttcaagtgcctgagactgggctggggcagctcctcttgtgcatctcatactggaactcatgctagaggcacctggggcataatcttctcctggcactgcagaagcacagtgcagagggaaacaagcctaaccactcataaaaaatttcaagcctctgattacatcatacttgctaatttccctttggctaaagcacacccaagtcaaggaggcaggaagcacactctaaaatgctaaaatgaagccatagcaaaggaatgaatcaattattttaccagagccaaggaaaactttgcatcagttattcaatctacttcactcaaaggcacagttctttctactagatcatactactttgaccttcaaactttgacattggcttatttccatggcttactctggctattttaaaatttgctacataggaaaaaagtaattttacaaataatgtataattaaaagttcatcacaaattagtgtattaccttatacaaaaataataaatataaaacaaatgtttcagtaaataagagaatatattactagttcagcttgctgagtctaccataaaataatgtttcatgctaaaagttttgtctattgtttgactaaacactaaagagctttcttttaagcaaatccacaagtaatagtagaatagctaagaatttgtacagttatgaaatataagcttagaaaatgaagaaaatgtttttaaatgttaaatttctaagtctataccttcaggcaattgcatatcttgaattttgaaattttctttttcaaataatgactaggaaatttgttttaaaaagtcagtttcctgttatattctgtagacaaatatttttcagaaaaaaatttaatattaacactttaatcactaagcaggagttattaataatggaat

SEQ ID NO: 38140 - DNA, 444 bp, Homo sapiens
agctactcagtaggctgaggcaggagagtcgcttaaactcgagaggcggagtttgcagtcagctgagattgcaccattgcattccagcctgggtgacaagagtgaaactccaccttaaaaaaaaaaaaaaaaaaaaaaaagatgaacaagttcctggcttgagcaactaacaaaatgatgatgtcatttgctgaaagaagatgagtagagcaaataagttcatggggtgtggaatcacaagttctgtttgggacttctaaagtttgtgatgcttgtgagtcatccaacaggtgaaatcaattaggatgctaaatatccaagtctggagtcattatctccactaaactaaggacatcagcaacagtgaacacaaagttggtcagattcaacattatataagcacagagtaggtggtcaccttgaaaatgctatgacgtagtagca

SEQ ID NO: 38141 - DNA, 2342 bp, Homo sapiens
caagacctcgtctccacaaaaaattaagattacctgggcgtggcacattcctgtagtcccagctacgggaggctgagttgggaggatcactttagcctaggaggtcgaggctgcagtgagctgtgatggcaccactgcactccagcctgggtgacagccctgtcaaaaacaaaacaaaacaaaaattgctgacgtatgcacagttaaagcaaaaagagttgggatccttgaatgacgttcatgtctgttctggcaaagccgggattgttggtcccccaaacttctttaaagaagtttactcctggtagctcgattaagtatctttgtcccatggccgtggggaataaaaagttcagttgtcaccccctttttaaactaaatgtccgaagagacaaggcaatcccatcctctcttcacacatttgtgcaggtgcagctttatttcccaccgtgcggtcccaggaggccgcctggtcttctgcgctcacttcctaggcatccctggccgcccctcggcagcctctccttctggcctgagacttccagctgagcctcatcccctccacctgaaaactgctccatggggcacttcatctacctggaaagttctcgatttccaactggagcctgtatactgctggttgtgtctcagcagttattacagctctgggcttacaacgggagcttagcaaaagttccaccctggcttcctagactgctacagctccaagaaaaatcctgtgcgcacaaacggccgccgcctttggcgtctcccgcggattagaccagttaggaggtctcagtaggcttttaggcaggacaagttttacgcctggccaaataagggtcagactaagcaaggcgcctccgtgcgcctagccagagcggtgccggctgcggaacctgccccgccgggagcctagtgccatgcagcagcggcggcggtggcggcttcccaagcgcggcggcaaatccgggcccgcccggaagtgcccggcgctgtaggagggagcaagggcccaggagccgccgccgccgccgccgcgcgcacgcgccctcgcgggctggagccggggctggagtcgtaactcggaagccggagcccagacgggcccgcggcgggggggtgggggctgcgcgggggcgggagtggcggaggtggccgcccctggcggcgggtttgtttatcccggggaagaagtttaggagcgggagatagggaaggagggcgggtcggggaggagggatgcggttcggcggaggcggccgccacagggacttgccgccatcacccctgctgccaccaccgcagcctcgggctcccagggcggacacggccaccgcctcagcgggagaggagtctccaccaggactgaccgctgccgcccagcacgtccaggtaggcgccccttcccctccccccagtccccgcggcagccccaggcgcttgctcccctcccccggctctccgtagaccggcggcctcctgctcgcgcctcactgcgccctctgctctctgggtcccggacccctgctcgggcggcgagctccggcctgctctggggactacctcccacgcccccggaccgcccttccctcgcgcggcggcaccactttccccggggttgcccccaatccctccttgatttcccagcctccaccttccaggatcccctttagttttacccccgggcctcgccccttcttttcctctggcttctctcctcctctatacctgtatacctccacacctgcccctttttacctgagtgctgcccaaaggcagaaactgcatgctctgccaccgcgcagcgtccactttcatacctcctcatcccaaatacagacacttgaaactctcgtccctgttagcccattttaggcagagttctcagcttcgcagaccgctcactacctccagtccggtggtcatgcctttaacctctctttaacctgctttctaatacatttttgctcacttataccagagtacatcaagctaaccgcgcggttcggggtccaagtcttcaaagagcccacttgtattcctgctgctctcctttttcctaattctttttgagtcaatgtatttgtatattgattcaacataaaagaaaagggaaggtagcattttctctctcaaagcagtcacacaacccagtagaaataagattcaccatctgcttatcctaactttcgcttgtctctttcctgactgaactctgtcattcagtgattctttccaggcttctgatgctttgtctatttttgaataatcttgggcctagtttgacccattgtggtactcactttcccacttgcaattgaatccactgtttcttg

SEQ ID NO: 38142 - DNA, 959 bp, Homo sapiens
agatgagaatttctagttgtcccacatactctggaacattggcttgatattctgtctcatatatttagccattctggtgggtgtaacatggtattaagttgtgggtaggctattttctcaaaataaacatgattcctttccctactcctacccttggtcccctcctttgtgaacaccaggggaacgtggaacagacacctgtatattttcataaaacctatcagatgattctggtcaccttgccagttggtaagatgcagaatatacaacaaatttaagtataatttaaggaaaatgagacggtcatgaaaattatagctccgcagtgtagtttattgactttctgacaaatagtgcacttctaacttgataaacatggatgagttttaagattttgcaagctggtgaaaagttttgtaggcttttttatttgactgagtgagtttgcaacattggcccaaagctctaattacacaatgctggaatgcgcttgttcttacttgaccatctacccagattgcaggttgtgttcattcattattctgtggggttttgctacagttgaaagaaggggaacactatatgagcagatctttctcaattttcagaacttgaaaaaagttggcagaataaattttaccatttcctcacagcatgctgtgtgtttttatgtctaatttcttgttatttgtggagtttttcttttaaatttcacagaagtgttgctaagctgtattttttgtcattttgtagtgaaaatccaagagtgcaaaaaatatttttcccttgaatccttttcagtgttaagattgtaattcttttctcattccttaatcattgtagattatgttagaatcatatgtagagaagtgtcattcctgtaccttttggggataatatttgttgatttcttcttttaagatatgcacatcgactcttaactccagataagctcatag

SEQ ID NO: 38143 - DNA, 1185 bp, Homo sapiens
aaaacagaagtacatgtttagtgaaagcataacttatgaagctgctattctgctttttaagatttttttacagcattgttcatcagctcaaagaagcagatagtgggtggttagattgatatggagtggagggtttacaggatggttgcggtaaaagaacaaaggagtgaaatgttaaccatgcttgctagagcgtctttgaagttgtgatgtattgtgggtttgaggtttgacgaggaaggaagtgaaggcataatgggaataatgacttaaaaaatgggaagaggctaaggaagtattggtaataagagatattgagggattaaattgatgacagaacaggaataaggtctgttgtaaaagatacactgaggtttattttcagagttggtcaagctattctagctaataagtttgtttggaaaagattgctataatgttatgtgggtgagatcattcaggaatgtcaaggaatttgatgctggtaggttgaaagtccacagggtgcactcatccaaggtgatgatagaaatagtgaagaaaactgtggagggagacaagtactgatgaagtccttaataagggaacctaactaccagtagaagaggtgagcccatgatagccagggaaaagaggggaagagggtatagcatttgactcacacagttgccaaacagttttggaagaaggctggaaaagtggtctggaaacaacatcagggagttgaaagaactcttaattgctccatattccttttttctagatccttcacaggtgtaagaaaagaatattatttgagcagttctggtttatctgctttaattgagtatttacctccttgaccttatcttcataatctttgtttcaccagtgcctgacctatttaggtactttataaatgtttgttccgtaaatgctagacaaatgtgaagttgtgccagtgtcctggaattctagaacaaagagcattgcttagacatttaaaaaactgatttgaaaactagtaaaagaactgttactttaacacaattatattttcaaagtatggaattaagtaccataactatgagacatgtttgtgtttacaggcataatacgggaaataaattacataattttttacataaataggtggatgacaggttcttgatggattatagagggtggttgggatgttagagagaa

SEQ ID NO: 38144 - DNA, 980 bp, Homo sapiens
ttattttaaatagttaatatatttttttaaaaaataagagaagaaaaatgaaaaaaaaaatttctatttatccacatatttactatttcaatgctctgtacttattcctgcacatctgagtttccatgtagtatttttgcatgtatttatagagcgctggcagggagtttgtgaataagttaatgtttgataaatagaaaactaaagcaaatatacaaacaaaaatatacaatcaagaaatagccatatcaacaagtttggaatttggaaagaggaaggtaaattccagagtgaagagttcagagttggcagggtttgtctccaggaagcaggaattgacaaagcatggagctgctttctcaaaataagttttgttttactgtttgactctttatattatgtacatgtactactctgataacaaacaaaaattgttaagctaatgggaatatccaagtgagagggagggcatgaatatacaggaaacaggctaatgggttgtgtataatttcatgcacattgtgatggtattcaataaagtaagagaccttaaataggagaaaggatagttactcttgtccattttaacaagagggaaggagagagtaggatcaaactaggttatggtaggttttgttaatggtggcaaatgtccaggttacaatcggtgaatccgaccgatctacagcaacctcaattcttgcctcctcagaagaaagaattctacttagggtcagaaggtagaaaaagcgaccgaggcaagtttcagagcaggagtacaagtttattaaaaagctttagagcaggaaaaaaaagaaaagtacacttggaagagacccaagcgggaactgtgagggtcaactatgccatttgaccttttgacttggggtttatatgttggcatatttccagggtcttgaatcccttttcccatgtttcttccctcagggtgggtcacccacacagtgacctgctaacac

SEQ ID NO: 38145 - DNA, 1886 bp, Homo sapiens
tgtctcaaaaaaaaaaaaaaaaaaaaaactatctctctctctatctatctgttcgaggcttagggtaaggataccagaagtctgacttccagataagtgaggtatcatgaatcgggatggagaaggaacaaatatcatctggatatatggttattctgagagttcttgcttgtttaaagtattttattagaaaagacaagatcatgctgaatcaactaatatactgacaaaatatgctgaatagagaaacaggaggttctctctgaatttgtgtctacctactctacgctcaacgcatttgattcctctcatggtattgcacctggattctattaatatttttctacaaactgactattatagataaaaaaaaaaagcttagctaagtgaggttattctctattttgaatagtgagcaaaatgactaatcatcaactcttaaactcagggttgtgggcattattatgttactaaaacatccataaatatttgaagattaaacaatgtttgttccagaattgcacaaatttgaacttagtactataaataaccagcataccttcacactgatgtaatcaaatcaaatatgtcaacagaactatatgtcccaattacatttttaaaaatataaaactggactaatggggtttatacaattttcagtaagtcatcttagaacaaaacaaaacaaatctgacaatcgatctcacatgttaacaactcattaaccagaatgaggtcatcatagtattctatatgtgtttcacatgaaaaactgatactttttattgaatataatttgaaacattaaaggaattcaacatcaacttttagaatagacatattgcgtgttaaaatttcaaaactctgtaattgatttattagtacacaataaaaccagaacaatatcttgttcttttcctaactccagataacatatttttgaaagctcctcaagtctccactcaacttgtttgcaaagcaatgtaattgtaagattcagttttatcaacaaggatctgacaatattagccggtttcctggcaaggccaagaaggtctgtagaccacttaaagataatcagggattctacttttttggctaacaaactttttttttttttttttttttttgagacagagtctcgctccgtcgcccaggctggagtgcagtggtgccatctcggctcactgcaagctccgcctcccaggcttaggccattctcctgcctcagtctcccaagtagctgggactacagctgccgcccaccacgccgggctaatttttttggttgttatttttagtagagacggagtttcaccgtgttagccaagatggtctcgatctcctgacctcgtgatccgtccgcctcggcctcccaaagtgctgggattacaggcgtgacaaaccctatagtaagttcagggttctacctaactatattcgtgggtagctaaaagccaactttgctttggcattggtgtgagaggtgcattgatggctggtttaacgtgtagcctcttaccttctctcctgcctatccctgatccttacctactgtcagtcaagtagtcaagtagtttctaagcagcagtatgatggtaactgctaatctgactcatcacacttccttagatcaggctggtaaggagacaatgagctcaaatgaattttaaaaaagtattagtcatagcacaggagacagcatgagcttcttgctcaattcaattctcctttcccctcaagtcccattgggttgatatggagatgggaattggcagatgtacatacagtgtgtctgtcacagctgaggagccatgagctcaggaaactcttaatctttgtttcttttctttctttctttccttctttctttctttctttct

SEQ ID NO: 38146 - DNA, 565 bp, Homo sapiens
acatttcaggattaggttcttccactcaagtgcatcacctgttgctctatctataggggttgaaataatagccaggacaagagccattctggatactgcaaaaagatctgtttcatagaggaagtactaatgatttccgaaataaagcttcacttgaaactactgaaattcagagattcagatataaaaggaaaagtaaaatacagtgaaaagattctccaactaagatttagaaccacaaatacaggtcatggaggatgtggaattcacctgaaagtgacctttggttattgctacaaacaggtcatctcgacattcattaacttgagagcttagccaaggtaacactgacctgatttaatgatcactgtcacttgttttgtatcaataaagtatcatcgaagttagaatacatcctttcctacattagattgattttgtatcattattttcttcttttatttgttccaggagtaacctgggaaaatatatttctagccttatgtatgccttgttaattccattgcttctgccagtgttctagaaattattctccccctttcat

SEQ ID NO: 38147 - DNA, 1100 bp, Homo sapiens
gcctggagacagtgagactctgtctcaaaaaaatatatataaataaaataaaatacgattttttttttcagtgcaaatgccatagcttatatttagaaaaggcacagtagagaagttttcatatcaccccgaacttctcattatattggtaacaacaatcaaaattagtatgtctgccctgccttggttcagccatcatcgttcctcatctggactactgtaagaattttctaagaagagctctgctatcagttctgttccatgtgcctggccactaccctggctctgtgtagtctttctgaaacacagatctgaccacgttgttcccatgaatgaaatcattctttacctttttattataacagtacaaagtacaaacttctgaccacaacatccaaagtctttcacaatctgttcgtttatctcctatccacatttgcatactcctgttctcctttctacctttgctttacattccagagctgccaaatttcctatccactgccaggagtcatgctctctttcacctcaatgggaaggcaattccttctcacctaatttctggttggacttcccattctctaattgtccatctggtaaacgtcaactccttgtggtcaaggacttggtttaaatgtcttttactctggggagcctttgccaacctgtcctagccaactttggtgcatcagcatcctgtactggttacagtacctccatcccccattttattcaatctgtattagtttcctataatgtttaaagttacctaactctttttaccataatgggaatatctggaagacagaatagttcttatttgcatagaatctggctcatagagcccaacatatggtaggttcctaagaactttgttgcctgagtaaataagtcaataaaactcaacattcacgaaaatcctggtggtatctttttcacatattatgaagctaattctgactttataaagtcttactaacttcaatccttctagtaaatttcagcaatagaatttttttcttaaaaaataaaacatctttgctaccctacaaattaattattgctacaattataatccatttagaaataaacaacaacaa

SEQ ID NO: 38148 - DNA, 612 bp, Homo sapiens
tacaatagaaaaattacttaatttggggccagatggctttaggaactagctccaattcttactcacaaataaaattgaacaaatctacttaggtctcagttttctccatgtagatgtgacatcaatgctcacatttttctcaagcttgctatgaggctcaaaggagttgtttgtgaaagcattttgtaaactataaggtggcataggaaagtcaatgattaattagtaacatgatcaagctgagctcaacctgtattatttgttcctgttgcaaaattcctggtgtgtttgctcaagatcaatcaattcaattctgattcaatggccccttctgttggtctgacatatttcacactccacagctgtgccatatggctcaaaggggtgtgtaagtttgaatctacagtactccttcttgctccattcggcatgctgctctgaagttgcctaattatcttgctgtcaaacatttttggcttacacacagccaagcagagtcatatttctgcaagtattgctctaagatcactgagctagctcagttcagatcttctcctggcaaatcagtcttaaccttgaaattaagaacactcgtagatgacattaataaaa

SEQ ID NO: 38149 - DNA, 942 bp, Homo sapiens
ccaaaattgacaagtttttccttaaagattggttgcactgtgtaatctgaaactgtagcaggaggagccacagacaaaaccccacagacaccgaggtagtgaaggaagtggcttttcatcagctggaaacattggcagactagtgtctcaaaatccgagcttgtcgagtgcacaatttctgtcccttttaagggctcacaacactaaagattttacatgaaagggccatgattgattgagcaatctagggggtatgtgacaggggctgcctgcaccagtaatcagagtgaagcagaagagaacgaaaagtttcacaatgtccttccatacaatgtctggaatctgtggataacatcagttgctaggtcatgggttgaattttaactatcaggctaaggtcagccaggctcaggcctggttttgggtctggttttgggtctggtgcctgccacagggctgcctgcctttggtttcacttccttgtttcttcttaaaacatgtgctgagtataaaacaatatagaacattatggggggggggggtctctttctctcttctctcaaaactatcaatgaactcttcattttcgattacataaatatgcactgataaatcttgcattttgaacaaatgtttacccacacgtgattttgtaacaatgtattggtcatttgcaaaatgttggttcactcatttatgcaggactcttaaatgcaggactcttaaatttatgcaggacacacttaattagaatatgctgcaaaaaaatcacattcatttaagtacaaataatctcatcagaaaagtcattaaatattgtgaaactgacaaactcacagtggcagataagttttccaaaatgttaatttccccttgaaagctcaagttttattcttggcagcatatgtcagttgctttcatctgttgtttatttttgagaaa

SEQ ID NO: 38150 - DNA, 728 bp, Homo sapiens
atgtggatactaatatgtgtatgcatttgcttgtttgtttatgtcataacttatgccgtgcgttattccagaaaaggtttaaagcaatttggagaaaatgtaaaatataagaagatatatatcaaaaattaaaagtggattttttttaaagctgggtacaaggataaactaaactaatttgatgtaataatgtcaggtataaagctaaactagcccgggcatggtgactcacacctctactcccagtactttgagagggcaaggtgaaaggatggcttgagaccaggaattcaagatcagccttggcaacgtagcaagactctgtctctacaaaaacaaaaaaaaaaacaaaaaacgaacaaacaaaattacccagcaggcatggtggagcaagcctgtagtcctagctactgtgggagctgaagctgtgggatcgtttgagccagaaggtcaaggcctcagtaagctatgatcacatcactgcactccatcctaggtgacagagtaaaaccttatctctaaaacaaaataaataaataaatagagctgaaacaatgcacaaccagcctttggcagcagatggcccttacatttaactctaaactttctagtagtaagtgtaaaaagggaaacatgattagcttgaaaattcacaggtaggaagagaagaggagaaggaggaagagaaggaagtaattgtttatttaactattaggatccactgttat

SEQ ID NO: 38151 - DNA, 9117 bp, Homo sapiens
aacaaacaaacaaacaaaaaaacagactctttcaaggtgaaaataaaacctgtttatctgaaataaataataataattagctctgaggaaaatagatgtgatacaattccttatcaactttttttttaattgaaacagtattttgaagcttacactcctattcttaatcaagctttggaactgaaattagcataatttcagaaaatgaacaggaaagctcatctttttgtatgatctggaatagtttgaataacatgaggttctcctaatctttaatgctgtgctagaattcatatgcaaaacttttcaaacgtaatgttgccttctatttttttttctgtacttcctggcagtggggatgtttccttttatacaataactctttaaatgcatttttaatctcctctaaaggaattgttttcttcaagtgtttctcttatttggtcagttttgaaaatttgtattttgctaactaattatatttttcctctaaattacaaaaatatttctatagaggacactattttcttacatgaagacaagttaaaatttcaaatgcatttgtccttttctgtttcttactagctcttattcttatctaatactctgcatcttccttgtctagattcagagcccctcagaagcacttttctttggcttttggggacatattgcaccattcttcagatcctagtctagtgaactcttttcccctgcctgcgatgtggggttaagacaatttaggaatttgctatattttggtgtctgtcatactgtaagctatgagaagtttcaaacgactggcaaaatggtggacccatactggacacttccaaaatgggaaattttacaccgtttattagtgacactagaaaatactttgccagacaaacataggaaaaaggacaaatcccagaagaggatcttgaagtgacatctccaaacatcagctctacactatccctgttgatagtcatttttaatattaagaaaaaaaattttctgttgtaagttgttatggtaaaagagggcatgtacatcgtaccttgtactatagaaagaaaccctggtatatgaaagctttgtctttaaatggagattttgtaatgcctgttcccgttttccagagtcatcatgacatcaatgatgttgttatgtggtcaatgatgtcaatatgactcaagtcactttgggtttttcatgttttacaggaaactcagaaattcctcatgtaaacaatcagacaattgagcaaattgacctgcaaacacatataacagaaaactactaaagttcttctgctaccgcacatgatttagattgccttctatacctttgtgagtttaacagtgagggaaaagttctgatctaggaaaaagggaatgggttataggaattttagattctaaataaattttaatcaccaactggcaaaatgtcatttgcttataacgagcccttgcattttcctctgaaaaactgaaaatacaacatatagagagggtaggaaagtccccgcccattactgagaaatttttctaataaccagactatgtatctcacaggaaggaaaaagtagattgtctaaacatagcctagtgatttattagcatattaatttgctttgccttccctgttgtaggagggagagggagaagaaaggagagtatgggtgaggaaatgagagtgcagtggagggaagagagaaaaagggaaaaagaaaaggagagagagagagagaggaagagaaggcaagaggagggcattagagaaagaggagagaaggcaagaagagggaaagaggagggggcagcaggaaaggaaggagaggggaaggaaggacagataaggggagagggaagaagagaggagagataattttgtgtgtgctctgttttttatattttcccctacccatatagagaagatgctgtaggttccttggcagaaattgcttaaggcaaatctcatgactggcatttgagaaagtttttgttatgttatattggttatccccaaggggaagtttggaaagagtgattgggtgtgcaaggccccagggatatggtgaggggaaaggagaggcaggagggcagagagaaggaagctaatctgcccctcccatctgggaacttcccaacaccctgtgtaaagaagaaaggagagttccaataatgactcagagtaaattttcctcctaagaagtcacatgtgagctctgcgtttttatttaattaagaaaaatagcgtattgtgaaattttctgtttacccaagtttgagactgcagttttttttattagttctttcctaacttgtctctgtctttaatctcattactcatttcacatactgagcacccagcattagagtgttatgatcagcctggtagtgcagccttggattcttacataaagagtttgctgatctgaatttaatttagttaatgatccagcaagcacccattttagtctactaaatgctagatactggcctaactatggcgaaaatgccctgaagaataagaataaagttcatggttcaagattaccttttgagaggacaaaactttcccatatttccaataatcaatttttagaaaataaactagatcttaattaaaaaaaaacaaattaaccaattcagtagatatttatttagctccatacataggtagagctctgaggaggataaaattagtcttttcctctcggaaacatatcattttataagcaggatgccatacctggaaattaatagacaactcggaattgtacaacagcttattctggcaacactttttttcttcctgtttccaaaaggaaggaatggtatctcacagtgttctctgtttaaccttgactgctggccctgtagcgggtcttgctttcacccctccccgcatgactcgttctctcataattcccttctgtatttagcggcctatgttattatacaagttttgctccccattacatccctggcatttcactttgtgcttggtacagagaatatgcttaatacttttcttgaatgaatgaaagtgtcaactgaagaatgacaggttcatacatttggaaaggagagcttcatttcacataaaggattgcagcctgcagggtgatcattctgacctctgaaaagtatagcctctaatcagaagctggaaacagacattttgagggaggagcaaaggaaacagaaatttatgttgagcagggtagctgaatatatatattcaataagctataggggaagccatgaatatttgtgaaaggagaaatgtgcacatgcacaatggagtttcatgcttctccatgggatccgtgttcaaaaaatgacagcattaatacaatctgagggggcagttttcagcccaatgtgaagcagaggacatgaaaacctttactgcacattctccatagactagccagaaacattccatgatcagtattttctttttgttccaaaccacaaaagagagggataacaccaggtgatggttgatgtcattggtgtaatcttttgaaatgactggtttctttttagccatagggcagaaagcctaatcatagttagtgatggagcgggtatgtgttccacttcctatcctgtcatggccaaaaacttagttttcaagtttactctgggatccccttggccaagagcgtgtccgttcagttaatctaggggcttgggattttatttttattcctcaaatgtaacaaatttaaagaaagaaagaaatttataaaacataagaaatagaagtatagcttagacctccaagcaagttctttaaaggtgacaagttaaacagtagtttttaagataatattttgatgaaatttttaatcatattattacaagattttagaagaagcaagatcttgtgaaaacaaaaccttaatgtccatatctagctctctaaatctatagtcagtctttaaaagagtgacacaaaaatgacacagatccgccctctggttcgctccccatatattagagcctggtaatcttccaaagtttttacagcatgaggcatacacagaatagatgcaaaaaaagtacaccttctgaaatttcctgaatggattcaaacttttactattctaagttaatcaattggtagtctacttactttataggattattgtaaggataggatcaatgaagtgaaatatattttattttcactggtcaattactcgtattaaagcaatttcatgcactttatctccctctcttggaaactggagagtagtactttttgtctggttacttaagattaaaaaaaagacaatatgtcacttttgacttgagtgtcatggtatctatggccttcaacctgcatggttttatcgtttcagtaatcttgggaggaaggtattattaagttcatttgataaataggagactgagcctccacaagggttaagtgaattgctcagggttatacaatgaacacttgatagaaatgattaaatgacactttacttgatttgttgtgggttactaaataaagcataggtgtgcataagtcattcaattattcaagcacattcttcatccctagtcctaatatcgaaagtctttgctcttagtttttataactacaaggatattcatcaaaagacccaagctcaggaataagcctaaagaggtagtcagactagaacaaaagacaattcacagacttaaatgaataatttgcattaatgaagtttgccaggctagtttccacttgaatcttcagatctttcttccttcattgtcttgttaactgtccagatttattacctaggagtttttgaaaactcacatattaggcaatagagtgtattctggaattgagagcctattttaaacttttgactaaaaagtttacccattaaatgtcatagattcaaccatcagactgaaaatcctcagtgtatttgaaggagggtattgtctcaaaaatccagagctcaaagtgaagaagaaaggcaaaatttggaatttagctctaagaccaactcatcagttcaggggtcagagatttatatagttaaaggacaagtgtgtgtttacctgagtttaaagagcaaagttgcctctggaaagaagccctcactggaggctctggcatttgaaatggtgggcaggagcacatgttgcttaaatttctgacagtggctggagattaccgattggttaggggagaggaagtaaagtaaaatatttataaattctccactgggtggagtctgagcagttctttgaatttctcaccctaagatctggcctgtacattttcaaggaattcttgagaggttcttggagagattctgggagccaaacactccattgggatcctagctggtaagcttgaggcgctgataaaaactctctaccctaatgtttactccatgttttttccaaatgaaacttctgtcagctagaatccttgtcatagtgttttagaggtttttttctgctactctcttctttttttatatatattctttttgtaaataaaaatggtatgaccttcctaaaggccccacctttagaaatgggttaaatgaaaagatctttactaatgtaatagaaaagaactgatgaacatagtgcactgaatatggttacatttgacaaaccaaagttagtcctgttcttatttgagtttaagcggtaagattaggtcaaactccagacgagggaaagatattcttaaacagattttaagtcctctgttttctggtaactttaattgtcttatgctgctagtagtcatattaaatatttatttagagaagtgaaaatgcctactcttgaacagagtttcttcccctttcattttatgaaacctaagaaaagaaagttgatacactttttaaaaatatactagattttcttttttcctttctgcttttattttgaggccagtggggtgttatttagtagtaacactgaagcaaatgtattgattttcttaacgtgttcagcaagtaattcatatcctagatatgaaatatacactcgtagcagagtaatgttacccatttctcaatgatatgcttaaagaatcttgctcaatatgcatattgtttttccttttttctttactaatgaaaaactacacgctttctcaacatatttttaagtcaggttctaaactttgaactcctatgtacaatttgcttatttcaggcatgaatgtgaaactgtgtaaagattaactaccagacactcagtcatttatttaactatttagccctaaatcagtgggtgactaggagattctgaattctgtgatttcgttaaaatcaatcagtttttaattattatacaagctttttactttaaagttgtagctgtctaaataaaattgtgaaagcacaatttccaaacctaaatcgaaggcacattgatgctgtccatcagaaggtattgataatttaaaaaaatattacaaactatcttttatctttttataaaggacctaatgtcatttgagcttaaccataatcctttgaagaaagtaaaatttaactttaaataacattgacatacagagcagttaggtgatttgtctgagaccatatggtatgtatgtcccccgtcttgataaaattaacactaaatatgtaacatttgaaaatttgtaaaatatgtaaaagttgaagtttttaaaagtttggatttaagttcttcctttcagaatatgagcatgtcactttatttgcaaactaaacatggcataacattatggcttgtgaacactaattgtcttagctgctggggtgaatgcagaattaagcagcaattagtatgagtgaataaattgcatccttagagtgagtgcactatgctattctgggaactaaagactatatttgagaccatgcgaagttgtgcaagtggtggagtagggcagggtgcagtcatttggaagactatgcccatcaggtatctcaaggtaccccagatgtgacaggcccaggagcggaaccagccactttaacttttgcctggctgaaactggactgggaaggatggattaaaaaggtaaatcaattcatacgtagcttgtggtcctttgcagcttaagtgtaggactgaaaaaagaagccaaagaaaaagggaatgagctgaagaaatacacacacgtacacacacacatcaggaagcaacaggcaaggaaaaataaagtgagaggttcaaggcttcgaggaggaattgagctctgtgcattccattcatgggctttgccaaagaccagcacaatggactcagcatctcaggcatggttaagtaccctactgtgcactctgctatccttttagtccactggtttctactctgtctgtgccaggttttcatctcaatatagaggaaaaggattctgatgcctcaggattattacaagcattaaataagatacagatagaatgacgctaatgagtatcatttttaaaataaggaaagttgaattttattcagaatctgttggtaacaaactaatctctttatttaagtaaccccacttagagtttaaagtcacctccaatcaactcaaagggctgacctcccaaagaaagtctcaaatataaggcaagctctcttgattctgaatttcattagaaatgtttgtctaagtctttctcatatggtcagaatgagagagggtgcccttctagtaatatgtcattatgtcaaataattcatcaaccaattttgtttattctctcgaactgccactttggcggcaggggtactctgtctaaatgagatgtctataaagataaattaaacatgattcaggcccccaggtagagttcagttcagtagggtagaacagcaactcagtccagctaccatcagtaatatgtttgtagtaagactaatctgatagtaaggcagaaaaacatctcatggaattttaggaatagccaagaagatgggtcccctggagacttgcacatagcatgttgcatgaaggattcagtgacttgcaagatgggcttgtcttgtcaccttttcaggagacatagctgttcaatcccttgccattgtgtaactaagtgactcttacttgctgctggaatcacttcatgcttttcatgctttaacaatcagtggttctgttttactttgaaaaatgagtcattctatgacagtattcctcctagaccctagcatttcatagcttctatctatgattattttaaattctagctcctgtatctaactgaatgaataagcacatcccacagctcagattcctgaaagaatttgattatgtactcagctaaacatcatcactgtttggttagagcttttatagcaaataattcacagatctttgatgaaactacattgtctttagtgggtaagtgtccaacagaggtctaataaactatgaccaggcaattgataatgccaagcggtagagacacagtgatctctcttcaaaatgcagtttccttcatcagaaagctatgtgtggggagccatttagaatcaagtttcaggcatagcaaatgtttttgatctttcctatccatacatatgtccaaataaatatagtacctggcagaatgtattattatcgtaagtaaagtacataagtgtgctcttaattgttattggtgttcagaggaagacgggctacttttgcctgagacatcctaacaggcctcttgaaaaaagcattggagcattaggtctttgaaggttggctagaatccaaacaagttgaaggggagcaaaacattttaggcaaaggaaatggcatgagaaaaatcacagaaatagaaaatttcatgtggaggacaaataatacttatggtcagatattgaaagcaccatccatcaatgttgaaatcctacacttttgtacagaaccatggattgaagcagttaggagtcacaactgatatcaaagtaaaaaacatgcaatggtgaaccttggtatctttgtctaggaatataaagaatggcttatcagtggagaccatcgacagttgagaaaagaagaagcccaaaaagtacaagaatgaaaatcgagagtgtaagaagaatgtctgttttactggcattatctaacactcagatatgcaactctttattg

SEQ ID NO: 38152 - DNA, 764 bp, Homo sapiens
gtaatcccttcagcactttgggaggccaaggcaggaagatagcctaagctcaggagtttgagaccagcctggacatggtaaaaccctgtctctaccaaaaatacaaaaaattagctggatgtcatgtaacagaggtagaaggattgtttgaccttgggaggcagagtttgcagtgagctgtgatcatgcctctgtactccaacctgagtgacaaaataagacaaaaaacaatgaagtgaagagcaatgaaacaaagtatgcctgtacactaaaaatcagtctgttgtagctatttgatgttaagaacactaaattctttagtgcctttaggtcatatttgtagtaaacacttctgttaatgttttgaaactttactatttgcaccacccccagttataagtgtacacattcttgcatgttggactaaccctgtccttggacaaaggtcagtagcagatgaagattgcattttgtgatgtgctcagttaagtttaatttaaagtggtccattgtacaataatgtttgtatatgtgtacagaaaaattgttcaaatcaggaagggattatttacaaagaattggcccaagtgtgaggaggccattgaaagtgaaatgagggaagctctataccaagtgtaagtgtagtttaattctgcccagcacatctggaggggaacatgtgtgtaggtgcatcacattcccaagccagaaaaattttaggtgattcaaaatgaacactgtattgtttggagaaccaaaatgtc

SEQ ID NO: 38153 - DNA, 936 bp, Homo sapiens
tatccagttttccttgcctcactctcatgttctattatagcactcgttggtgtttttgtctgaaaaagcatcatttccccttatttaaatcccagcaatgggtcacacacagtggctcatgcctgtaattcctgaacttcaggaggccaaggtgggaggataacttgaggctaagagttcaaggccaatctgggcaacacagcaagacactgtctctgcaaaataaaactaaaaagtatctgggcatggttgcacacacctgtactagctagtacgggaggctgaggtgggaggatcatttgagctgaggagttcaagactgcagtgagctatgactgtactactatactccaatagagcaagactttgtttaaaaaaaaaaaacaaaataccagcaatgtaatgtaattttccttttgctctcttgtactcaattcacgtggtttgaatggggttgactccacttcctgattccaaagtgatgatgtaatataggccttgccaaacatgatatcagatgccttttgcttcattaacaagtccaaaggccacatgatacaaaaaggtacagttggttcatctcaagactttgttagagcttctgaaaaaagaggtactcgcagataatgcaactaagctggtggaatataagcttagctctgggagtgatccatatggtaagagcctgttccagcatacagccaaaacacaggaaagaagagtcaaggacgcaggagaacaaatgacatctcgggatccagcttgccaatagccaaccaccctaaaactttcagttacacgactcaattacatttgctttcatgtttatgtgattttgaattgagtttgtatcgcacaaaagagtccagagcaacagagctttccaatgctgcccatcacctatagtaaaagctctacaaattcttaatcttgaat

SEQ ID NO: 38154 - DNA, 734 bp, Homo sapiens
agtttacaataaactgaacagacagcgtacaaaaggcttttagaactataccatatggtccagggaagggaacaatctggacgatccccacttcaatctgcaggcttgtccacctctataacacattataccactgtaataaaatattaagatgaaaatgtaaaagctaaaatagtctatctttagcattaccaggcaaccacacttccaaaaatttactgataaacttaataaacatttactttaatttacattctgagattttggtatgcaacaccaggcatacaaacctaggccaccattcaatagaaacaatatttcagcagggctatgtgtgggtattcaacttatgcttcagaaatttagaaggaaaaaaaaacacttttacaggggcatattggcagaggctgatgtaacagatgacacattcttggaaatcaaataaaagcaatagggaaatacccattgttgcctggtgaaggcctaatcacatggacacagctggaaccaatgtagatcattcattaataaaattgtattgtagtagccactttttgatgcatttcaattgctgctttagccaaatccctgaatttctttgttcaatgttagtaagattgttttaatgggaaatatgagaagatttaggacagggaaaaaaaacctgttctcatgctaaaaatgaagctaactcaaaaagctaaatgtcactttaccttgcaatctacttacac

SEQ ID NO: 38155 - DNA, 872 bp, Homo sapiens
tggttgaaaaaccagattttttaagaagactaatattttgtgacatgtgaagattatatgaagctaaatttccacttccataaataaggctttattggaacatggctatattctttcatttaggtatgcttctacagctactttcaggctatagtggccaacttgagtaggtgcaacagagtccatagggtccataaagactaaaatagttactgcctggtccttccaaggagaagtttgcaaacccctggcctaaattatttttttggtgagtaggtaacatgatacctagtgtatgtcacatgaagaacctaagtggaaagactataatgtttccctgtcttacttctatccattcaactaacaagtatttgtttggccagacctgttactacaatgcagacagctctagtcactttggtctcccttttggctcagttttgcctcaatccaaggggttaatattgactttgggcaggaagaggacaaggagctcaccttcaggtcaaattccagttctccaactttggcctgctccatgtccccaaactctcctggttctgaatttctgctttatatcaaccattctctgtaatggacttcctgtactagacatcagtctagtctggcagtatttcctgccaaagacatgtgggcaaggggctgagtcacggcattctttgaactatgccagctgatcatcagttctatgcctgctctaacagccatcctgcatggtggatttgttttgggcaccttgtgaacagtctgcatattccaacactcctcttggcttccactgttcctcctggttatgattgcccctgaagttcatcactttcattttacattgaaacttctggccaaagact

SEQ ID NO: 38156 - DNA, 1920 bp, Homo sapiens
catctcgtatggaaaatcatcatcaactcacgttttccatttcaaactgcgatacaggtggaagaaaagctgtaaaagccttctctttgaaactcccatcacacggcctcaaggcattaacttaagaatctcaagataacctaaagcagcacagttgtcagaagactctaaaagttgtatgtgcgagagaaggcaaaaaaactacttcgggactaaaggttaaatttcgctgctgcattcccaagacttaaattcagagaatctttccacctggacagaatgggattgtctggatcccgatgaaaatgggaagttatgtgcttaatcctcagacgagggattccggggtggggggcacagtgagggtcttcacactcggctggcagagaggagtggggcgctggggaggtctggtaactgagggcgactaggagccagaagcgaagctttccgtcaggaaggcctggggctcgcactgcaaggggccaagcgccgggcagcctggtggtcggcgaagcaccccagccaactcaggccaacccggacgcccggcctcccttctcccgcgcgagggcgacgtgcccccacccgtcctctcagcctgcgcgaggaagaagcggagcgccgggccgcagaaaaccagcacgcacgacatgtaggcaccaaaaaaacgcaattcgaacacgaccagtttgcagaaggcacaaaatgccacggcgtgacgccccattccgagcgcggtgcggacggcggcgcagggagcgcagcgcgtgcgcccgggaagcgcgcggctctcagctccgcctcccccacaccccccgcccccggctccccgcgccgcagccgccgctgctgcccctctgggatctccgcgcagcgcggccccgcgaggcgggcgccggggaggggaggggaggggccgcgctccccgcctccccgctggcccgcgcggctccccagcccggagcctactcacctcctcctcctcctcctccttgtctctccctcctggccaccggcgcggcccagccggcgacgcgctgacgccgtgcccctcccccgcggccgccgcggatgccgccgcccctcccggcccgcggccgcctcggcctccgggcgcgtcaggcgctggtcccgcccctcggcccgcccgcgcaatcgaggctccgcctctctgcgccgcccggactccgctggcgcgaggtccctgagtcagcggcgctcccgcccgcgcgaatcgctccgccccagcccgcgggctcggctcctcgcacctgcccactgtcccccggcctcgcactgctccccacctccctgtgcgccctttcccatctcgtcagcaccctgtccgccctttcagctttttcgtactctttccccaacctcctagtcctgttctaagctcgcatagtcaccttctctttccttctggaaggtctgtgctgttcattaggtcgacctcggattccccgtgcagttttccagccggcccgttgcatctcctttcctggtccactccccggcctactagagcctcagggcccctgtgcgggttcctggctcccttgccgacacctctacctgctctgcagcccggagctcctccacagctgctttgccaatgcctcttaatatccctccttctggacctcctcgattccctcctggcaaggctcatgctttcctttatctccatttttcccgtcctttcggttctgactactccacacacttctgatgcagtttgagtattcaataattgcatattcgcggtcccatttacacgaggagagtcacattgagtaattaaaaatcacaaagcaaagcgacagcagtggagaccatcatttgacttgcatagttccatctatattttccttatgcaataatattctcattgccacttgaatttcaaggaat

SEQ ID NO: 38157 - DNA, 1661 bp, Homo sapiens
atgaaatatttacccttttctagataacaaaatgatgaaattatttttcaagctatcctaatgaagggaattttacatgaatatgtgcccccctggtctatcataatcagaggtttacgccttaatcttccaaagacagacctgcttagaagatgcctgaccagtcccctttgacaaattggaatggtctgaaatgaggcatgcagagctaaagatctcatttaaaatattttcccagggttagaaaatatcatttggaaacttgaaagccaaaggctctgtttttaaaaaataaattaaaaatttggaattgtatgttgtctttgtttttagcaagactcaagttcctagctgacttctgtttgtttgttttctctgggaaccaagtagccgcactacacccaagcatgtatcatttcacgacaatgactcagaaagcagtgcagatgtcatggcttacctagtccctaaaaaatgcctaccatgcaggaaatgaaataaggttcttggactcagcagaaatggggtgaggataaagaggctgctttgaatttgtgggctttcccggactgctttggaaacatctcatgcaaatccaaacagtatctgggtcacagatagtttttgaccagtaatttctgaatatacttctggtcttctagtatacttagaggtagtaggtctatttggaaaaataaaacaatttgaataatttagatagtttgatacacttctaccagtgaggatctttttctttttcgtaacagtctgccattcctggaaccatttccaaggcctaaaattttattataccgagcaacagatagaatccagtcatctagtgcttctaccaacaacttaaatatgcatgatccgttgtttctgagtatggcttttttgtggctctctctctatatataaatttagtccagctttttaaccaagagacagcttgctagaaacatgaattgtatcattgtatttgactaaacatttagtctgtaactcttatgactttagaagcctgtcagatgctatttggaaactttctctttagtcttggttataataaaccaaaagtacctagaattctatgggacatagactgtcaggaaatgttgagtgtatcatttttggggaaaagcagacacttttacaagaagacttcaatatgcaaataagaaaagatttaagaatatgcaaatagaaaaacatttaagaatgaggaaggatttaagaagaatagaaccatcaagatgtaaagcaaatcatttcatacttactttgagatccaggcttgtatactattctaaaatgggggctgttacatttctgccatgacagagaagtttttggggggaaatcccaacgatgaccacagcctaaaaatgcacagcttagaggggagtttccaatggacttggtcttcagccaagccccaggtcattcattcaaagtgcccctgcagtataactaaatgcttgtcctgatctagcatcagcatttatgcatagataataggagttagtactaagaatcctcagggggagagatgtactgtgaagatgtgagctgcgttacattcaaggacatcagctagcacagtgttgaagacaatcagccctgactgaatctgtgtgtcagtgttacggcttgctcag

SEQ ID NO: 38158 - DNA, 813 bp, Homo sapiens
cccgtttataggaaatagttctgccagaattagaagtggaaataaggagacgataatgaaatacagtttaaccagtaaagggcagtgaacatatgtatcactccacaccacacaaatatgctgcctgtttagataaagttgtggtttcttttgtcaagctattctatttcctgttagaaaggctaactttgaaataccactttcaggaatgggagatagaataaaaactttattaaattgcttaaattatttcctcaaatttctttcatgttgtttgcaataatgagatgaaatatcctcataagtttcccatttatacatagcttatgggaaataaggattcagtcttaactgcttgctaatggtcaagcatttacatctggatgtcactagaaggtgttttttttaggtgaaaggtcaaagtccaagtggcaatgacctatcaatcaggcacttgcctcgtgtatggttacattccagccatatttacctatattgggcagagggcgactcaagtggttttctttcctcttccccctatgatgcaaggaggctgtacattagcaacataggtcatgcctaatattgctatttgctctgagttcttaattaacaattgtgagaaataagtaattaatactgatgagtgtagatataatttaatttatcatagtatggattttttattttatagtttaaatataaagtcaatttttggtccccttcaaaggcgtttatagctaaaagtcaaggaatctcgtgagctcatcattttcttagcatgccccactcctcacgtttccacgcctttga

SEQ ID NO: 38159 - DNA, 480 bp, Homo sapiens
caccatatgccgctcgagctgggtgcggtaggcaaacgtgtagctacagagagggcaggaaaagttctcttcattcttctcgtggcggtacttgatgtgctccttcagtgatgtcaagcgcttgtagccccggtcgcagtaggggcaggtcagcagttgggcaaaagcatctggagttccaggtggcaggtctgtagccgagagacagagagagagagaagcgggccaaaaggtcagtaaatcaatggcagctaatgggctgactgcccgggatggtatgacaggaatcactgcaatctgctccacagagtgccatcattgcacccggccccctcgcacaccagtcccctcgcatgcccaggacagacttgtcggaatcagctcacactgtgctcaaaaattaattaattacttcaggttttttttttttgggggggtgggggggacttaaacagctgataaatgaggaaattctcttta

SEQ ID NO: 38160 - DNA, 931 bp, Homo sapiens
tacagatcagcctcttcacaaatttctcctagcatggagatctgagtattgcttgaacatgttttgaagaagcactctctcctcttctaggctttctattccatgtttgtttattgtctcacaccagtcaggaaatggggctacagcggtaaacaaaattgcctctgcagagcttggaattgagtacagaagaagaatcaccccgtaattgcaaagatgttgaaagttcatcagcattgttcactaccgtctttcctaggttgaatctgaatcaaacccacatgtcatgaacacccactcatgtcttcatctgcctgctgaaattccaggtggtattcttcttctatatgatggcttctggacacagtaaatgagttcttgcccatttcaggggttttatttctttaactcccacagccctgagaccttgacaggagttgactgctccataaatgcctggctctatcaggaatgtcagctttggtcattgtagctggactttggacctagctgaagttgcagagactactggcacccaaactagccctttaatatgttgaagaatagatgagacacactttgcaagatttcaaatgagaaaaaaataatgtgaaatacctgccactatgactgacttcatatgaaaaactgtagtgagggacatgagaactaaaagttttaaactttatgatggaatagttttacataatacttttgttaacactacgaaggtacaaaaaactacaccaaaactcataaacgtgattacaaatggggaaaagaggggccataggtagaaaaaaaatatgttgtaatgtgcaaatgttatattacttttattttgtaccattgactgcattaacgattcacaattccatgaatttaaaaaattgtgttatcaccatctaaaattggtttaaaaaaagtaaaa

SEQ ID NO: 38161 - DNA, 1294 bp, Homo sapiens
tagcttggtgtcataaagttaatagacactattcacaaagttgggtttaataccaaggcgtttattttcgatcattaaaaatctacttcagatggcaatattcttttgtacaaaaatttaacagaaattcatttacattcttctccattttatgtttatctgaggaaaatgatgccataagttcttatgaaacagaacaagccaaaaacttttcttttaactaatcctgatgaagtttgtcaaagtaagatttaaggcaagaaggttgcttcttggcaggagaattctggaagggaaaagtggctgaaactttgcatggttgcatttgtttctggtcaagctgccttatcacaattcaaactctcatgctgggaaattgctctttctttggtaccttttctgccagaattcaactctaacaacaaaagtttataaacaatgaaaattccagctggttgacatcagcgtcacgaagctttctcttcacactgatacaaatatttaccctgagctctggcaaggctttccttgcccatgtcacccttaatcatacatttttccttgattgagttatgctttccagtatgtgatttgctctggtttactttttaacacatcccagaggcttcgtcaaaatcaactctgggcaggccatgtcatttggtagctgccaaacatgttattgagaagaaacttggcaaatatcaaaccagtcctctctaactgctctaataaatgtttgttctttttgaccaccatttactttttaggtccctgatatccataaagctatgagccaagaaagtaagcagagatgcactcaattccctataatctattcccttgagataacgcaccaatttctcttccaggtaccttattgcaaagaagttgaaaatttcaaaggtttcatcaatgactctttatttccttcaagaagacacaaaggttattttcaaaaggttaaaacaacagattgatgtactctgttactgtagtaaagtccactagaacaaatatttgccacactaaagtgactagtggagggattagcacaaaatattgcaaatatttctacagagcttcccttgccaaaataaaacattgggttctctgccctaggtgcttgcaaaatcattgtgaagtgcattgataatgcagaatttggggaaatttttctctcaatattgaaataattgtataaacaggtgtcctacccgatagaaatataaataaatatctcagttacactagtttatacttatattgcatttatggtttagaaaaatctggt

SEQ ID NO: 38162 - DNA, 782 bp, Homo sapiens
gccatagtgggactactcaaaatcagacccaaagctgctgagttgatagctgtcgttgtaattcagctgtggttgaagttggaaaacctgctgggtttgtgggaaccagcctctagtagcaactgtgaccgttatttttctcttttatggtgtttccttttaaactatgtttgagatctttgttgtagacgtataccctgtggcaccagcctggtgtgtggagacatcagtgagatacagcacataaaaggatatagtgtaagtgtgacgaatcacaatgacaaggctgagttggtaacttgtgaatgataaagtgaattgaaaactcccttcctgtgacagtgcaaagggaagatggggggcaacctgaagatttggactgtgttcttttccctggaaagtgtggccacacacactatgtgccaccacgtcctgatcaaacatccaaggtctgcattcactctgtccaaaataaatatcatctgccatcaagtgcacacattattagcaacaggctacatgagttaatcattcatgaaggtggggaatttggcattgatccaacattgagcaatgtgtgagtaagatgaaagagccttgcctaggtattcagaagaaagaccagtgcaatcaacaaagcaatgcagttattaaagccctcccatggtgaataaatacaaaatcatcaatgacagctttggaaaaaatactttcccctgtagtgacctctttgtacccctcctgtgtttgacttaagaaacaaaattttagtttataaaaat

SEQ ID NO: 38163 - DNA, 1686 bp, Homo sapiens
aaaacagagaaagacaaatataaattagtgactcaagggcatcatgaacttcttgccttgtgattttgttcacaataacacttttttgctgattattataagaaataaatgtcaatgagacaatatggcagaagttgattctgctaggttggtaaaaatgtgaaggatatttttcctttgaaaagttggctgagagtttacaaatatggtttctggacagattgaaaacaaatgagcttcagtgtgagacatttcaaggcatttttaatgcttttttgatctatcaacaatcaggtatttaatgtttaactagcaattgtactctttattgggaaacagggataaaattgagactttaactttgctttattaaaacataaaacaatgggaaaatccttggagtgctatattatatataaaatatttccaacaaggaaattttggtaggtacttacaaatgtgtgctatgtactacttgaaataatgacaatgcattgagaagacatggccctaagcaactcggggagtgggggcagctgaagaggagggcggcataggagatattaaatcatgcttccctttgtcattaacaattatgtattcgggttccaagtcaatgtttaatatatcatcacagcaatgcattataattctagtatggctggcacagccaaagtaacatcactctgatgtcatattagactctggcaaagagccacaatgagcatgaaagtttagccattctgagaagcatttctagttttttttttttttttcaaataaatgattaacattaagcaaactaaagaaacaacacatttgaagaagtggaggtcattttccaactgttacttcatagtgtacactggatgcatgccagagagacagaagggaaagtcctgtcataaaatatgtttcaataaattattaattttttcataggcaggctaaagatttagaaggaagatggcattttccaactaggccataggcttattgaggttaaaactctttttcttttgcccaacattgcaatatggatgagtctttgctctagcttatcgtaactgcagtgcccaatcgatatttaaatcctgaaagatcagcaataatggatgcaaactgaacagatcaatatttagccttttgtggactgtaacttttatcttagccccaattactccatggcacaagagttgattttcaatgtcttgggtgtttggaatctcactaattttaattttaattttaaatgttaaataatacattgtgagacacttgtagaaataattgttaataaaaatattcaaaacatatgcttaaataggttcaatgtcttttcagtaccatttaataatcataaatttcaattgtgacatgtatatcattttttttaattagagggtatcagattatttttaaatccatgaaaagatatttccttgtaatgtcctttggcaatattgcatgactacttgagaatgatttgaccagtttatctttttaggataaaaactaattacagatctgatataacattaacgtttaaatattatttaatttattcaggtatcacagtataactaatcaaatgtgatcatttgtctttgcagttctataaaggatcttaaggaaatcaagattctgaagaaagaaataactttctctagaaatagcaattctcat

SEQ ID NO: 38164 - DNA, 705 bp, Homo sapiens
tttaagcaaaataagttataataagattctgaaatcaaattattttttataagtactgttttgatcagggtccttgtggggaatggatgggaacatttgagaaaagtataatgaatgaactactttcaaagatataggcaatgtgtaacacaactatcagcagaaacctggggctgataggaatgagatgacaacagcattaggcctgaatggtgaaggggaagggggacgctagaacccagagccacagaacacagagtgccaggtggagagggcgcctgccaagagctgctgacctcagatcctggaactctgccagctgaggagatgaccccagggctcaggtgccagggccgtacattccctgagtgaactctcctcctctagtctcctgccagttctctccaccaactaccccaccttaagccagaggtcagtggacctgatgaagtgtgatgaatgattctgtatgaatcattgtgctggaccttagagcagagggaagaagagcttggatcacgagaagcaaagaagacataaaaagctgattaaatgcacaaatatttatatttttggatatattaggatcactgatgggattgtttcttttggtgtctatatttgaggttgatataaagacttacttttacataaagcttgctacatactctcctaagaactttatatctattaacccgtgaaatc

SEQ ID NO: 38165 - DNA, 479 bp, Homo sapiens
taaaagaaatggacttatgccataaataagaaatttttgtatggaatgtgtacagttcatatgtgtaaaggtgcatactctcatgaagtgacattgacagtaaatgaacaaggttgtcataaatagatttttacctagtgagaaaacttgcctagacaagctttggcagcttgttcaaatatgtgtatgagtgacacagatttctcaattcacctctctggattacttcagggcaaattgtcgggtggatgtgcaacaggagatcaagattatcgattatcttttgtttttattttcagctagtactagcacatttgagatttttcattcaccattttgcaaaatctgctgtggaagtgaggagaaatatatcaggtagaaagatggatgcaggacaaatgcaaggacacaggatgaattgaatagctcaaaacataaaagcccacatagaaggtgggcatggcaattcatgcctgtaa

SEQ ID NO: 38166 - DNA, 973 bp, Homo sapiens
ggcatatgggaactctctgtactttctgctcagttttgttgtgaacataaaactgcttgaaaaaagaaatctatatttgttaaaaaaataaaaagagagagcaagagaaagcatgagagagcaagatttataggtccagacataaaggggtggctgagacacacaaacaaatgtgatactgtcatgtttacatttaatagattagtccttttatgcaataaaacaatatagtacagttatgattgctaaaaagcaattttaagaattataaaattattcatagtatactacagatagtgcagtctaggctgtacaacagcctgtatttgttgtatttctacaggtcagctagggtggttctgccaatctcagcaggactaggctgggcacttccaagctgcagttggatctggagctgttccaggtatctctcaccctccgtggactcatgggctagctcgggcatgcttttctcatggtgacggcagaggcccagagcacctgctgacacacacaacactcttcaggcctcaggcttgtcctggcaaccttctcacttctgtccatgttccattaaccaaaacagatacatggtcagatccaaagtcagagggcaggaaagctcactctctttaatgggaggaactgaagagtcactatgaaaggcagtgatacaggaaagagggaagtagtgagtctatttgtttaatctgccacaaatgcatgctgctgctttcaatttactgtgtttctgtgaccatatgtatagagtaatttagagataaaggtaacaacaaaagtctaaatcagaggcaggtggcagcctctgttggtgtcctaacataaccccaatccattcccctttgatcaaagacttgagggctttctttggatggaggagtgagcaggatgggccagacatactagaaagttaacaccactagatagagcttttgacaggtacaacactgag

SEQ ID NO: 38167 - DNA, 1601 bp, Homo sapiens
tgcctggattcctccagtaaatttttttaaccaatttctaatgacttccataacaggagttagctgaaaatacctactgtaggctggatatacatatatatgccatatatatgcatctattatgcttaatctagccacatatatatctctagcctacatgtatgtgtgtatgtatatacatgtatatatgtgtggatgggtagatagattaagcatcataggggcttctccctttttattattaactactaaaagtatattatgcacaattatacacactcatgtgttgagtactttataaattattgacaacaaatttcttaacatattttcacctaccacctaactttagctaggtactaaaaatagggaaacaaagtttattattataggaggtaatacacacccaaaagacaactatattatagaaaatcataaaatatgctccaaaggcaccaaaatttacatggattttatcctttttatgtatattttttctctgtcaatctccattaaagcagtaagttgatagtttatgggaaataaaattctatttttctctatcaggctttcatgttgccagtcttaattgatcactattttagaaagatggcagcccccactttaaagctaagaaacgccactgggtatggggtgaaatgttgctttaaacatgctcacaaccacattgttgttttcatagtttgtcatggggtaaggtaaggaacggagaaagttaagtacctattacagtgtcagcagacatactactgagatgaatctattttgacctttgttcacattccatctgctctagtgactagggtgagttcacaggtttacaatgagtcaggcttcatttacattctcaaaaatatttgcagtttggaatatttgacagtaacacaccccgagtgtggaaactaagtgactgaggatttactaaagatgttgcttcaagcgatgaaggtgatcaagtagggcttgtgcactaaaagtacctcagtgtcatgaggcagcccctgaaccaaccatgtcatcatacaattgccccctggccaaatcatgacatgttcccaatagagatgaaatcaattaaaataaatatcaagagcaatcttgagaaggtgataaaccacaaaattctaccttctaagtagaggtatacacaaaggagaagaggattactcccttgccttgaggatgaagtggaaatccagggagagcacagatggcagggatagaactacacttccaggctgataactgcaggaaaaactctgtctttagggtcaaatggtagaagcactcccttctcctttagtgctccctagtcgcaagaaccatcaaaagcaaatggaaggaattgcccctacaccagaaacagcaaatcactcagagaatccttactgagtgactaaccctcccaagtacctccgaaggtgcttcatcttagtctctttagctggttcccctcatttgtttgatctctaaacggaggaggtttcagttcttaaaaatttctttataatctataattaacttcatttgatacttattcagtcccagagttttcagtattgtctgttcataggataaaa

SEQ ID NO: 38168 - DNA, 1329 bp, Homo sapiens
gagcaccaaaaaatacacagctcttcaacaagatctcaagcaatgccaagtcaaaataggcagattaccccatggcttctgcatgtcttacatctattaatacatcctagaatcatgtttgcacttttaataacagcactaggctgctgactcacattcagtcatgtctacttcctttgtatgtacataattattccctgtcttgtgtcagcttggttggtttttatccgtaatctcaacctgtttagcttggccactctaaatttttaagtttattgaattgtttttcaggtttccctgtatcaataacactgccaaaatgaggactttgttttctaactttcaaataatcaagcataaggggagttggggaaagttcgataatttttttttttttcaattatttgggaggctctctgctagctgtttagggtgaaatagacctagttcctgcttcctgatagatcacagtctatcagagacagatatcaataaatagtaaacaaaccctatatgagaggttctatgataggagaggcagacagcaaccagacaaagggggactgggcacagagagacttatggagctagatgctgtggctccatgttgcagtgccacctgacctccaaagagaagggtacataagagggaaagtctaaaagtctgagaaattgtacaaatatgtaaattagctcctttaattctcatggcaaccctgtagggcaagtgttattattccaactttctagatcaggaaacagcaatttaatagggtaggcaacttatctgaggtcacatacctccagctaataagtaacagaactggatttccagtccaggtctatatgactccaaagtccgtgcatcagaagatgctgcttttcaaacattcccccatgtttctgatttactaacacaaatgtcgcataggaagaaatctaaaatttcagaagtccagatagtgtctactgcttcctctttacatggcattcagtcaaatcgtgacatcaaactgacttcatacaagctcatcccaaactattctggtaacttcctgatactctgaattcaggaagtcaactatctgatgacttgctggttttgtttccaggtttcaaaaatataataatccatccataattttaagggccaatatttgttccagtttttttaaatgcatcatattttcccatctcagggactttttttttttacgtttgcggagaatattctacaattaataacagtgcaaagcactcaagaattttagcagtagcttgagtatctatttagatggttcagtgatcatagtttcctgtcaaaagcag

SEQ ID NO: 38169 - DNA, 1065 bp, Homo sapiens
aagaaaatcataaggcctgggataaatagagtgtcatcacgttatttataccaaaatatgcccacaaggtccctgggacagagaagggactatataaataacaaaaagatttcgctggtaaacaaatagcaagaatacttctgcctttcacacagtaaacattatgcttctttcttttgcttgctgatgaaaaaaatttaccaaagcaatcagtcctgtttttccccttctattttttgatttgagatggctgaaacttaccaagtaaactacctggcatcactgtagtactcaaagtccatggtgtctctcaccactcaaaaagcaagggcatctttggcattgcaaatgcacataaagtaatcaatatagaaaaagaacaaattaattgaaagttatgtaatcttataccctgaaaagaacttgattaaatctccatcctttgtagcgatttctaatctaggatcctgcaggtgtttacaatcttttgtgagttgacctcaggtgacccaaggatagttttaattgcttagcaaatgtacttttacgaacaagataaagatattgtgaatgcatataaactacctttgaaatacagcgagcctttcaagatgggattttttagttagcttgctactctttctttagagtctaattgattttcttgacatctctttagcctggcaaactgcctgcctaagtactttatctgaccttcaggctgcttgccaggtattgatccaatacctacaatggctgtgttgtaccagctcttctaactttgataagggctaatgtactagcgccaggcagacaggaagtcaatggtctcaaaatttctctcatcctcttctatcttctagcttcctctcttcttatgcaagaatttcaagttctatcaagatcagatcagatggacatttgggcccaatttatcttctaggaatttttaaaaatgcatcttagaagagttctctccaggcaacaataaatgaaaatgttgagaaatatttgatttcttgttgaagttaaaataatattgttacctgatggctttcctttttg

SEQ ID NO: 38170 - DNA, 734 bp, Homo sapiens
tcttcttgaagacacttaaaatgagatttgagagctaagagtcaacaatttaccatactctcccagtgctcagaggagctgtcctgacacatttcctcatctctgttgtcattagtggtcatctctggctagtactgacttggagtccactaaaaacatccctcgcatcttctagcaacagttctccagctctccattgtctccatgtcatccctgcagcctgtgggccactctgcagcctgcattcctgccaggtgtcctgtcaggcaaagctggtttatttgaggtcacactggcagctgagcccaagagcctgctgcctattccgttacccttgccaagttgagcttcatctattttttttttctttaatcattcctagaaatatcaattctggaaaactctgttttcccacagaaggttttggcagccaatcctcagcagttacctcattctttgctctgctgccatctgagaaagcataccaggaaaaacagtgcacctgtaggcagaacaaatgcacagagggtgaaggattggatcggctcttcatcctgacaggcttatggagggaagatctccatggagttaaagaacgttagtgctgccagaaacctgagactccacctagaccaaattcatcatttttcacgcaaggaaactgagagtgggcagagggaagtctcttttgcaggttatggctgaaaatatttgcaaatggatgagtgcataaa

SEQ ID NO: 38171 - DNA, 985 bp, Homo sapiens
tagaatatttcctcttccatcctagaggcagcaagatgatggaaacttatgaccaagaatacaatgagcattcaaggtatctgattttctcagccccaggcatggattaaattttataggtcactagtagcaatatggtgactataagtgtctaattttgacctgtaagaacatgaatctttcaacatttcagccacttcattattctctttgggatgataagataactttcacttggcttggagaagttattattatttttccaggaaatgtaggcaacacatgatcaataccataagaacgagagccactgagaaacaataattaacaaagaaagaataaaggttttggactagcactaagaatttaagacaaaagccaaggcagttttactttcctaaaaaagaaatagacagttcataggatcttagaagccgattagccatttcccccttcctaacagctccaatgatcagagatcattgcatcactgctatgactaattccataactgttctcaaataatgccaattgaccattgatccatgactgtggcctaattcttaactgattgacagccaaagaaagctcattggtcataaacacacacactaaaacactggaaaaatcccttgacacgcactgctttttttggtggcctaaatttacagtttctttctttttttttttttaattcaaaggccatgaatgcagatagcttttcagttctccttgtgtttcttgactgaaagaaccctttaagtgctctcgaaatagttagatgaatagcagaaacaattgtatcttttcaaccccgatcacatcagttctaagaatttgacgagtaaaaagcactgggcaggttttaagtcaatagtggccttccaatttctaaagttctttcagagtacaaacacattgcttatactcctctggcatggttttgctcatttgcaggaaaaccatattttgtaccacatcctca

SEQ ID NO: 38172 - DNA, 428 bp, Homo sapiens
aaataaatttaaaaggagaggggctatggaaagtaaagtaaacactaaggaaaataatgaccatttgaactaggcttactcttaggcccaaatagcctactcctaccctctgacagatacagaccagtcatccaagacacatgatccacgaagagtcggctttccaaaggtctttgtatagtggaatctgcactgcctcactggtgacactgttcaacttttcacctttgaacacccaagaaagccagtgccaaaaagagcctctgtgttctctcctaacacagcaaacactacggcattccaagtcagccttcgagaggcttctgagaaaccaaattgtatccattctctccattcctcttttctcagccctggactgtcagagagtcagagttataggaggaaaacttgagccttgaaggactgaa

SEQ ID NO: 38173 - DNA, 2508 bp, Homo sapiens
ccgtgcctagcacaccagcttgtaagcaatcgacatggattaaggggtaaaaacaggcccttaaatagctaaaattttgacaagtaatcacttgtctgatcatcaaatatgtcgttcgaaatcctcatttttttcttcaaagcgcagtaaacaagtatttgcgcacctattacgtgcaaaacagttttcaacacaatgctttgtgtgtaaaaggaacggcgggaatggattcaagttgcgcatcgtgataaatggcgtgaatatcctgagcgggtggacagcccttcctccgtgagttttttctttttcttttctagtcaccaagacagcacgcgtgtgcagaagctgcagcggtgggacgcagtgctaagtctgggggcgcacacaccagctcgcgcgtcgcgagctcgcctgggcagctcggcgggcgcggcgaaacagctcccacgtccgccttccaccgactcctcggtatcagagcggacgaggcgtccccccagaggaaagactgggcgccgcagacgccccttggagaagtccctggccactcgccccacctcggggtcctcttcctcttgggcttctcctgaccctttgggtgggcgctccagacaggcccgtcggacgcgatttggaaacgggtcgtgcccggcctagcccgcatctactcgcccggccacagcccagccacagcttagggactttgaggcgcccgcgcccctttgtcgcggtatctctagcccaagcaggccggacgccgaggcctcgcggtatcgagcctccgtccgccccgcctcctcgccctccactccgccccgccctcgctctctcacccctcccccgctcccgcctcgcttccccgacaatctcctcgcgctcccggcccggcacgcgcgctgcgcccggccgccgctgccgccgccgccgccgccgccgctgccgccgagcgttcctccgctgcgcctggcttccagcttcgggccggaaccggaagtttggggggcggagcccggcggaggccaggagaccgaaaacgcggccgagcccggagcccggagctggagccagagcctggaccagaacttggccgccgcctgcaccgccgccgccgctgccgcccgccgccccttccccgcgccgcagccgcctcgccgccaccgccgcgagctcggccgccagtggtcctcggactttaggtgtctgggttgaaggtcggtccggacatcggacccagtcagttcccagactgtccgggcggcagcggacgccgctgccgccgccgcctcttcgtcgcctcagcctggcgttttgttccgagagacgggagaggcgagcggagctgacagtgattttgacagtgatttaaacccgcttttgttgttgttggcttttcgttgtttggttttgtgtgttgtgcgtgtgtgtggcggtttttcccccgtggtgcattttattttttatcgttgtgctcttttttttcttttttttttttaacccagtgagcgtttttttttttttttttttttttttttggtctgggcttccgaatatgttttatgacggttgattttacaccaggaggtttgtctccgaggaagacccagggaactggatatctagcgagaacttcctccggattccccggcgcctcgggaaaatgggagctgctgcaaagttggcgtttgccgtctttcttatctcctgttcttcaggtaggtgcagggagcgcggcgcggtggggctgctcctgcggccgcggcggccgctgctgggggccgcggctggtgttgagtcggagagtccagtggagcctggggaggttgcccactccctgcgcccctcggctgccaccgccccccccccccgcccccaggtctgattgtgatctggaaacctccatgcatttttctctttttgagttgggtcggcgagctgataagagtgagtgctgtgttgttgtggaagtgagaaagtcatgttttgtggccataacactggatgacagcgctggttgggttgcaattaagccgcaaataccacaagtgacaatttatgcaaaggttgagatctgaaaggagtatttagtgtgggctcctccaaaacaagggttgctttttgtcatcgtttaattagtgcttcaccggtgaatatcacgacatagatcaagccagttgctgcttaattttggctgtgggaaacaatacatcctatcagcaatttaatctgggtctcccctcacgttttcttcaacttcagcgtccagcagtgttaaaaatagttgtagttgttgttggagtattaactataacccagtgcagaagaggtatgccgcttggtattggtaatgtgctggcgttcaaccaccatttgtgtgctcttttggggcatagattttgcttacctacggaatacttattttaaacgctttgtattgaagcattgttttcggtttagaacaacccatgtgaaattgtttttgttaaatatagtacactcataaaataggtt

SEQ ID NO: 38174 - DNA, 711 bp, Homo sapiens
agaaacttctttgacccagaaaaatagccatttcttcatgaaaattttattgtttcctaatagaaaacaaaaactgctgtggcgtttgagtatatgtttttctccttttagggaatggcaatgctctgtgaaaccattgaagaatgttgggatcacgacgcagaagccaggttatcagctggatgtgtaggtgaaagaattacccagatgcagagactaacaaatattattaccacagaggacattgtaacagtggtcacaatggtgacaaatgttgactttcctcccaaagaatctagtctatgatggttgcgccatctgtgcacactaagaaatgggactctgaactggagctgctaagctaaagaaactgcttacagtttattttctgtgtaaaatgagtaggatgtctcttggaaatgttaagaaagaagaccctttgttgaaaaatgttgctctgggagacttactgcattgccgacagcacagatgtgaaggacatgagactaagagaaaccttgcaaactctataaagaaacttttgaaaaagtgtacatgaagaatgtagccctctccaaatcaaggatcttttggacctggctaatggagtgtttgaaaactgacatcagatttcttaatgtctgtcagaagacactaattccttaaatgaactactgctattttttttaaatcaaaaacttttcatttcag

SEQ ID NO: 38175 - DNA, 2299 bp, Homo sapiens
tattttgagttaattctaattttatgatagaaattcattattttcagcaaaaacagctggcatttgggaaaccaaaggctcaaaaactaagaatagtaaccaaagaaacttgacaaaacagtccttttaaaactctcatctacactataaggggaaactttgatcacgtcccttctccttcatcaatcgtagaactcaacattaaggactacacaatcccacatccctctccgagaaaaagcaaaggctttgtgttgtagcaacaacgcaagacatggagggaagctccactcaagacttccctgcctgctccttccccaaagccactccagaataccagggagggttgagaggtaaggcatgaagggcgcaatatccaatatgagcaacgcgtgtgatgcatctggtcaaaatgcatacagaggacttgtctctgtccctagatagaagtcctccgtcctgcagtcatgagggtcaattgctgaggcttcacagttcccttctctcttacactcggaccgtcacgctcctcacctactaccccgatgcagaggtagactcaggatccctgcacttgtcaaggattcctcggcaagctcacggggcgggagtggccacaagacggagctcgcctggtcctggccttcccggcctatacaagcctgcccccttcccaattcccaatctccacagccttccatcctcccactttcgattcaccttgcgccaccgacgcccctggccttcgtttgcagcaagtttacccccaccattacctctcgcataaaagcctgcatttaccaggtcaaagaggggaaccaacgcctgcaggaatcgcttcaccgaatcgcctggccgcgtcctctgctagacttcacctgccgctgcggaccgtacacaaccactcccggcatgccccgcgcacgcactacctctcccaccccgcccctctcccgcccaaacacgtgacctcctttcgtctccgtccacgcccacttccgttcctccactttcccttaggaaggaggagggagctgggggtgttaaaagcgtagcgacttcctcctcctccccgcccccgctcctgtacctcccgctacaatgtcttccgggtcgctagcgcctcgacgccttctgggaaaatagctcatttcctcccctccccctcctcctgccttcaaccaaccagccacccgtcagagagggacatgcgcagtgagtgcctcccgtctcttctacccgaaccccccctcccccccaagcagagagaccccagcagcagcagcagctgatgatgaagagagaggcagtggcagagggggggcaccttttatttctatttttaaagggacaggacactaattctaccccacttcaaccttgaattcaggggggtggggggaaggcggctgagttccttcccccaccctccagccctgagccctgagagggggattgagcctgagagaggagaaggagtttcttcttcttcgaaaacccccatccacgactcctaccccctcacccctccaactcgcctccctccctccaccctcctcctctttggccgtgagaggaggagagaaagaaaccaaaagcctcttagcaacacagaccctttgctgctgctgttgctgctgctgctgctgttgctgctgctgctgctactgctgctgctgctactgctgctgcttggccctggctggagacatctcactacacccaggagcagccacttccccagctctcctcctcctccttcgcctcctcctcctccactccccccctttattaccctttgtgtcatcctccacagctccagggaaggcactcaaaagtggggggcaggaaaggtaagtgtgtctgtgggggcttcattgccttcctctggctctgactttcactccggggcaacagtagcaccaaaccacatacgcagtggagctccggggtgaggagggggtggtgctggggggggtgaaggaggggttggagtagggaggggtgtgtgaggtggggtgcccatcctgtcaggggaggaagggcacttttatttttatttgctgttgtcaaaagtggtttctctcctccatctaacatctgattgtgtcttgctccagtgggggagaatacaaaaacaaccccctccttcctccaatgaggcgccagggaaagagacagaaagaggcacactttctagatgtcacttaaaaaaaattcattggagagctctttttctccaggaaaagctccactgcatttgtttctgagtgggaaaatgtcgggatctggattgtat

SEQ ID NO: 38176 - DNA, 601 bp, Homo sapiens
aactaggtcactgaaaccatgcaaaattatttttgtatgctgtcctttatgatggatatttctgttcattactatataaacatgtagaaacaagcatgtagagaattttcaccaagtatgaaacatttgtattggatggtctaacaaaatactggctgtgtgatattaaaaaaaaaaaaatgcactctggggatcagaggaacctatctcacagaccggttaaattacaataccaaagaggttcttatgactcctcatcaggggagacatgcctgtgtattaaaacactgtagaaggaaaaaacagtcgtgttaaatatgagtcaccaatcaaaagtcccaaggatggatctgccacattgcaggctttggtttgctatccagctctttctcgtgtagcatactccagagttaacagcagcaggaatttactcacttagtgatggttaatgattctcctgggcaaggttggggagactagctaatatgtaatatatttttaaaaagctcaccaaaggtgattagaatccaaatagtttgggcacttaataagtgaagcttcacttaactgaaaactgcatccatccataacatctcatttc

SEQ ID NO: 38177 - DNA, 935 bp, Homo sapiens
atattgcccaatcatacctgcagcttgcaggttgtatggcacacggaatctccactttatgtccatttgttatgccaagtgttgtaggtgtcatccagtgaaatgtgttctcctctcagtctcaacggccagagggtgaccatacaggggacataagtatttcagggcctggatggtgttctgttggtcagccaccctacaagtgtaggtgaacaacaggcctgtggccgtgtccacatctgttagcacatgcgtatacccttgtgactttggcagcggcccgatgtagtctatttgccacctggtcaagggcactcaccctgttgttacttgttgcgtaacattggacagctgcctcatttagggcatgcctgagcacatgccaggcatttctgaaaagcctcccaaatgtcttgcgtgggcagggacagaccccaatgcgtattgacctgttgtatcagtttaccccctgcatgtcccaatttccagtgtagccacaaggccacatctcatgtaggtgccgactctaaccattggaccttggccaaggcatctgcctcatcattgccgggggtggccaaaggcatatggcctgacacatgataaacggttacctgtttctgatgacccatttcccagaggtcttgccacgtggcttgaccccaaatgggttggtggccgactagcaacttctgtattttccaggtagttaaccacaaagttaagccttggtagaccacccagctattgatacagattaccatcagtgtcacctccttggtgatcaccatccacactgctctaagttcagcccattggctactttgtccacaccgggtttcaaaccatatggtgtcagtactaggttggactgcaacagcggtccaagcagttatagcacctcggctagacccatctgtgtaccatggcctatc

SEQ ID NO: 38178 - DNA, 649 bp, Homo sapiens
cacagctgccaccgtgtatcacaacccatgttgtggatacatggccgacccagaatcagtggggaccaaaggttcacttacctcaggatcctatttgatatgccaattctcaggttctaactgaggtccaaggggagttggtgggtgagtggcaggtagcaggaaaaacactcgaggaattgtagacagttttgacatggctttactctctctctgggtgcaagtgagccatatgtgcagcattaccggggtaattataccttttacagacaatagtggctttgagccaagcatgagctcacataggtcatcatctaatgctcctcacgtggtgtggttgcataatgtgcagagctgtgcacctgcaccacaaacccgctgagtcatgctgcaccagaaggccacctcagcctgctcctgactgaagcgcagccatttccctcacagctatgtaaataccttgatttaaaaatagtttattactaacaacaacaacaaaaaagctaatgatcacctgagccttcagcaaataataatcttcttattagcgaggggtttagcctcaatgtcgacatctgctgactggtcagggtaatgattgctgaatgttgggttgtctgtggcagttctttaaaataagacaatgaag

SEQ ID NO: 38179 - DNA, 868 bp, Homo sapiens
ttgcctagaaattgctaaggtgcaagtattataagcaacacaaaattacattttgtttcctagactgggctaaaagtcatgtatttctagacaaagtacagaatgatctcactgttactgggagaaaaatacacatttgttctcattttatgctgttttttacacttctttttagaaaacatttctctttgtttctttattgtctcatttcctattgaaatcacctttgcaaaaattatgacagtgagagaaatctgacagagctgactccatcatgcttccaacctcacaaaatgcctttgctcattcctgggcatcggtcaaactgtgcactaactatgggaggaatttagtttacagtttaactttaaaacaaagatgattaacagtctcttcctgaagctaacccccactttgcttggggattgaaactgcatttgtaagattaacaaattgtccacacagttaaaactatggttcacgagtcatgtagctggaggtcacaagatttgtaactccccacttgctccttatataacatcattatgctaaaacttaagactggtgtttggggtatttttcagaccttgcattctgatggacgagctggcaccaccctgaccagtaacccctaccaagaaactgactcagcacgttgtgacacccccaccctcaggaatagaaacagtgcaagaatacagcttcaaccccctgtgatttcatccccaacccaaccaatcagcattccacattctctagccttctacccaccaaactccttgaaaaactctagacaccaaattctccctggaggcagacttgacaattatctcctgtcttgccactggactgccttgtgataattaaa

SEQ ID NO: 38180 - DNA, 957 bp, Homo sapiens
cacgactgcaaatttccagtctccatggtagatgctaagataggacttaactcatggaaacccatgctaaccacctgttatgaaaacgttacctccagcagcttttctagtaattgtcatgacagggtaaatgaaaagaatcaccttagcacttggaaaaaatgagtaattatttattgcataaaggaggaaaaacaagttaacagtcaggatgggcaaagtgtacataaccacagaggtgggtagcatggatttacctgattttagttcaacagcttcatagatctaagcttcaaaaatggcagatgcaccgtgtgtgttattcgggccaaacatgtgtaatggaatgctaagtggagagaaaaggtcagagaagtgataggcaccctgaggccgtcattctttatctgttcaaatagttacctcattttggcttttggccctggggggcaggctccggagcctcaggtgcgtcagagttaagctgtttcccaccccggaacacgcaccggcatttcagccttcacttgctcaactccagagccaggacgctccagagaggacagagggagctccctagtggccagagcctgcagttcagcccctccgcccttcctctgatcacacagtcaggctgactgagaaagaaacaagaagcaacacagggccggctggagccagggagcatgaggggcgtctctgggagagggaacccgtggcccaactttcttcccaaatcaccagattgtggaagaagcatgtggaagaggaaaaagtccatctccccgccccacaatctgttcaactttttttagtagttctgtgactttaatcattagtattcagtgataagaatcccagagtgatgttttgtcatctgaattttccaaacgcgagtataaattggctttctctcgtggaattggtacttttgttttctgattaggaaattaaatt

SEQ ID NO: 38181 - DNA, 2030 bp, Homo sapiens
atgaaccctcactgcaaagcgaggatgaacgcgctgctgcaccttggagagctctttcggacaggtacggaggggagggcgtagaagagggctggcaccagcagcgcggtccagtcctccgaacggactgatgggactgatgggagagacctcttgcacctctcggggatgtgcgcctcggaggatgcgaattagcttgcgcacagggcgccttggggatagcgctgtccaagtacaggcttgggtgatggctggtggggtccgggtcgacattttcccttcccgctcccggacttctgcacacacgcgctgctcggcgcagccgtctttgcccggcgccttcctccgggacacccagcgagaggggtgaccgggcggcggcgggagaggcgcacgctcccgggcgcgggcgaacttgcgcacctggcacctgccacacagcgaaagcaccggccagcgagcggaggggcgccgcccccgccccctctccccggagcggaccgagaccgagcacgctcccgcgggccggcagcgccgcggagagagtgggtgggcaggcgagggaggggaagggagaggaaggagggagggagggagagggcgaggcgcgttcccgcgacgggggcgcgctctcgcgcgggctgccgggatcgctcgccgccgctgtggtaatgtccgccatgttggccatggcgcagggagcggatcgggcgggcgagcggcggatctagtgtgtggaggcggccgcgggcgcggggggctgttttcgggcggggtgggcgcccatgctgtggccgggggcagtgaggaggaggaggagcgggccggccgcgctgcactgaggaaggaggtggaggaggcggcgggagtcctccccccctccccgcccgccccgccgccgccgcccgggctgttcctgtaaggcggggagacaatgagtaaactctccttccgagcgcgggcgctggacgccgccaagccgctgcctatctaccgcggcaaggacatgcctgatctcaacgactgcgtctccatcaaccgggccgtgccccagatgcccaccgggatggagaaggaggaggaatcggtagggactcgagtgtttattacccccccttccctcctcccccctcccctttgtcagtcgggcctcgccattcacagagcgctttacgctcgctggagggcgccgctgccgctctaacgcacgggactctacgccggcggagtagcgtaaaccctctcggccggcgtagcgcccgcccgcggccgccatgttgttgcgtcccagtgttgtgattagctcgcagcgctgcttacgctgccgtaagggggccttgccgtaagcggcggccgggaatggcgcaggggatgcgctggccgctcttggcgtacggtctctgtttacctttccacctccctctctcaggcgcggggctaattaatggcgtggtattatttggctaggcaagattattattttttccacttttaactttggctttgtattgagttctctttgaaatgactgtggaagggtgctttcaaaacaaacatcttcctcccagcaatgtaatcatcctggctcccccgcccgcgaaggtgcagcgggatgaggcggtgcagcactgcggcgggggagggcgggggccacgactaccgagcgggtcgtagcgtccgagggccgcccgccggccagttctgccgacccgagccgggcgcggggcggacgggctctgcctgctccgcctggacggccgtgctccgtgcgcaacgttagagaggagccggggatgcccggaagcgagccgccggcgttgcgttgtcctcgagaattgtcattgcgaggtggtccttagaagttgaggacctagtgcatctaaattggcagttgtaattttgataatacagcaccttttgggaaaattgctgcttttcctccgatgggttaaattttgcagacggttggatttcatctggcttgacagagagtgtttatgactcgagtggtgttacttgcgtgcgaagtt

SEQ ID NO: 38182 - DNA, 1375 bp, Homo sapiens
tccgtggagtccttccagaccttcctggggaccttccccggtcaccccggctccccgccggccccccgcgctgctcaggggagagtaggactatgacccacttccactctaaggctctagatcgaaccgtccaggggggtcaaacacgatttacaacaaggaagagaaaaaccaatacgtcccaagagggctgcaggggctttaactggaggaagggttgggcagagggtggcagtattatgccctggacttttttgcaccaaacccataaccggattcccacttcctaagacctgccttcctggctcttcccaccgcctccatgctccgccccgcagcttaggtcttttactgcaaacgtcaagtggtctccgccttccctgggttcggagcttcacttgctcttgagctctgcggtccggcggatttcgcggggcccaggggatggcggggagtgagatttggccagggtcatttcacactgccgggcctgcagccacgcacgcagctgctggcccggctgaggctggcggctagggagaggcgccagggggtcgcgcacaggaaggtatcggtgcaccctgagcaaacactgctcgcttccaacgctcactgggaacaggcttcccgggaaggtcccaaatctctccagttccgctcaccctgcgggcgggagcgcggcgcccgggtgccccacctgcgccgggcggtcggctcccgctggccggagtttgcagacttggcgctcaggccgattctcccggagttgggccgcgcgcgccgggccaatgagcgcgccccgcggagggctccgctccccccgcgcgcgctgattggtcccgcggccctcgaggccgggccggccgcggctgcgggcggcggccagtgcccggcgcgagtgggagtggcgcgcgcgcccctagccgccccccgcctctccccgctgcgctccctcgctccttccctgagctcccgggctccggcagcgggctggcggggcgccgcattgcacactctgggggcgccgcagtgttcgtgggatggggcagcgggctgcagctggcggccggaatccgcgcgcagcccgggtgagtagaggcgggcttcccgggagagcacaaaagaacaggggattggtgccagcggccccggcttaggcggggcctggccaaggcagggagtgcgctgagtccctggaactacccgatgctagggcagtcccctggggccagaggaactggggtcccggcctccggcgttttgcccctagtgggcagagagccccgcgagtagcctggacgggtccagaggggcgtgtgtactcgtgtgtgttgggctggcgcgtggagggtgggatggaaaggtcaggagctgc

SEQ ID NO: 38183 - DNA, 1118 bp, Homo sapiens
gctcataaggaaaaagaccttgcaggatacagtgtaactacagaaattgtatggttttgatattggaactatgttattctacgttacagagtgaaatcagaatgaatgtatcattagctttcctgttgattcctgactacattacttgtatttattcccttttgcctgaatcccaggcctgcctgcttttccgctatgaataacatcagaataagtgactagaaagagaggccagaaagtatgccacctttagagaggggtcatgtaatcaaggcttagttctcacaagcatagttactcacagtccagatgtcagggcgggggtcccagtgagctgaaggcatctcagtgtgccactgcaaacgaggacattgaactgcagggaagttttattgctcaagttcaccctgctctttgtagcagagcaggagtcaaagttcaagtttgcagtctgcaaaagctgttcttttctggttgctccatgctgcctctgaaaatgttggtgtctgtgtgtgtttcatttctcaaaatgtgaccgtcccgctggctacctttagagtaataggtgtgagtgtatgttcgtccctggagaggcctcaagacattttctcttttgttgtcataaaaatcgagtgtgcttggctggaaaggtagagtgtacttcacctggagtatttcaagggtaacaccagacaaccacttccatcaagagggtgaaaaacactttagggaagttactgccaaagaagtgaagagaatcccatcaggtttagggctgagcattgtagaaaccaggaaagatgccatggtagtttcataggtcagggcctgcctacttcctttccccaaagactcggaagacccacaggcaggatagagagaggagacctggtggaatacatcgtactgtgattatgcgggactgctaagagccccttaactgagccgtgtggagaacttctcagtgctgtttgctgcagcctgtggaataacagaatacatttcgggctgtttcttcccgctggcaactttgcagaagcattataaggtttcccaaactgtgttgcaagttagaatcacctggaggattcttaaaatcccagtgtcaaggtcgcatc

SEQ ID NO: 38184 - DNA, 1026 bp, Homo sapiens
caaccttcccaggagcagtcagcgtgctaggctgagctggcccactccagagcctgtgctcctggactgtaccacactgctttcgatgcattacatattctccttcacagtaagcctagcaagtgggtaatggggcctggggtctctctgctctggagcccagcacttcatgtccttgctgtagtggttcctggtcagcctgcttgtggctgttgggtgtggctgccacacccatttgaaatatgtgtacattgtgaaatgattaaatcaggctaattaacttatcaatcacttcacatacttaagattttttagtgatgagagcatttaagaactattctcttagcaagtttcaagtatatgatacactgttattaactctagtcaccatgctgtacaacagatccccagaacttattcctcttatctcactgacattttataccctttgaccaacgtctcccatctatctgtcttcccccatcatctcctgacaagcatcattctactcttcctctgtgagttcaacttttttaggtcctacatatagtgagatcatagaatacaatgtttgtctttctgtgcctggcttatttcacttagcataatgtcctctaggttcatccatgttgctgcaattgaattttaacagctttttctctaagcccttttatttccagtgcccaataatcaaataagtataccccttgtatacttatttgattattggaatgaacatagaggtttatctgatctttataaaatgtaatggatcctgagctgggttggcagttggaggcaacaccaagacagataaccatctgcccccacagggcaaggaggtacagggtgacctcatatgtacctggaggatcagctggactgccctgcccacctcccagcctctgccttcctctttcatcagcactgtgggggcagctgtatctcaggtgggatgtggaggtcaaggaattagattggcctgaagcattcaataaaggaaggttctcttaaagtaagcttctg

SEQ ID NO: 38185 - DNA, 813 bp, Homo sapiens
acttgcaggttttttttttcaatatgctaaaatattttttgcttcttagagacactgtcttgaattaacatggacttttggctaatctacataaaactacactgtaggttaacctacatttattctaaaaaaactgtaacataaatagagagcaatctagaagccaagtgctcattcatttgagattaattgcctcttcagatcactaattcatgctccagtgtcccaggagagttatttcccatgagtgaccacttgactcagaaggtattttaactcatccaggcttcgtacaggacaaatcttattactgtaacttagttacacggccataaacatagtttccctttctctttctcagcttgtttacttagtaccagaagaaagtctcctctgtgaccactggtgacttaactcagtttgaatgggcacaaatccagcaactgacaacattgtgtgacactgaaaattgagttcatattatttaaaataactttaaacaagggtaaatgaagtcacattcactgtaagcaaacaaggaatagacctcatgtccttctgcaatcaaaaagggatgtgaaaaataaaattcttataaaattgttgttgatttcaatgtcgaagatcttagtcacaaatttaaaacaaacaggagagataaaatagcaattaatgaacagtaaccatgaaccttcaaaggcaacaacctgaaattataaactgatgagccatggaggcactatttaacccgggaagtgctgcttttctagggtgctcaaagcttgtactctttttggctttagtatttttttt

SEQ ID NO: 38186 - DNA, 1954 bp, Homo sapiens
attactttatactttaattgtagctgtttttatatatgtcttatgaccgctacatatgaattctatagataggatgtgtctaatcactgcaaagttacagtcaataaatatctctggtgtgtgagagtatctcctattcttattttgtaggatttagaaggtcacttccaatatggaaactgttttaaaaaaaagaaaaaaagattaaaaaaacccttcagtttagctaacccaaaagctaaaaaagggcctaaacatagattctaatatttactgaaacgctgtatttaaaaaataccgaaagggtgcttgaatttccacatctgtacaaatgaaattgtataaataagtgtatttgcagtgcaaagaatgctaccatcttcaaagcataacataatttcacaccacttgcttcccttgacatttttgatacattatatctaacactataccacccaatgccatcataattaaacccgttctttcattcctaacattcccaaacgagtttactatgctgattcttaagagataatttactcacattggccatctccgctggagaagatagttcgcaaaatagctttcctttggtaaagttatttctgggaaagaacacaacaaaacagacgagtgatcgattaaactctaacaacagacaactgaggtaacgtccactcttcgaaggtgtgtcgtccaccacgtcaggaccaaagtccaagctctccccgtaccctaaggaggccagaactcgcccccatgccaggcacagatcccccagcccggagccggcagtgcagctcagagcccttccggtttacagccgcggaaaaacaactcggaccagatccgggaggggaatgggggctgggtggccaaaattcagtccagaggatcgaagcggctgctttaacagaagttggggctgcgtaacaacagctccaagcaaagcttcaggctgatcggaaagatgaggaagcagaaaagagactaaagacagacggacaggatggctggggacaacgacagggacccagtgaaaatacgggcaataccgagggctgtaaccctaacacgggcaaatttggaggggctaacatgggcggaaaccatccgtaccagtcaccaccactgtctccagctgtcccagaaccggactcttcctgccatcaaaatggcggcggcgacggcagcggtggtagcacctacgctggcggtgagcaggcaaaggaagttgcttccgagcgcgtcgaaacgatgatgcgcacgcgcaaagtaggcctacgtggagccgacctgccattgggtaaacgcaagggaggagaaaaggtggggcaggggtgatttgggtggatggataggagggcttccgacctgcgttaggcgggtcagttaatcttcagtaactccttgatgcgtttgatagtcctcccaacttaagccttccttactgcctccaggagatacagtcttctgttctttttgtcatagttgtttatttttcatgaatcgctgtttttgagcatagggcacttacctctttctgtgtccccagccctaccacagtgccaggctctcaatatgctcgataaatattaggcgattgatttgtaaatcgtgtatcattttcatgtatctaatacttttttaaaaattgattaaagcccataagcccatattttattccagatgtccttagttttcgacctggtattcttttccattccaggatcctgtccggagtacatcaccatgtcttccaggctcctctggaccgtgaccgtttctcaaactttccttgtttttgataaccttaatagttttgaagcgacttattggtcatttggtcaaatgtccttcaattgggttttgcctgtatttttctcatgcattaactgaggttatgggtttttcttgagttaagaggtaaggtaaagtgatcttctcatcacat

SEQ ID NO: 38187 - DNA, 595 bp, Homo sapiens
gttttgagaaatgccattgctctagaactctagtctctacaaggcctcatgctagtacactcttgccgagtctgtcctgcagactctggctgagcaacaggtgaaagaagtacacagacacaggtattttgcctgagagtgcggctaggggactgcatggcctagcactgccaagcactgccaactagagtgcagccccgataagccggagctgtttgtacttatttagtacagctttaatgacaaaggcctgaagccaacacaacctgtggataattaacattgtcctccccgcttgcagggagcagtcttgcatgcagatgatcaaaggttgttttccagacaacataagtaaataaacttatctagataaactcccttacgtttgcttgcacctacttcttgccctctgcttcagggtaatagaattaactgccttcagcttttattctctcctgaagctttgcaaaacctccgggccttccaagaaggtttgcatttttccttataacttttgccaccaccctgaccaatctcctacacactcttcttgtattctatgagatttgccattcctcattttttctttttattc

SEQ ID NO: 38188 - DNA, 911 bp, Homo sapiens
ttgtaggcacttgaattacaggagaaagcaagctagccaacctcccttccctcattgagctttttttccctaccggggagggagaaaatagacaagtagggacatacaaggaataatttatggtagtaatgactgttctgaaagctataacactagcaatgtgatagagatgggaaatagatagggaggataggctgacaaaggggtatagagatctcactgaaatctaaggagtaagatttgacctgagacctgagtgtcatgaaggggtcttctctctggccagcatcatctcccacctggattgctgtgacaccatcttcatggccagcctgcctccagtcttccccacctccaacccacctcactcactgctgtcagattgtctgctaaatttctatgtgacgacatcacagcctgactttagcctttccagaattctcctggacctgcgggataatgtgaaaaccttatggcagaatttatgtgagcctttatgatctgtcctctaggtattttttagcctaatttttagtcaatggagataaagcagacattcagccaatctttggccatgccctgaatctggctgtttctggctgggttgtgccattacctctgcctcagccctctaaccgtacttggctcctgctgcattcctacccattccttatcttttgaaatcccaggtcagacagcccctcccccatgaattctttttgaatcacctctttcaccattatcacctggcacttcagatataaatattttctctctgtcaagttcctgtagcctattgtgcacatttctgtgataccacattatatgacattgtggtaatttgtttgcatgtgggtctttttcaatagattatgaactctccaataggtaggggtttaaataccaatatt

SEQ ID NO: 38189 - DNA, 1299 bp, Homo sapiens
tccagccatgtggaaccgtgagtcaattaaacctgttttctttataaatgacccagtcccaggtatatctttatagcagtgtgaaaacagactaatacagaacctccccaacccagaactgtgtatgctgaagtctttactctcagtatcataaaatgtcactgtatttggagataaaaagtaattaaggtaaaatgaagtcatatggttgggccctaatgctaactgatatccttgtaagaagagaagattaggacatggacacacacagaggaacaccagaagaagaaacagggagaaggcagccatctgcaagaaaaggagaaaggtctcagaagaaactaaacatgtgaacaccttgatctcaaacttctagcctccacaactgtgagaaaataaattcctattgtctaagccagccagtctgtgatactttgtaatgatagcccagaaaactaatacagatggcgtctattatctttagattggaaacaaagttccttcttgggaggaagaagggaaattagcagatttacaatttaataaacattgagaaattttaactattaatttaagaaagtggaaggtcagactgagatgtaattgtctgaagcattgcttctctatgttgtggggcccagaagagcatggtgaattgaactcatccttatgagaagaacttctgttctgaactcagaccacagcagtttgtagtttggcctctttgacaactcacaatggctgaattccaggtctgaagacaaacatgaatgacacatgaaattgctgttgctttaaataagtagccacaactggctctgagagtaggtcacagaggtggagtcacaaatgagatctgcacctggtatgcggaaggagactaaaaagagggacatttgccagtaatcacagaaatcaggacaatggggtattcatcttaagacacaacagtacataaaattagaggaaacatccacatatctcagttttttgtctaagtcataggattcaaaaacaaagagccataaaagtatgtgagtatcaaaaatggttgggtgtacatcttattttgctaaatgctgatttcaaatctaaaatgcaaattaatgagacagtgtgaatgaatcgacatgaattcatttctactttttgaaattaactccaagtatttgtcatagagaggattgctcagtagtagtagttacttgtgtgtaaccattaaatattgttatttaatagcatttaggctaaccttgtacattgtaggaatagttgctttaaggataattacagtacgtt

SEQ ID NO: 38190 - DNA, 788 bp, Homo sapiens
atgtccaaaacatttgttatcatactcttgcttctcttgcctaaagactctgatgttcctctaatatgcaacaatgcctgccatccctccttgttatcatttattcagaggacaatcacactgggctttttgttgagctattggtactgaatttaaaaaggttaatgcattctttctaaggacatggtggatttcatgggactgttcatgggaagttttgattgattgagtctgtttatttattgattgtaatagttcttccggcaggtgggaggaagggctgctgagctaggctgggctggttaagtctacggatttggcaggtgtttaaagcttttaaacccagggcccacagggagtgggtgagtctttcattctgcacctgtggcctgctggcactcagcattcctcccactgcctatcatgtgccagctccaggaggaggcaatgtgcacatgttgtgacacaccacaagctgttcttccctgacctcttatgaaatcagctgagcacagcatggtacatggggtgtgaacctgaaccaaaaaatcctgtgtatagctaataaccatgaaaaatgatgctggacttggcatgggcattacacaccagccagtggctgtattcaggaggaccatgatgcacatgcctggaatgtggtcggggaggagggcgatattcccttttttcctctcaagcccatcattttctccccatctccacaccattactgcagtgcaagttaccatcctatctcttggacttccacaatttgttcctgatgggat

SEQ ID NO: 38191 - DNA, 699 bp, Homo sapiens
cgcgcccagccccttccatcttttttcagaagctccctccaatatctgtggcaatactccaaatcaaatccattatttttagaattcagaaagaataatttgaagatttgtagatggatgactgaatatgtagacaaggttaggcaagcctgatgaaatacctgtgcaaaagaattcagtgtaaagtattttatagaaaaatagacttgggaaacctctttctggaaacaaacaagaaaagtaatcaattaagcaaacaagaccatttcaatcagtcatctagttggcaaacaggtttcttcgtgtattttcgatgatgcttaagtgtacaaggattcactgatttttctgagtttaacagatttaattcttgatttcctgtgcttactcttttgtccaggccaattatgaagagaaaccaaccaaagatgaaaggttaggtctggaagttaacgtacttttaagaacaaaccaaccaaacaaaaaacatcatttcagttaatagtaaacaataaattggagcagacatctcaaaatcctgccagttgcaaccagaatttcttcccgagttctggaagtggttgagactcgtaggagaattcaaatgattctatgtagaacctgcatgcggcttccaatacagcaagctttatatgtgcgacagtactcataaaatgtgaacatttgttgggaaaatca

SEQ ID NO: 38192 - DNA, 2158 bp, Homo sapiens
gacattcaatgaggaaatgagctcagcaaacttggataattcatcccggatgacctatctaggaagtcgtgaatccagaaactgcacccaggtctatttgctccaatgtgtcctctcttgagtattttactatatttttgtcttgttactatgatcattcaatttattttaaaaattcaacatggttagaaaagaaagcatagatacacgtgagaaggtgaaacatgaactctactgccagcatataggcgaggtaacttagaagagtggaaggttgctcacctgtactgacaagagaggtggccaaagaaaatggagccatgaggacagacggacagcagcattgaagggaaactgattacctcactcatctctttacctccacttgtctacctgctcatctccactaatgccagcctcctcattcaggatcaaatatgttgatcatgctctcacttcaggccctttgtccttgctggtcccattgcctgaatcattcttcccctagacagtctcagtgctctttttcttgcctcctgcagatctttgctcaaatggtagcttctcccagggcattatttgacattgtatccctctggcattcccagtccctcattcctggctcattatatacaatatgtttattttaaaacatctatttctcccaacataattaaagcctctttgaggacagggatgtttgtttgttattttgaatgttttatccttagcaccaagcacattgtctgacatatggttggtctgacatctgccctcagtaaatatttactaaataaattcactaatcaacaaatatcacaaaaataattcttatgccaaagtgacatattttggggtggcataccctgatccctttcagctccttcccccatactaagcaaaggttactgttctatatggctgcaaaaacatcagccagtgtaaaagcagtcattctataggcaagcaggcacattcctagtattctttaaggtggaagtcattcactagagctgacaaatctttgattctttgaactggggaataattgttttggtttctaagtcctgcttgggttgagcaaacacatacctggctcattatcaataaccttcttagttaggcaaataggtgacaatgtcaataggaatttcaaaaatatgtgtgctggcaaaataaactctgcctttggaaacatcatcacaatttaactggttctaagttactcaggcagcctaggtcattgtgtgccaatgcactgaaattgccctttaacaaaactggcactggcagctagcagtcaaaattgaaatgtttcagccaacagagctgctttggaatctttcccacataccaataaatctcttgatcttgggaaaacatttcccgatattcaggaacttttctattgttcgttgcaactttccccagaggacacataaggctttcctagacctttggacacccacataaccttcatatactaagtgctcaggtcagaagtaagcaacattcactgggggctgtgatttgaacactaactttctgcttttttaaaatgtaaggggtgaagaaagggcctgagaatttctctgcattgaggtgaagtctcgtgtatggagttcgagtctgctctgtcttcatagcgacgtcactataacattgtccctaatgcactctcagtgaggagctaactgctactgaaagtttcaaattttatgtaaaaataaatctgtgataatcacctttctcctgttaaccagcttattgttgaagttaagcattcttgaagacacacacatttggtaatctaatgtatgatcagattttggtgctctaaacaaatcatctttcccacagtatgttccttaaacattaactctataaggtctcataaaaaggaaagttttctaagactaagtgacttatgaaattctgtatctaatcctcttttgtagagttgtcatatatattggtgacctgaaaagggctacaaagactaaatctgtttcacttggcttattccagaatttgccaaatttgactgtaattccccttttcttctgttagatctagtgacattctgcagaactagcaagcattctaggaaactcaactttgacaacactattctaaatacagcaaacacaatcaaatg

SEQ ID NO: 38193 - DNA, 548 bp, Homo sapiens
acgttcccggctgaattgctctttccgtatttccatctacagctcatgcttattagagtgcacaccgtgccctcagtattacatcaatttctggagctgtgtgtgatctggaggtggctgactgggtatctgtcatgtgatatgtctaagtgtttcaaccccgatggcagtcttccagcagctgggattaactttcacattttgaagatcagttttcaaaggtggaaaccatgggtgtgcccacagcactaccacatttctcatgctcatagaaacccgggcttgcctaagccataaaccctaacagtaatgaaaatgccacacattccaagcctgtcatcattccccagctttgattatgcaattgtagcctatgactggcctcaaccatcctgtccatcaaaggactactacccaccatactttgagtagccacatgcatctctacctcccttttggctttcggtcacattatcagttgaactaaaatgttcttcccagcttctatgtacccacattccatggtcccttcaagccctaattccaga

SEQ ID NO: 38194 - DNA, 1093 bp, Homo sapiens
gtagtggtttgtttggagtggggctaagggcttggccatctgaacttatctttcagaaatcatccttgtgtggctcttgttggaaggctggcctaggcctccctttgagatagctgtgaagagctggtaagagttcttcttctagaacttacatgcctgaagcatgtggtctaaatttgacccatctgatgcttctgccaggaatttggcttcaggaccaaccatcccaaagaagcaggatgggtggaacgttattttggtggcagcatttcatgtccagtgtgcgggagcagtggtgaccctgacaatcctccaaccatgcaatatcttggtttgatgtgtgttctcagaccccatctttcttgctttctttctgtttccaaatatgggtctccagactctcagctgattctgtgagcttccttcccttcagcaaagcgatttctgacctttgtttctgaatttgctatgtgctgtttgtttgacaggtctagtttatattttaacaaggaatcggaggttcccaggtataataaactacccaaatttgcacaacaggtgcatgtctaagaagaattttacttccagttcattggcttcaaaaccggtttttattttgtattactaaatcattttcaaaacatgttttcatattattaatactgtggaatttgcgagccactcatcaataatgaagttaccaactaacagagataggagagccatgtcagtgttctccagccaaaatccaactgccacattctttgttacctctcagcaaacagaacggactgctttttggacatacgtcattgtgatttctttgtactggtaaaaaaaaaaaaattcattctctatgctttccctccaggtgaccttggagcatgttgtgtgttattctgtagctgcaaatctttctgcaaagatgataaagatgtttcataatggagattttctatttagcagggctacctcgatattttgaccctgatctttgtaagaataggtaatttttttaatgcagtaaaataagtcattggtatcagttaaaaaaaaagtgctttagaatatgtttgatcaaggagctgtgctt

SEQ ID NO: 38195 - DNA, 841 bp, Homo sapiens
agcatcaatgattaaaggcttatcaaagcctgacagcaagtttgcacagtcagaaagagcttggctcttggaactcaaacaagtccaaattcaggaaactaagcaactttgtatttatttcagcaattcagacaggaatttgccatgagataagcttattctcaggaagtatcaccacttaacttacttaacttacagtagggtagggaaacaactccaggaccttcatctctaatctgaaaaagttctcttccctcttctgatgagaccagtgcctcctatcttcagaagggctgaagtttatagcagtgacatgtgagtcattttctttcagtttccaaatcatctactttgcttaagcaattaaatatgcctctttatgctacatttttcacctccctagccatttccattcttctatttgaaaaagcatttgacagagtcagcacacagggcctcctgctttgctgtcttcatcagggtgatattgaaagagttgtctgatcttgctaagactcaattttcttgtttgtaaaatgatgatgaaataatgcctacctcgctagcttgttaggaagtgtttgaggaacattcttggctaaaggtcaggggaaattcccttctctttgccaggccctacgttaattaatctacattaattaatctctttgccaggcccaaagttaattaattatttctaagcattgagcgaaacattcagaacaccaggatgagacaaaagggatatttttcaagtccttttagtttctgcacaagataatattaagtattattcacatatttcccactttggagtctcaatcatctttctgttggaagt

SEQ ID NO: 38196 - DNA, 2404 bp, Homo sapiens
agttgagttatccctaggcagctgatacctagtgggtgtgttacttctgttcccagcacctagcagagtgtcttgtatatagtaagtgctcaaatgtgttgagaaaattgtattggggccaaaaatagtactttttagtagttagcatataggtgatgactcagaaactacaaataattccaaataaccatgattaattccaagtgtctttgctgtctctatattgtagtgtatcatttgtagaaggtgggagttggagggtggcagaaagaagttataacttctttttaatactcaggtattgtttaggcttcctttttcttaaatgataacctgcacctaagtccaatatatattaaaacaacactcagcaacaattatgaaagtgctaagcagggttgttctgattaaagtgggcttgggggttccagaactttgcctttctactcggttccctgtggcagccctgtcactcttctgtagggcttcatggaaaaccactaacccaggcttaatgcccagtctgttgtgtttacccttgtcgctctgggtagttgaaacttgtggtcagaacagacacttcataggtcgattactgaaccactatttactaattttcagtagccgccgacttcagcagccacatgccagttttgctgggatatgaagggcttaagaatatttgatgaaagagtgagagaatgttgtgaaagggtgtagctctttacacttacagatattgtaggggtgggggtggggtggggtagaacacaataaaagcatgtggcctgaatggttagcctaggacctatgtaaacgtcttaccctggtggttgaaaagttatcttttcccaccatttttatgtaccaggggttcgaaagagccacagagaagccgcagcagcagatactgttcccatgagatttctggaatccatttggccactgttcacctcaccagccgggcatttggacatctcagagcagcaggcttggcattgaagcgtctgtggtactcgttttgatgtgcacccaggttcgagctcccaggccagctaagagctatttctcacacgtcctcattgtttcgcactctccctcctgggagagaggacatttgttaatgattaggaagacagaggctttgaatcatgcctcccacccacagtgacacatgggctctaagccctagcgcctcgtagtgtccagaggaatatgagcttcctcttttctgccctctgtgaaatatgcagcacgttcacttatgagacaaaaaaaaaataaacaaaactggccagtcttctctctcaaaggtgagaggagcagactgaggttacttctgccagacagaagttccttgtcctgtgatgctccttaataaactggttcatgctgccacttaactagatgctctgcagagaacatagttgatatgtaagaatttcccagaaaatttctgatttgattgaaaataagatttttaatacatttcattttatcaaaaatagtattttatttttattatttaattgcattttgttaaaatttaaatttattattatatttattgtattaaatatatgtgtatttattttattttattaaaaataatgggcatcttaatcgtccaggcaaccacaaaggaaacagacactcagttgttcagctaatgtcaggatgagtcaagcgctcaaaatgcaagtcaggttatgacaactaccaggcgattgtcaagtttcccctgtacctgccccttggctcgtgcggccggtcccaggtttatgaggtagagcaattaagtgcctctctcttcagcataggcaggcacacaggatttggttggctactcagcttaatttagctatgtgccatgtttccctggcatgtcatgtggggcacacagttcaaaaatggaatgagaaagctgaggcttgcttaactcgggtatgagatttagtgccgaggctcctgtgagaccccgagcctgccagaactgcactgtgctgccctggaccccttctaatctgaaagacaatgtgtgaggccaagcctagtgacctgaaagggacccttgagcataggtgagctgtgttctgaggaggtcagatactgtggaaggaagggctccggtagtaatggcaccacacacaaacttaactgcactcactacacacatcacttattaccactgtcacttaggggacaggcctgactgaccttgtgcaaattacagctgcctctgtatgtggccacagaaaacagaggtgacaacccttaagagaacaggaactcccctaatgacctctaattacagacatcaaacaaactgaaagcaattcttccccctgatttcctgagattccctgggcttaaaaggcccacaaaacattttctttcacaaatg

SEQ ID NO: 38197 - DNA, 2812 bp, Homo sapiens
ttacatcttaaatggatatttcagccatgcactttttagcccataaataaataaataataaaaagctgagtttttagatgaaacatgagttacacatcattcccgtataggtagcagtgtggaatctttctttctaggaggtattctatgcatttaactattttgcagtaacatcaaacatgagtctctgagttagaaatcaaaccgattttctcaccaaaatgaatgtttggaaaaagtaacctagatttttacccttcgaaaggaaataatgagactcgcacctcctcttttcttcagggtttgactgtttggcggaggaagggcatcaatgtttattttcacctgttttctgtagcatcctgccgatgacatcagtgtcctgtctgctgtgttaagggcaatgaaggttatgaaactagaaatgaatctagtctgagaacagatcacgcagtccttccatatgcattgtctttgcagtggtatgaaagtatgagtcagtatgactcattcggcttcctgacctagccaattgtctggctctccacattaatacagtcacctgaaccagcttctctgttcatttgtgtgacctcttggatttcacctttcctttgccaagcatcaacttgaaaattttcctcacacattaagatgcattcaaaaccttgatatttaggacgatacagacaaaatttttggagtctctaatattatagctaaatattatgtttttatagcaaaatgttaaattcttcggaatccagaaggcatttaagaaacagacagaagttgttttttttcacacagatttttggggcaacctagtctcactgtacccaaagggcccaggttaggagaactttgaaataaaactgtaactaacaccctattttatactttcttgatttatcctcctcccactccccaggccattccctactttggatcagaaacggtagactatggaatttcagagatcatctcttccaacaccttgtctaaaggaggtcattgcaagcagaaaggtgaaatgccttgtttcgagttgattcaggtctgaacccttgtcctgcttaaagacagaattctgaacagagttcagggaaccctgtgtaacatcagccttggagtgggggaagggtggggaagctgaattattagcaaatgggcaaaaagctttctgaagcagagagaaagaatttctacagccaattagacaaatcacccttaaaagaaaacatatttctcgattaaagcctgccagcatgcaatatttcccaattagttcaaagaacacagtcacagatgttagccaaaatatgctacattctttagaagtcctcatatcaatgcgtaggatctctttgattttatgaatgagtttcatggtgggtgtatgtgtgtgttcctttaaaaagaagaaacttataacctcagaaatttaaacaaaaacacacccactgaaagcacgtcgacagcatggcagatgcttaacactagagtattgaaatggggaaagtaatagttgcaagtccaaattatcaatgttccagcttatgacacatttgatcaaaaagctaaataaaatattatttcttccatgagtaaggctgctctatttatcaaataaaaactcagatatggaataattttttagtataaggatagcccaggtaattcctaatttacctgacatttaaatttaacttcaaccctgtgtttcatcaggcaacccgatttaggagagcatcaaaccccatatctcagcacttataaaagtatttgtgaaaaataaacacatatacatgcaaatcactcttccacttcttaacaaactttcctgcttgagggaattgctaagtccagaagacaggccactggaagagctataaccaggcacgatgcaatttccacctagaaatcctggaggcttgcaccttcagacaatctgtgagagaaaatacattggatgaaaacaggctggagcaatggtagcaaagtgttttcttgcccacctttttgcaagttttcgtctgctgccaagcggccagctggtgtgattttcttttccttcggccaaagtccatttacaagacctacattgatgttgggttacgtcattgggcaggcaactttggagtgtgccacagaacatgttgaaaattaatcccatttgctgggagggtggaggaagattcatattctcatgactttaagacttttggaatgttagagctggaaaagctttattacttataagatcgtttaaccccttcatttcacagacttggatccaggtagcctaaatgatttttccaaggactcatagcaggagccaaggccagcaccacagatgctgactcctggtttcagccactgttccacaactctgctataatcggatatcaaaattggagttggcaatatgtgaatgaactacaaatctcttgactaatatttccaacactagagaccctgttgttctttcattcattttactctgcatccataggaaacatagcagtgatggctgctgctactgactggctgcagtagtattgcatagtgagcagatcatgggttctggactcaaacagagctgcccaacttctggtctgactccttcctagcagtgaggacttgggtaggttagggaacctcttggagcatctctttcctcatatgtggaaaaggggatcattatggtaccaatctcaaaggattgttgctgggatgacatgaaatgtgcaggcgagttcttagcacagggcttggcacaacataagtccccgagaatgtcagcttctat

SEQ ID NO: 38198 - DNA, 5867 bp, Homo sapiens
tatatttcctgaactttgctctgtggtgggatttatatatataaactttaaaacttaaacatactcatgctatgtctttgttgatgttcattattgtctgtagtcttggagcactattgactcttaggtgaaccaataatcatcttgctgaattgaagtaggaagttgtaattaaagaatttgcttactagtctaccttcccttgctccttctccctctgagtttctctcttcacaatatacctgcctactctgctactctggattccagaaaacatagttgcgtgtggtactcaaagtaagtcgatcagtcagagacatcagttagcttgacccaatactggtgttcaaaggtccttttatagatgttattctctaggctgtacgaacagccttttaagagatgcttttaaggttggagatgaagatcaataagaataaattgggtgcccagatctaaggatgtaaaaggcttgcattaagacggcaattggctttcttacacaaataaaccctttcagttacagctttagtgggtttaatttagccatgagcttcttgataatcatttttttcttgttttttcttgtatttgtttgttttattatcttttattcaagggagttaggacttgattacacgagacttaacccaagattgttatataaattttgactttacttttaaaaatttctgctaaagcactagctgaagtagttcttacttcaaaataaaatgtatgtgtaaactcatgggacctataacccaaaataaattactgtagtgggtcactggttaaaaagagaggtggactggggatggaattgtgttgtcttactttccggaacaataaagggaaagacttggctgcatcctttggcaacgtactgcatgttaactaatttgtggtgaaggtttaaacaaaattcatgcgggaaaatcaagcagtttcaagagccccattctcattccatcagaccactttgaaaataagacactgccaagtttttgaaagtggggtagaaagaatgtaagtctcgccattgacttttcaatgctaaataagtcaaaaggcttgccaattggaagacagaatgaacaccagcatccacaatgatgccggcaatggccctggtaaatgttgagtctcggaaattgaaattgtgacactgtactcatattaagcagcaggaaggagatgatcctcagaattctgtcaatttaagtgtctgataccctttcaacaacctgtgcctttttgttaaaactcagaaaagcactttataaaaaaataaagtgtgttttttttaatcagttctctaggctgtaaatcataaccaattcatatttcttcaacatctgctaggagctgtaacatacattaataaaattgggtagtaaatttagcataaagaagagatacaaaaaagaaggcacacttacatgaaaatatgaaaagaaagaatggacttggaaagaaaatcttctagagagaagaaagctgcccatccaatttccaccctggtattgcccgtgattgcatcacattgcaaactctcattgccaggcttgtccattttctttttgggtcctgagatcattttatcacagtttctaagatgtcaccttctcctctctttcagggaagggctccccatgcctctgaaagttactgaaaggcaggtcctactgaagccccaagagctgaaaatctgagaaggtagtgaaagtgaccagagctctccctgccagcagtcatagggctttccaagtaggcaaccaggaaagtaaacatgccaaggggcagaacaggaggtcctctctgggtaaacaaagcatgcttcccacatgacctctgtctgacctcccaagggaaaaagccaaagtagtcagcacctccagccagtggaagcaacatcggtgacaattggcgcaggaactcccgggctttctgaaggagcaaagaaatgacacagcagtatttctagacagggtgaaatgatgatcatactgcagaggctcctttattctcagtctcttctccattacctgtcacatttccctaactggtaaatatcagttagacttatggagatttgttatgaacccagttattctgttgctcttaaatgggatgagtatttacaatctgtaacatgtgatatatgaagatgcaaggcctgttaattttaattgggttcccgagtaggtcaaagaatgctgagctgctcttgcggttttgtgggcttgtttcagcagaggaactagcagcaatcaccatgaacacccttcttataaaaatgataaataaatacggaatgagactttggggccaaattggcattggtatcatttaatttctttgtgtgtttccagccaattaaatgaatgggtgcctgtggtaattgaactcactttgataattaggccttaaggattcttaaattactgaatgttaatgaatatttcccaagtatggtccctgtatcctaagtgctgccaaatggaatttgcctctttatcattaaaatgtagttcttttaaaaattccacataggaaatagaaactagaaacagaggccgaggcgggcggatcacaaggtcaggagatcgagaccattctggctaatgtggtgaaaccccgtctctactaaaaatataaaaaattaactaggcatggtggcgagcgcctgtagtcccaggtactcaggaggctgaggcaggagagtggtgtgaagctgggagacggagcttgcagtgagccgagaccgcaccactgcactctagcctgggtgaaagagcaagactccgtctcaaaaaaaaaaaaaaaaaaggaaaaaaaaagaaactgaggacttagttctgttgcttctctttacaggtttgagcaggttgatgaaatttaaatctaagaaaaattttactatgaaagagacatagttgaatttaccccttggaacttggaaggccatatataacagtatgcaaattaaagccatatgcaaggaggaaactgctgcttcaccaaagctacctacaaatgctgttcagctgacaaatgcccactatatttaccaataatttgagggtacggatggggaaaggtctgggctatcgtggaggtgtactctccaggcagaaatgtacaatgggcctgctctggtgattccaccaggagatgagtcataccaagcattcttatctgaaagctgtggtttccatttttcttggtattattttacaaacctttattatttgtccctcaggcttacagtgcaaatcagtaaactgaaacacacttagatcaaatacttactgcaaacactgagtaatgagggaaacatttctagggcatgctttatttgtgcttatttatttcatatatttcaaacattcaaacatttcaaatattcaaatattttcttaaaaatctataacaaagctcttacataatcttccttagaaggggaaggtgtaggggggcagaaaattagcttctcttaaacatctttgctacggtctgaatgcccttcaaattcatatgctgaaaatctaaacaccaatgagatagtctaagatggggcctgtagatggtgattatatcataagccctcatgaatgggattagtggtcttataacagaggccccagagagctaccttgccccttttctgctatgtgagattacagtcagaagtgggccctccccaaatatcaaatctgctggcaccttgatcttgaacttcccagtttccagaacagtgagaaatacatttctgttgcttacaagccctaaagtttatggtattttgttatagtagccaaaaggaactaagaaaattatttaggtctcagaccctgtactgaatccacacatatgatttcatcactaaaaagtcatgagattttgaggggtggaaactgcatttctgctaaacaaaaccatgtgggacattagggataattcaatatattctacactaaaccaatctattatttaaatcaacaaattcacactcattcactgaggtcaaacgagccctgccatttcaacaccattttaagtgaacctccaaagccttgatcatatctctgcataaaacatggataataatcctgccaagaagagatgttgtaagaaccaagcttcataacatgaaaaaagccacagcagagctcctggtatttgataaatgctacttgctctctttcctttttcccttcttgacagagtaaggaatgtccacctttgttgcatgctcaaatttggtcctaaataaattttaattgcaccatctgatgtaaataacattaaatgtatgagtcattagtattcaaatcacaaagatttgaataaggttttgagtgtttttataaggttctcctgcccttccccatatggagatatttttgttccagccattttatctatattcctccccttcaaagcttgcataacatttgtgattacttcccattggtcagaaattagttatttggcctcacttagatacaagaaagcctagtgtgttaatcagggttctccagagggacagaacaaatatctattggttatatatatatatgagaaagggagtttattagggagaattgaattggctcacacaatcacaaaagtgaagtcccatgagaggctgtctgcaagctggagaatgagagaagccagtagcatggctagcttggcagccagggaagcctttggtagcattactcactccaagtctaaaagtttccaaaccaggaaagcaaacagtacaaccctcactctgaggccaaaggcctgagagttcccagaaggccactggtgcaagtcccagagtacaaaggctaaagaacctggaatttgatgtcctagggcaggagaagaaaaggggtactgctctggaaaagagagagaaagagagaaaaaaaaggaagcaagaaaaagaaaaaaagaaaagcaagcaagctgaatgtcttccttcttccacctcctttgttgtaagtattcctgcagcccattagatggtacccacccacattgagggcaggtcttcctctctcagtccaccgactatcctgtcaatctcctctggcaacaccttcacagatacactcagaattaatgcttcgctgccactgagccatccctcaatccagtcaagttgacacctaatactaaccatcatacctggaaagtacagtttttatataggaggccatgtgtcagctaaaagtcagattctattactgataaagaagaatctattgagtgtcaagcgctactcattgccacaagaggtattacaaatttcaaaagacataaaggtagcttgagttttagatatattttgaaggtagaggcaaataaatttattgattaattgaatatagagtatgagaagaatcaaggatgtctcaaagggtttggggtataagcaatgaaatgagagttgcctttgaaagagctggagaagacagatggggagtagatttttaggagggctaaaccagggttccttttgtggtttagtgtttgagatatcagttacacataaaaggagagatgcacaaagacagatgatctataagtctagagagttcagagagaaggtctggattggaaaattgatgtgggaatcattaaggaacagaagaaaagagtttcaagttcagagtgtgggaagccctaatatttacagatctaaacaaaggaaaaaaccagcaggaaacactaagaagctgcaaccagtattgtgtccagaattggtgggttcttggtctcactgacttcaagaacaaagccacggaccctcgcagtgagcattacagttcttaaaggcagtctgtctggacagccttccttct

SEQ ID NO: 38199 - DNA, 619 bp, Homo sapiens
taaagtatgggtgaataaaactaagaaggagcaagcaaagaggcagaaagggattcaggaagttatgcaatggtggaagccaaagactatagagtttgaaggaagaaaatgccagcagtgtgcaatccacaagaaagatcatgtaagattaagcacttaaatgaaactggattttacaatcaggagattattgatgacctcaaagaaggcaaacttggacaggaattcatggtggatgtttgctcacagttaactgaagtgtaaatagaagatgaagtagagatatcaagtactgattactttttttgaggagtttgctgttaacagaaatagcaaactgacactatctggaggaaatgcaaatgtgaggaacatttttctttgtttacctaattatcttgtctctattttcgattgtgagaaagtcagaaaggttactgagtgcaggcacatttcctatagaaaattgagcagggaggctgaaataagttattgcagtttgaagagcaaatggaaatgtggaagagaaggcaggcggaagctgactgcagctagagaagcatgtggtgaatgcattttctaggttttgaacacgaggttcaaaatgcttagtgacagg

SEQ ID NO: 38200 - DNA, 1503 bp, Homo sapiens
attaccaaaagatgaacgcagttccatggaaaaaagtagaaatttttaatatagagtattatctgtgttttgagaacataaatcaccctgcactttccttctggcttcttggcaacctccaattttaaattccatcaataggtgtagcccacgtaacataaaactcagatggcagtatgtgcatctttctatttgctttggcagacttctcatctctcttaataagacttggataacacgtggaaatcaataaaattatagttggttatgaaagacggcaatcctagcttattcagggttttgtattccacctcctagggaacaaaaattccacagattttatgcttcttcgggtggctcagtgtagttccttggacaaacaaaggaaggggatttacacattgttcttggtggttttcccaggtgtttattttctttcaaaaaaaaaatcgtagctactttagacttgctagggaaatacaagcattttgggggcaggctctcagtttatttttctaatctccctatactatttattttcagcacctttgcaagttcttcttttaggttgttcttcaaccatcagcatttaagccaatggtttatacatattcccgtgggtatacacagatttatttgggattctctgaggagtaattatacttaaatccctttatttcaagctcaataatgcatatcaaaatactcacgagtgtgatgttatgtagataaccttgaatttgttgttttttttcagtaaatcattctcaaactttcacacactaactgtcatagctaacaaattgcaacataccccatacctatttgcatcatccaggtgtcttttccactgaggtggaaaactgctcttttaaacagcaatggagtttgacctgcctatccatgatgtaacagtttaaaaatatacacactgaggttttaaagattttttgtagtcagtcaacctgatttactctttagaagcatgtgctattttaacgaactcacccactcaagtctgttgaaacatggaagctgatgtgtccatctgactgcagtggcattcatttccatattgatggcatatatttgttattttctgaacctaatcataaagctcatagcctataacatgcagcctgtggtgttgagacttctttagctttgcaatgccagcaattggttcatgatagcaaatggttgttcaattaatgtggaagaattcttgtgatactagaatcacagggtatctcaactgaccaatgttaaaaacgaggtcttaacgttcttgaatagggtaggtagttgatagcttctgacttgatgagtacagaaactcttctttgagggtgcaagaaaaggaaaggaatgtttgtattcaccaggagaaagattggaaatgtcaaagcagtagagaggatggcatagcagctctctaatccagcttgaaatagaattttattatcaacagaaaggttcagagccttaagccgaagaaaaatg

SEQ ID NO: 38201 - DNA, 593 bp, Homo sapiens
gcattaaattggcctcaccaagaaatagtattaattttaatagtgcaatggatgccccttggaaaatccaagataagattttctctgcccagttgcctgcttttgagactccttgtctgactaagtcacttatttacataaaagttggtgggaaattgaggatggaaggggaaagtgcatttcctatttcacatcataaggctggctaatgtctcattaacctatggacttgctcccaattccttttgatttgcactgtgcaaacagtatctaacaactccttttgcaaacagtcaatgaccttttaaaccagggagggaattcctcacagctgggagccctctgtttctgtgttctttttagaagtgttactttccttaaactataaagaaacaacaacagtccttcctcattccccggatttctcttagtttcaggtaagttcttggtagacaggaaccacacaaccctaagatgagcagtagagacttccttgctagctcaagcaccattctaatattctgggattatttttaatttacactgggagttcactgggctgccttttagtcatatatttaggtttgaatatt

SEQ ID NO: 38202 - DNA, 829 bp, Homo sapiens
agacatggtagtttgcaaataggtttgaaaaaaaaagtgtcatctgaaaagcaggcctttcattaacaacattttttcttttcctttctttttattttgaaaaatagttcccactctttattttccctttcctattgctgatatctttcactgtttatttaataccaatggaactggactctaagtatcaatggttcagccagtccaacacttgaataaatattattgggctccaaatgcaaagctgttggatgtaagagacaccagtacattactcacagtggtattccataacagaatgatgggcagcatgccattcaatatctcatcccattccacattacagacagcaattacacaagtatgcatggggccaaaggccttgggacttttcctaagaaaggaacatgcttacaccaagggtcaggtttgatagatatccctatttaaagtaagcatgcagctgaagcttcagccaaagatccagctggtaattgtaatactgaaagtggcattggaaaaacttgttagatttttaagtggcaatagagcagccagttgagaggaaatagttaagcccattcacaggtttaatcccggaaaatatatactggaataactgttacttgtttgtgaggaaaaatatgtctaaagcacttaaaattagcactgaaagtctgggtctttggccccagttatttactcagtcgctatgataaacctttatgcatttttattggggagacttggccacaatgctgttttgctcctaagatgtgctttggctttgtgaacaagaagtgcaccaagataaaccttggaacatatt

SEQ ID NO: 38203 - DNA, 730 bp, Homo sapiens
ttgccaaaatccagtaagcattgaggattgggttctttcttgcctgcttgcctgcctgcctgccttctttggactgccagggacttatgtggcccagggccctttcaagttctctatgtttcaggaatgttctggaagcactggaatgttatttagcagctgcttcttctggggatatagtggtttaatcactaatgcaaatctccaaagcatcatgtctgactgacttggaatgcctaattccctatttcaccatgaagccaatatttgaaatgtttgtatgaagaaaaaaatctctctcttttaaagttgactttgaaatagtattgcaacatctaatgattttgtgcagcgactatgtacaaggcctagcttgtgcaaaatgccagatccttgttattttggatcagcttttgcaagattcttttagcccattgccctgaccagctgggataatactctgcttgctgtcccaggccaaagggcatgactgtttcatctagggtggccttctgagtagctgatgtaattcaaaaagacagttttaatggtctaaacgctgaagccattgcccttccattcccacaccccactgtcatttatatatttataagctgtgctctattctggagtaacttgaaacaagatgtttgaaacttaattattttgtgctgattctcaaaaaggaacttaactattaatgaaagaagagttttgtaaagtatatatt

SEQ ID NO: 38204 - DNA, 1208 bp, Homo sapiens
ttggttacaagaagaaaatctcagagcctttcataattggcctcttgtttctgacaaaatatcttaatcatattaactgagagttctcaatcccctgaatgcttttacaatttaatggggctgaaagtattatatcagcaatcatttgttgttttttctgtcatatgtatgtgaatgtggtatatattaaaaatatgtaattttaaaaattaagaaccatttctttaagagatgattgattagcagtttcacagaaatctgtttaggcaacgtggctgcagtcagaatcaaatttttagttgattgacccagtgcccaaaagttttagccctttggtgaaatgcccaggttaaatggccatttgattgaaatacatgactgaaagcattagggatttggcaaagcaacaagattgacagcatgacactctcacatacataaaagaggcagaataaaaagatacatgtggttggctttccatccaaaacagaattttagtctcaagtggaaggacagccagtgctttcccagagataaaaaggaaacatcatctcattcccctaaatggagtcattgtttaacatacacagatgcaacaccaccaaacacacaaacttacaggccaacagaggaaatgattaaacttctggccccaggaaacaattgcacacagcctcttatttttatttattttattttctcttagctgattcacactttgtaacactgtagccaatgagtcttctatgtcttttacaaaccccctggttaaattggcaatacctttgacagagcttaaatggcttgacagcattaatttgttcttttattttttagttgtctgaatggctgattgccaggaatcaatcataacaccatgtggccaacctaatatagtaattattccaaaataggaattgcatgataagtttattagtaactagtctacaaacaacccattcttgcaaccacacagactcatctcaagatagaggtagtgcttggtattttctgaaattaattacttcactttagtgatgggattgggttttttttcatattcaaattcattgatttatgtgcagtctttatcaattctgtttaactactttcttttgttttcttttgttttgtctattagattttaaatttactcagttgaacacttagagtgcttttacatagtttttgcttagctctttttactt

SEQ ID NO: 38205 - DNA, 2474 bp, Homo sapiens
tatactgtatatttcctgaattgttaatgatgttcaccatatttttatatgattttttaatgttattgtgaaatgcctattcatgtctatttcaccttcaatttttattggtttgtatttagtgatttagatttatattttatgttctttagaatattatctatggaaattattggaggcataaaactaaattttgttccatcaaagagaaatttatttgcatttgtttcgagcctcctacaaacacttaactacaaacactcctacaaataacttaacttttacaaactgaaagttaagtttggcaaattttaggtcaggtggtgcttttggagtccattcggtgactgaaatgagtatgggtttgtaacagaacctctcagagtggacatttaaaaaaatttcctatcctctcaaagctaaatgtaggccaaacaaatatctcttaagtcttcaactaagggcaattttattttgctttattaaacccgctgagtgtgtcatccttcgggatctagttttacaagaggagtctccaatattcagcccttctccctggttaacccacagacttctacccagatgtgtggccattacaacagatcttggctattagagataaagagagaaactccaggaaaattttcagccccaggactcactaaattcctactttcttatctcatttggtcaggggcagtggtgtgctggtaaatatttaacaaatagatctccagaaaaaaagagcaaaaaaaattaaataaataaaaagcccaacttcatagtgtttgccaattttcatagcggaaatattccaaccatggtcaatttcaagctactaatatgacctcgctaaatgcagagttggggagaaaggtacagcagcacactattgtacagtattttcaaactatagatactatagatgtaaagaacttaaaaagcataggtaattaatatttagtgaattaagttattgatgttttattactaacatcaatgtcaatatcaatatttcattcatattgataattattaataggattgtttgattattgataatttaaaaaacctaatggaactatgttctcatgcttcatcatgaatgtgactcagctaatctcctcatgtctgtttttgtgtgtgtgtgttctcttccgcttctcttctgaccttcttctctctggactttcagtttcattcaattttcaagaagactttggattgacccagctaataactgcaaactttggtcactggcaagtctctggattggctgcccttggctggattttgataccaggttctactcccccacttatcttcgtagcagaggttgtggcagggccattttctttaccaggggcaacatgaggcaggcaggcaggcaacaatgattgacatgtctagtacaaataggataactgtagaactataaaaagaaaagtgcaagattccccgtgctcagagttccaccagtggttgtgttaaatcaggatacatgactccattcagggcaagaaacaatttgcctggcattgcacagtgagtcaacagtaaactccaaaactccaatttatgtaaaggggcaaaaatcacttttattattctttgaacaaagctgctccttaaaaaatcacccttatattaatataacaatactaattaattaccttcataaacattcctcaaaattttcttttctttttatgagtgttatttatttatttatttatttatttatttattttgctttcttgctcagtggctatattgtgtttggggatgtgagttcaaaagtcaaggactcagtttggtttaatttcacttatgtggcactgtggttacacatcggaatttaaaagagctgaaaatattattctttcctatctttttttaaaaaaccatatctgaagatcccaacagcttttatgacttattccaaaaaggctttccctaaaataaactggaagattcggttttatgttatttaggtcatttaatcagaaagcaaatcatgtgtctttgatcatgcccttgccagaagatccctaactcattagtgtgctattaatgaggctgcattttaaagcaggtgttgttaagtgcaatcagagcagctttattaagccacaaattgtcttgcgatgacaaaggaagtcagattggtctatgctcagttaacctttgtctatatgcatgacttggctgattaaacagcaattgataatgaccttcagtcttgcaaagccagaaaaaggtgatgcctaatgttggcattcattgtgtgtgatgtgagtgaaaggcaggcagtctctttaatttagaaatctataatgcaattgcaaaattaactaatattgcagtgcaatgaaccactaatttatgtgtattaaactgatattttgatgtgcatgttatttcagagtacagctttattgcagagttaacttcaggtcaaagaaattttgact

SEQ ID NO: 38206 - DNA, 772 bp, Homo sapiens
agactgtggaagaaaaaggagagttgtttttgaagatttgttaatttctttaacaagcatactaagctcctaatatgttgaagatgctggcctggtaaatttatcacaggccctgtttcccaagggctcacaatggggtgatagacaggaacaccaattttattacaatttattcagtgcaacaacagtttatcattagcacctgagaagaatgctgtctgtcattctcaggacctcaactgattccaaaaatgtggagggagatgcagcagactgtagggaaattttaatttattgagtgtctgttatatgctagtcacttcattcatgttgcctcattgaatccctataacaattcttaggtaaatattactgacctcatttcacagatgaggaaacaaattctttcatgggttaagtattttttgcctgagtacagtcaaatggtaacagtttgaagtcgagctctgtttgtctctaaaacccacattattctaaaaccaatgtggaaacacccaagataaatagaataagagtaaacggcaaattgtttatcttctgtgctctatgtgcatgtgtttgttggtgggggcttgtgtgtattctagcttttttgttacctagtttgggtttgaaatccattttgaacaatggcttccacctcatggcattataaatttctctgtattctttgtaagttcaccttcatgagcagacatttgatgacttcatcacttatcacagcatccatccttaatatttagaaggcttt

SEQ ID NO: 38207 - DNA, 967 bp, Homo sapiens
tcacagaaaggttaaatagagaatatatattctctaaaaatatacattggtgtctatgttatttggatttcctaactgtaactatattaatgaataaattccaaatatccattttaggggcactgtgcagacttagctttaagtctggtatagacataagaagtaaattgagtcagaacacaaaaaatccctttcatgtggtagtttatgaaagggatagaattcatcattccgtgtacaatataacaagtacactaagcttttcttccccgagcttttctgagtattgccaagatttctattaatttacatatggtagacaatatgtgattgatttattgattggttggttaattagtttattcattcatccattcattcaacaaatattgattgagaaccttccatggaaaaagcttgggtgaaaacaaacatgaagagtacacagtactttgtccttaagctcctagctggttgaggagacagacaataatagatgattagtaacagtgcaatcatgatccattctggggcagtggtataaagatgcataggggaagatagtcaaccctgcttgggcaaatcagtttttccagaaaggagatatatttcaactagaataaggagaaagaagaaatgagattggagataaaggaactccagacagaaaaaaatgccacaataagccatgaaagtatgaagtaatactagattgcaaattcagaggatttttcatgggcgaggtgctgttgtaagcagtttcatgtattgactcatttaattttcaaaacaaccctatgaggtgagtgcatttctttttataggttacaaaactcaggtctagaaaggctaagtcactcccctgagatttcaggggtggtgatggcacagctggggtttcagccccagtagtctgacctcagaacccccatggtccaacaccacacttctgtttctgagtctcgat

SEQ ID NO: 38208 - DNA, 855 bp, Homo sapiens
caaaaataaatatatttgcatgattgctgtactaatgatgaaattagaaatttgtgctcacagctaattttctttgtcttgtatccctaacactttgtatccaatttcacttaagcagtgtccgctgggaacacagagttgtagcaccaaagggaatgagatttagatgtgtgtaaggtacgtttcattttcctggtctctgacactcacttagcaactgatagcattattgattatagtgatggcgttgttgattttaggagtcattctaagccctgcaggcctctgaaaaaaggatcctgcttcacaaaaaaagaataattttcaagatgtggtgagtttgatcctttaccctcttgtggaataaggagcacatggttggaaatcagcattagcctgaggctgaatcttagacttagtaccttttcaaggtttcttatcaatttaagcctgcttggcctgacttccagccacacccacccttgtgggatttcacttcaaactgggctgcagtacctggttcaggacttgtaccctgtaaaccccagcaactgccattcctggaaatcctgcattacaacagccctgcctttgaagagagaggttactacagtgtatcatcatgttgcacaagcacaactggagttatataatcagaattcagctctttcattttgtcactatttctttaaatttgttcacattttattgttcttagatgaaaactcagacaaacccatccatgcctttttgtgtgtcttttaagctttaagtcacacacaaaaagtcacacacatggtcatattgtccctcaagtcatgagttctcaaatcagaaataggaatctagttcaat

SEQ ID NO: 38209 - DNA, 640 bp, Homo sapiens
attcggacctcaaactcatttggtcttcttttccctctgtggacaaggctaatcccccctaagggtttataaatgggcccggctgcagtttgcaggtgcagtcgtttgctggagcccaagtcaagatttacatatgcaaatgagcatggatgtgcccaaattgagtaattgtgcatgcaaataggtgattaaatagacaattactaaatctgcatgaacaaatgggagttgtgcgtattcaaaaagcaggggacacctgaacattatgcaaacaggcagctttcctcaaagcctgtggaaatctggcccccagggcctcgaagttgcatcagtcccagagcaagctgggatctcaagttgcacaagtggaatttacactttgacctcagctgccatggtaatgtctagatctctgacaaggtcatctccaggaagtacatgggaaagggttttgatttctgccatttctttccatatactagatttaaagcagaaatttaaactaatgattttaaaaatgatcagtagtaagaaataagctttagttattttagtgggttatagtgtacacccactcctccaaaccaaaacttcgaaacaggcatagagaattcaatccaagttaaacaaccgtaccaca

SEQ ID NO: 38210 - DNA, 789 bp, Homo sapiens
aagtatttttataatattatagaattctgaataaattatcaagagaggagccactatctttgtgaagtgtggaaatgaaatttgctcatttaaaaagacacatctagagtgtaagaaatgttttattgatacagaatatactcatgcatactcacactgcagacattttagatggcagcaagtgcttctttcaagtgttgcctttcgacaccttggttgactgatcttatggtatggcttggtgggaagggaatacaggtcaataagcggagagtggtgtggtagagagaggacaaagagtgaataagtggatcattgctaatgtcagaattcctgaaatgcctgagatgcctggagcattcctgctggagattgaaataacataacagagtgaccccaggtctggagattcttgcctcatttattttgcattggaagtcacagtaaaaatggttcttagtttcgcttgagcactgacctacatttaaatagaaagaaaccaataacagttatacttaaatccccaatgccaatatgtctgaaaaaatatgttgtgaaggaaaaggaagaaaaaaacaactttcatgggcataacttatctttgactgtcacaaaatcaataggctttacagagcagaggaaattcaatagctcggcattcataataaagattggtttgggtgatttgtctctctctaataaggcaggccttggaccccagcttcccttcctttaaaactcaaagggggtgaagatttcttcatcacagccaagtcttcttgcttgtct

SEQ ID NO: 38211 - DNA, 676 bp, Homo sapiens
aggcagaggcaacactagcacaagtatgcattccctgatcccatcatgaaacactgaagcatgccaccacgagctgaggctctattttaagtacctgagatagttaataaaacagaacatcctgccttgaaggagtttctgttcacatggttgcatcaacacagaccatgacatttgcaaaggaacatctcttgggtcatcgggaaggcagctggtcctgtagctcatatgccttcaagttagtttaaaactatttcaatctattccaatttgtctagttgtttcatgatctaacaagaattattagaaccttcagcaatgcctggcttggaattccaactgtcctctttaagaacaagcaagcagctttttgtggcttcatttcctcaagcttgagctctgcaacagcatgggagtcaagagttcagggcggtcacaggagatctttggcctttgagggcagggcctagagaggctgagatggggaagtggcgcctgactcttcccacccacattcacaaatatgtaagtgttctactaagtactgtggcagtgacaatgatgactaagacatagctgtgtcttctggaaggaaattcacagaatactgggggtgatgaagtcatgtattaagtataacactagataagagggacatcctgcaagaataacttaa

SEQ ID NO: 38212 - DNA, 1751 bp, Homo sapiens
acatgttgtcccttgataaatcaaaacctcaataggcaaagtcaggaagagagacttaaaaagcagctttagaaaaaatgtcactgtttatatttctatcaaaacaacatttgcttggaggctgttcttgtgatctaaaaggcactatagtcagggggcatcgccctctattcacacagtacactctgggtccctggcatctgctatggaaccccaggcaacagtgcagctttttctctagctcctttacgatggagagtgacaacttcaagccacgtgtgtctgctaagcaaggaagaaaagaatgttacaagaatcaggaagaaaagtgtgaataaatagagaattaagtcagagctgttcatgagctgcagcagctgcctacccacatctggaaccaggaccctggtagagcagaggctgacagctgaaagatatttcccagaagcttaaagcgtttagagtttaaaaagtcaagtcattttaagtatgaaggtatattagaatgaggccgtctctgaaaatgacaagctgtggctgccttttcagtcgctgaaagtactctgaggtgaagagaataattcacaaatagttcacccatttgaacattcgaaaggcatcagaaacgagatggttgaacactatttatggctacattagtatttccatattagttctaagaagttcacactttctcaactagaacctttcctgtttctgtgtccaaagtctaactctagcacggcacctgctgtaaacatttgaatgactctttccaaacaggcagtcagaaaattctagatcatagagtggagctccaaatactggacatataaatgagagtttcctctactcctcaaagtccgcgagagacaacctgatcccagacccaggaaggcaaagctgccaacagttaggattgtcagaaacctaacgaggcttcagagatctcctttcccagaaatcactcacattaggaaaaaccactctctccctgtggagagcttccagtacaagcagacctggtatctttagagaactgttccaggtgcctaccagctcctttcaggatacgatttgtatgatgttagagtactcactgctaattccagatgtaatactgctctatgacaatggagaccatcttttccaaataaaaaaattaggaaaagcgattgaagaaatacaaagaggataaaagagtttaattaaaattgagactgccaggaaaatcctgaggaatggtttcaacattcaggccaccacatgactgctgggaatacccctcccccctttgtggactatgtttcccgtcccccacccattttatggccacaaaggagatctggctttgtgctcagccctgagtcacctgctggagactgctacctactaaaatcaagtgggctggcttctgtgcttagtgcatatatctaaatatctgcaaaatttagactctggcctgattttaaaatgaaacggagttctccagttaaaccagattttcagggaagtttgtatctgcttttgtttttatccggttaacagtataagtgaaaatacatatgtagtgcaaaggtttatgagaaataaaccaccgtgcttgtggaggtagacaggtaatttttaagaggtttaacatgatctaattagggatgacactttgatcccattctattacttttgctaatgaacagtgctgcttttagatcaacacgagtgtccaaaggtaatagtaaaactgattccca

SEQ ID NO: 38213 - DNA, 1647 bp, Homo sapiens
agagagcttttgaaatttcagatctacccatctttgtattcaagatcattaattctgggtgagagcaaaatttccagccaaagaatagtcacaacgtgcctcacccagaaactaattcttcagacacatacctgcctgctgaagtcaccctttcgcaaatatagaacacaccatatatgtacataattaaatgtatatgtaagaagattcatgcccaaaaggaaggctttatggaaccttttgcaaagtaccagtttaaacactgtgaggctttagaggagttggagaactgaaaactcttcttgttgaatatttcataaatataatttatttaacttgaaccttcatctgaaaagcttccctttcccccttaagaaatttttaccaagaagagtaagctaaagctattgcatatttttggcagagaaaagtagattaacttttggtatatttagtgaccaccatgagcacatctgaacgcagcagcagctaacatgtgagagggcatgatctgcccaattattacaagattgcatttcctcatgccatctctaatcagaggaaaaggtttaaattagcagcaatctcaagaatgtgaatcaagtctgggcagaacttttgtatctgactcagtgtaagactgtttagttcttgtttcaagtagtctgcacaacaaataccatgcctgcaaatatgcaacaaacactcccaggaagaatatgtttgtttcttccatggattcaggtaataggaactatgaacagatcttataaaattttgtgggcatttatgtgttgctattaaaatggaataaagattttctatttctgggggcaatgtagatacaaaattagaaagtcagacaggtagatatgtttggcctttaaataaagtttagctttaaactcctaatcttattgaggtacttaaaaatatgtaagaatcaaaatattttactgacagtggaaccatggttaagtcaagagctttagggaaaagagtatatgtatatgaatatgcctaaaagtaaatagggataatggattcaagtttttgtttcatatgatatctaagaatcagatttcttggagtagaatcccatgagtgaattcatctttccacaaactatgtcatcaggctcatttttcaaaaccaatgtgcacaacacctggtcaaacttctgcgtcaactacattccgtgtcaataaaatgtttgctttgccaagggagactctgagaaagtgaccaatatgtagcaactgagaagtcatttaaaggacatcagaaaatgactgagccacgactaattcatttggcagagcccgccaggcaccatgagctaactggagaaagtattggttcttggtgtcatatttacatgcaaaagaactggattaatgaggaaacatctggttatttcgggtgttatcagaatgaccaatttggatgcttcattgaaatgtgcaacttagcaagaaaccagattggaaaaaaaacagcactaaatgcggctaaaaaaaaaaaatctacagacagatgtagacttagaaagagcattcatactgccccctcccctttttaggaggttccttggtttaaatggaaattactgcatggtggacaaatctccaaatgcagttttatgta

SEQ ID NO: 38214 - DNA, 3912 bp, Homo sapiens
tctacgaactgcagagttttgattaaatgcatgaagatacctgaagtggtatttacctgcacatacgaaggacagcctccaactacaaactgcccacattttggtttatgttctagcctttatcaaacaatgtgccttttctcccctaaaagaatcaatttagccctttaggcatctattccgaaatatccattggtggtcctgtcactcttgaagcttgagataggaaatgtatagcccagcattcctataagcccacccattccccctccctgtccagatgggtttcattcctaaatccaccaggaagcctggctctgcccagaacctggcttgctttgcaggctgtgaaaaccccagcacgggatgccagatcccctaagactaagagctgaagccaaccaacatcctgggaaacaaaaagacctgcctgtccagcgtaataaagccaagaagtgtacagctgggagagatcctgcacatcatctagctcagtgtcctctttttacagatgatgaaaatgagacccagggagataggggatttgcacacagaaatccatggtaaccaggagctaagatctaaacacagctttgtatcaacgactggttcagacacactgctccaccccgtgccaaaataatttttatcgtgcattaggtccaaacagggctgccggttggggcagggagtactggtgcttattatcggtaccacaccagctgtgccatccagtaggcataacaaatacataccatgatatgtctgggaatcagagcccattaagtaccaggctgtaaaataattctgataggaactactgaaataaggaaccacttgaattctgtctaccaacaccttctccagagtttcgagtctgtgtaccatccccaacagaaaacacggcggcaaagtcctgattctgctgcccttggaacggctgagaaagagcctgactccagggggaaacaaaatcagcccttctcactgcagcagtcggagcatctggcaccgaccatgagaggcgctcgctcgtgcgagacttctcgcttgcctttgtgctgggactgcctctggcgaccctgtcagtctggttccttcctcttgctctctgaacccccgcgtccctcgggggctccagcggttcaagcccagcggttctgtgggaagctcacagaaacacctccacgaggccactccccgctgggcgcggctccacctcggggcctccccgcctaacagcaaacctgcttgttggcacttgcgcgttcctcctcgccagtttcacccggatttggctcggtccgccagcaacccagctccttgctaaattcccagccctaagcgcaggggcctttacccagccttcccagtgggtcctgcttttccatagccgacacccttcttggaaacaaactcgctagacaccgctggttagggcggcgggtgcctatgtcccagcccaagacctcagatggtgcccccctgccactccccggcctttgacctggcctaaacccctaactcagccggggggccggatgccttcccaccgggagggtacctagccctccctaccaccgcgcgccaggtaggtgggtgggcgcatgggaaagcaataacccggccttgaacctcagacccatgaatataacccaccgcggcgccaataattcaagtagactggaaggtcaaaggcgaatagtgttgcccgcggccttggaggcaagccgagtgggggatgcaatagaggtcaggaggggctggtgtggtgaaggggaaacggacgtgatcactgggatggagtgggggaaaaagggaaaagctcggtacaggtgggcaccgaggcaccgcgggcggccggcagcgcgaagaggaggttcagctgctgcccggcccctgcgccaccagcgcattcctgggtgtaggcgtcacgggcgccgcggctgcctgcgctcagtttctttccctcaacagcggcaattgcacgtaaccgcgtcgcctctgggattttctcccgcctcccatcacccccgcggcgctccccgcctccccgccaaccagcaggttagatctaggaggggcgcccgccttgagccgggtggttccgccgaggcgcacgcagcgcccatgcaacaccccacagtatcgggccacctcggccgacccaaggcgacttgaccacgactccgcgggcggactgcgcctggccactagtggctccaaccgcggggtcaccctgcgggcacacagcgctctcctctccccactgctatctcctcgtccacgctgtcgtctgccgcccccacccagaagggatacaattttcgcccaacagggaccgtgggaatcccttgggaggggcgcagacggcttgtagcgcgcggtttcccgagacccgccgcgcatcccccagcgactggaaacccgccccaagcgccacgcggtcctcccactcttacccgaagtgtcccacaggctcaactctattctttgtgtgtcgatttcaaaactggccgtgtaattctcaaacactgtaggaacgtaattctggatagacaaaatgggcaaaagaggaaggaaagagggcaaagaggttacgtttaaacgcacgacacccattgaacacccttcccctccccgctccccagttaagaaagaaaaccttcacacatcagaccacacactaagcacatggaccctttccgaaacccctgtcctactccccactcaccccacccggctctcacagatctgctgacccgaatctcccaaccccaggttatgcacacaggaacgaacaagtttcaggagctaaccagcccatgtgcaggcgcgtcccaaccctaaaagcttccagcgcactttccctttccccgcagtctaatcaggggaaagtagtaaggaccgagaaagacttttttttttctttttttttttttttaagggaaaacggatgaaagcggggaggcccacctcgggactgggatcccactggccgaccccctcgtggaagccgcggccggccacactcacctcggggaagcagtccttggcgaagacatggagcagcgcagtttttccacactgactgtctcccaccacaactatcttgcatttcacgttctgattaggatccatgatagatttgctggataatttctggctggctcttctctccttcattgatgttgccttattttctcttggaacaggaattttctcttaagaagaaaaaaaaaaatatatatatatatatatatttctctctttataaaaagcagatataaaaataaatcacaaggctgatgggcaacctctgaaacgcggcgcagacgaggaggagagcgagaggagcaggctggttactcccctccaacaagttttaagcctgactcctcaccgcgcctcccaagtccaattccgagccgactgctttgtttcacgctctctgcgcggctttatacgcccggccttccaatcctcttctttctcaatgagaggaggaaactgatctgcctcctccccttttatggagcctgggagcgagcgctgttggcgttgcatgccgaaaatgtaagcagtgcgccctctagggtgcccattcgggatctattttagaccaaggctcttagacaacatgaagatcccaaagatgctttgctgacaagtccacagggcaaggtgggaaactggtatctgtgcatactgatttgaactacaatccctttaaatatagtttaataggggcttatctgtagaagcctcatgagcatttatgaaaacaaaaacatttcccacccaagttaaaggacagtgataaaacataggaagcaaatcttgggtggagaatagttgagtggttctatttttttttttaatggtttgtatcaggtacataggccatggacc

SEQ ID NO: 38215 - DNA, 1686 bp, Homo sapiens
agaaacacactaaaggcaccccccttttcatgttcagtgtatttatggagatcttggcccacagtggaatattgtaaggcataatcccaatagtttattcacagtcacctgcctctcttcagactccagcagaagtgtttgaaggagcaagtgcataataaggaggaagcacaggtttcttataggcatcatcaatggagcagagagatggctgacatcaaagcaagaaaacgtgcaggatgccttcatagatgttatgtcacaaaatatggatatgagtcatgggcattctctttgagaatttaataagatgacagatattaaatagtttcaaatataggcatttcaatacaaaattaaagacaagcgtgtaaacttgtaaactgctctgtactgaaaggtggcaatttcacaattgtctctttttggggtggtcagaagagggtgatcactcagtcttataaaacatcaacaaaatagaaggcatttttttttgaagtgaggaattgaggaaagaacattcatacaatttaatggattgaactggttatttaggaagaatctgttttcttggaagagaatcttttcctttattttctcttaaaattatgcctatttgccctctcaaggacactgcactaagttgtctaggctgtgtggtaagagcactccagtctgggttgaaacattcagccttgttttttctcatgaatgctaactgcgaatatgatttaactgctgctgtattgacttagtcctcactctttagccaagaggaaatgacacaactttgtgagtactgaataataagtcattttgaaattgatcatccctttctctgtttatagttaatttaacaaatagtccgttgcattctttagaaacccagaccacatgattttggttctgtgtattatagggcacaaataaccctttccacctgcctcttcaaatttcagatctttgatgcctgatgccatttgtttatacttcagtatttcctaagtaaagaaaacaaacaaaaatataaaactatcagacccattgattactttatctactaaacacccaattatactttatgtcaatttgtcagtgagatatgaaaaatatttaaggaattgccctaagaaaacatttttaaggatgagttctttatacattattctcttgaagcatgtagtatgttccaaagatacaccttttccagtattttaggagtagtcaaaggaaaacagagattattactgagcaccatttagaacttcttttggagactgccagagcttcactgccaagctgatgagatgcactgaggggagttatttatggctatgtgcacagtcaagtggcatttaatattttaatctaaggcttaaaagaaagatttaaagatgtcctatcaagtttctagaaagatcttatgtggaaatttttgccccttctgttgaaataacaacaacaaaaaatgtgaaaacttggttgaggtcagtgttactttaattaaaaaaagcagtaattgttagatcaagcttacttaaaaaaaaacttagtagccactactttaatattattgaactcaaagtgaggaaacagaaaacaatggctaggataccttgaagagagtcattagcttgggcaaaggcagagagtagattttaaagcatttaactcaacatgttctgt

SEQ ID NO: 38216 - DNA, 1445 bp, Homo sapiens
ctcgactttgggacccagatcctaggacctcacatgtaatcaggatgtgaatgcagacattcattgctattgattcatctagataatcttccattgtcactagtcagtcattgcaaacaccactggattttatcaatccactttgcctgtgaatatggaatactggaaaaagtttctaccacccaaacaaattttaaattggccttgcttgtttgcaccactcacatcaaactgtaagaacatctgcagtacctacaagactgtgatttcctagaagagacaaccattgatgcatcagtttgttgccctgtgctttgatcagtgcacagtgtattacatatgcccagtaactgacaaatgaagagcttcctctcccctatctggtttgataaaaaaccctgtttctgtaatcacttggaaaccactgtgagcttataacaggaagtctctaacttctaccgattctattacagaaatcacttctggggttatgtgaaacagaaacccataaaccatctatggagatgaagtcaccacagtgctgtgttggacttcgtcctgtgagtgtggggtagggaactgtcttctaggagcaggtggtcatggtatagtgtgggagggaagaagacaagagaaagaagacagttttctggtacctgatgtggctttgtcaaaattccaaaatagatcaagttcatttgggatattctttcacattttatttattttttattactggcaattgtctctcaaatcatgctgtgcttacttgctccccactcccactccctacctccacaatgccttttttctgttctatactttcaccataaaatctccgcaggggtgggtgatgagaaaggctaaaagcagcagctgattttaatgagaatgacagcagccttgactaaactaatatccactaaggtttgaatgactaatagcattattattcctctgttatttgcattttgaagtcttgccccagagcgaattataccagttcctgctttcacaagttcctttctccacgtttatactccacatccagtgtttagaactgaaagagttgccacacatctaaatattcctcacaatgtctgttctgaatcagcatttttgcataaaggtgaatgtgggttctgtggaaacagggaattctgtgagcctgaaactctgatgaatggctttatgtttagaagtcagcaatgctggtatgtgggaaaatgttgctgttcagatctttttggtctccatttcatcgtctttgcagcttaaaaaataatccagtgaaaatctttgatggggaatgtagcctcaaacaagttttctttattcttttgtgattctagaaacttgattatatcaattaggaaggctttaagtttcttgagtgtctctagggagtttcatgttttactctttggtaattcctataaaattat

SEQ ID NO: 38217 - DNA, 1571 bp, Homo sapiens
cttaagctagtgtcctctttttacacacttggcgtggggagtggtgttaattttttgttttactcatactatgtgggtgtgttctctgtaaagatacgtttatctgtatttgtatctacatctgtgtctacacctgtatctgtatctatatctagatctatgtctatctatctgtagatctgatgcaggattttttgcttgttagttgagctaaatccgggttcttgtctcaaaccaggaaaaattaggcatgtggacacattgacaggtgaggaggatggaatttattaagcgaaaggaaagctgtcagcaaagagaggggtcctggacacaggtttccatctcacaaattgaataccaggccaccacacacaagctggaggccaggctcttcccctgcataaggagcgaatttttggtggctctaccctgtctttccaatgtgcctgcaggcccttagtctgagccactgtacactgcatgtgttaagggatgaaatttttcaccatgggcatgtttaggcaaaaccctggtgcacaatgacctgggcaggtcagaggttctccagggacaccccttatctgcctaggcatttgtctgtctcttgccactatcctatctgcatattttagttccaactctggggctagaaaattagtctgtaatcaaagaacatacttgctttctgttgcttctcaatgcccagggagactgactagcctttgggtctgaatgacaattcaccagtgcggctcatgggcccatgttggttcaggggtcattctccattctaattaaccagggacaattagcaggggcagtgggacttagactccttaggcatggaaagtgaggagagaagactggaaaagaaatttacaggagcattctccaacaacaataatcctgccacctaggacatcaggattgcattttcagtatacattacctggggcatttgtttaaaatgcagctttcagtgctccatcttttgacgtgtttgttgatgttgaaaaaattaatatgacacatttttacctgttggtaaggttcatactcttaacctggggtaaataaaaagatatctgaaattaatcttttcagtataaagaggcatttttagcaacattttctgagtgtttttgtggaactaacaaaatgagagtggaaattccttttttttttttttttttccaagacagagtctcgctctgtcaccaggctggaatgcagtggtgcaatctcggcttactgcaacctctgcctcctgggttcaagtgattctcctgcttcagcctcccgaacagctgggactacaggtgcaagccaccacgcccagctaatttttgtatttttagaagagacggagtttcaccatgttggccaggatgctcttgatctcttgacctcatgatgtgcccaactcagcctcccaaagtgctgggattggaaattctttaaaaaaatgatacatgaggttacacatttgattaaagtgaatcatataagaagtaacccaaagcttagttacagggttattaggattttattattcctggtaaatattattt

SEQ ID NO: 38218 - DNA, 806 bp, Homo sapiens
tatttaacacttacttctccctgcttctgtgtgctgtcttcctctccccacatgtcttctttgaaggattcctgagctgcaactcctcccccatcctcttctccaacattctgaggtggtttccctattatttccactgccagccagcagattttccacttgcagaaaggagatgagaaaaactgaaccgtggtctagccagcttgccttccctgactagttctttgtctgatagaagggaaacttctgtctgctacagcatattattgcggaattgtgctgtaaacatcctcctccaagctacaccatacagaaacgcatctaatgttgactccagtctatgtcccttggtacctgggctgcttcttggcatcacaggttgagttgacagtggcttcccttagtggggctgaaatacatggcaaagagttgtcatgaggaccatgtgtttggagagggttgtgtctgcctaggagtcataaatgtgacatgtaaggtctaaagtttcctaagaagtgttaatatttaagagtaaatccaggaatttgtaaatcagcggttttgctttgaacagagctccagccagttgtgacattgttgagtaaattggcagcctgtttgctgttgtttcctctttttgaaatttaacctcttggaaaaacagcagcctgggctgttatatgtctcaacacagaccaccaaaatagaccacttaaaattgttttttgatctggagtaccagttcccctctagcaactttctttttcttcttttaaatcattttgacaggacatctttgctgggtg

SEQ ID NO: 38219 - DNA, 2554 bp, Homo sapiens
gccttaatctgatgtgaggctatttatagactttattctactaagaatatttatttcactgtataaattttaatatatttattgtgtggtgcaccctcaggcctgtatatgcagaatatttagaatatacactgtatttcctttctaacatctaaaatattttgaattttcatctaagagttttggataaaggaatgtgaacctatgccacagagaaaagaaaattcagttcattgagcctgattacctccaagctcctatcactgtgggcaagggttgaaagacttgtcatattgggaaatgaagtccttgtccaaatgacccgatgaatcacttccttcctttttggccagtctggtctgttcatgggtcaccgaagacaagagtcaaagaatcactgtgttttagaacagacgtgctgatctaaattttagattctaaaatatgctctgttgactaagctgcattgcctggtaacaaagacaatcacaatgaggattcattcattccataaatatttactgagcacctattatgaaatgtcaaacatgttgtaacagaaaaagaacctagatacaactcaggagccctgggttcaaattggtttagccatctaactcctgtataaagtttggcaagtcatttaacttctctttctctctagatatttatgataattaaatttaataatatactcaaaagatttgtacattttattgagcttctgtgctaaatgccttatatgtaccatataaagaattattatgtgcagagaataagattggtgggcatactaggatgggtaaaacacccactctcaaagagcaaactgatagaggagtaacatatgcacctacagaactatgccaggcttttatttttttttttaatcactgataggcagcaccaaaataattttggaagataagctgctctaagtccttgcaagaaaaatatggacgggggaagggagaaagaagcatctgaaaggaatttcatctaaaacagctgccttgctaagtccctgtttcaaattgcctgttagctgatctgacttaagacttttttttgtaatcaagaaacaaaatctgtggggtttgctagttcaattcatttgcacatttctcacagctacatatggcaggactggaatgatcaaatttccttcagctttatcataaatcagagagattccaatgtgtccttcacagctttaagttttcaaaaccatcacgactaatgaaatatttattctgagacctacagccacttgcatggagtcacgttccttagaggagagactttgacaaaaagcccatcaaaaaagcagctgggggcccccgaccctggccgcactaccattctccacttttggcctttgcatctgccaccttcaggttaccaaatggcatctctcataaactgtaagcacaggcattttgctcaacccgacagctttcagttggaaactaatcaaactttaaggattcgacttaagagcaggaaaaggctttctcaaggttttattactttgtaaaatgtattaggttacaaatcaagttaattttaaaagagaacctagttattttttactagatggtttaaaagttttcactgttatataaagccaaacaaccaaaatcagataaatttccctacaaattggctgttggccaagtgtttgcagaaaaactaggatgaacccatttgctgcaacagcaacaatgacgcaaatgatgaagaggctgggctgacacagaaatgtagtccttcctcgttgagattgttgaccgaacatagaaaagcatttacaaacaacctagggagatttctaccatgctcctttgcaatgtttctttgctattcttcccatcaagaagtgaaatccatttctccttctcttatctgatctgtctatatggccagctttcaccaacagaatgggacaagagtggcagtgccagttctggccaggttttaagggttcttacaacttttgcttttgctctcttgcaacaccgactgagactgccatgtaaagggagctggcccagcccccctgaggacaagagcccattgcaaagagagcctatgtgccccagccagcaagacgagtgaagccatcttgttccttctggccaggataacattctagctaaatgcaaccatacaggtaagcccaggtgaaaccagcagaaaagtcagccaatcacctcacaacattatgagaaataaattattgtggtttatgcttctatgttttagggacacctgcattctggttttgaccttgccacgaattagttgttgacaaggtatttgattctatgtactttatctcacatctcaaaggtggaaacgtgaactacataaaaactaatgtcccttcttgtttctgtgttatggaaacttgccccaaatctgcaaacttcaatccatccttgatagcagaaagctgtaaaggttcactaagaataaccaggttgggagcagtggctcacgcttgtaatcccagcattttgggaggctgaggtgggtggatcacgaggttagg

SEQ ID NO: 38220 - DNA, 1467 bp, Homo sapiens
taaagggcttgggtagataaagtatagaagaaatagattctgtttgaacaagaattgttctgctttgttttctatcattgtggttgaagagcattttgcaaatgagtgtgggtagttggctgttaccatgggtcaggtgcatacagtacgcacaagtcaactgtcaggagccaaaatgagtccatctgctccctttaaaaatcttatccagttattcattcctgcttttttatgcaccaacaacattatctcttgcatatactctgcataattggtgatttctgattgcctgctgaaattctatcttgatgctggtcgtaatcattgcctgatgggaacatttcattcttcagcatgtgtagtcataattattttagattcctatgtaaagttaatccaccctgaaggggaatccctggatgtcaccacagaggtaacatctaacatttctgctattttactttgtctgatctttgttgaataagtaatcatcttctgtttacaaaactagcctagtaaaattgaaagtattatgtgaagcataatgtgtgtctttggcagataaatacacctagttattgatatgtgctgaatatcgttattaaaaaaatagagttacactgaatgaatgaaatatgcactgggtaatgtatttcattctttcttaaattgcctagaaaggctaagttaaacaaggaagtattagcagttgccttccttggtactttcctcagatttttcttacctgccgtgactgttaccaagtaatgctgaatggaaaatctgtgacactttctataataagacaattttgacaccaacataacatataaactcaaagatatttctagtctcaaatacctgctgctatggcaacttccaaagaactcacttttcaaaatatttggatatactgagagcatgttaaaaatttattgacttttccaaaactctctgatttgaattaagacctatttttatctacctgttaaaaattatttctgttcattataatttttgtcaactagttttagaggttaaaccctaggagataagaaaccaaatagatcaggatttcaagaagtaaaacatgaaatgattgaaaattacaggtatattgatgtatgtatgatgtttgtatgtattctgatgcaattaaggccagcgttgtttggtgttctctgttggaagtcatgcccaatggatgtaaactgtaggatactatattacggtttttgggttttttttttttttttttgaagattaaatattgatcctgtggctttctctcagcaaatataggccagttttgggaagtaacaacaggtgtagaaattacaagggaatactctgttcacatctgcacatcatcacgtttgaatggtgttgggcagtattaattgctggaacgaacggtctgttttgctgcagttcaaatgttcatctttgttgaataaaacttggtct

SEQ ID NO: 38221 - DNA, 549 bp, Homo sapiens
ctgacctatagggatggtaggtgccatatattattccctccagcctacagattcatttctttatggattacttttatttccattattaaccattgctagatcagctggagaacctccatttgcagccccagggccactctccacctgtctctaccctgttctgtgcctgttggcagaggctgctccacacgctgcatcaatggactctgtggccctccatcttcctgttgggtttgacatctggcaggagatcagaaggcaagaaaagagcaaagtttgggtgtttattccctctggttccctccctgtgaggcctctttacattggcagagctacagccaaaggccgcacctcttgccagatggccctttccacacaaggcccctttctggattccagtaaaggctcctttcactatcaccttaagcctggaggtggaaagcctgctgctgccactacctctgaggcattgctccctcattttcaggctgcttataccctctttacaactttgtaaatcattctttttattaatctccttaaattacc

SEQ ID NO: 38222 - DNA, 1381 bp, Homo sapiens
taggtgcacacagcatgttagtaactgattgtggctatgtaccagtgaactaaaatatattttattttaatggatgtgtattatttttaaatggctattaagttgttaggacataaaactaagttgttttgacttagctacttaataaatgaaactcaaatatctcttggctttggggcaatgtgaaaaaaaattactgtaatactaaaggtaccaggaaccaaagaaagtttgggcatctttgtcctaatggttaagaatgtggactccagggttagaatgccagcttcaccactaaccagctgtgctactttgagccaacctctctctgtctccgtttcttcatctataatatggagcttataatgggacataccacaatagttattgcgtggattagtaagtcagcgtatggaagctaggtagaataaagccagtcacagagcaagtgttttttctgttagtattagccattatgcttatatgaccagctctcactacagtccttccgattgcagttatgtgcctgctcagtcaaataaagaacatccaagcttgggaaggctgtgcatgtggagcctgtgacctagagaactttcttccttcattcctttttttgtttgttttatatggaaggaagcataccagaaattttttggagaaatttcagctggcgttcagtgctttctcagtcagaattccagagaaggtaaggcgttttaatgttctacccacagcttcagaaattttcatgtgtaccctttgcttggtaaacagaattgaaataactttagtccctggcaaggtgagtgtctgtactgatcatccctttgaggaaatgacctttgaaacaattactatacctattcccacatcaaaaattagctttcactttcttctctgtggatctttatagctgttcacagctatatttcggaaatgtcacatctcttgagctgtgttttgtctcacttcccaggtaattattagtttctaaagaaaaggtgtattttatttctttttaaagttttctctttttttctaacaattactgtgtatctattttatgccctgaaagtagcataatagcttctagagaacaaaagattctgtttcagatattaaataagcaaagatttaacaatatgcaaattaattatggcagattcatactattataagttatagttttagagattattcaatgacattctttttttttttttttttttttgagagggagtctcactctgtcacccaggctggagtccggggggtgatatcggctcactgcaagctccgcctcccgggttcacaccattctcctgcctcagcctccctagtagctgggactgcaggcgcctgccaccatgcccagcta

SEQ ID NO: 38223 - DNA, 952 bp, Homo sapiens
tttaggagcacatttgggacaacatgtttgaaaagcatggcaatatcaagaagagaattattagggcagctatgctgccagggtcttatgcatagacaatgaaaagaacaaggcagagactgataaatcaatccaagacaaagcattggtgcaagacaatgaaagcgatgatacagatacttcaaactattttcaaagaaaggggaaaaagcctcccatgtattggggaagtaaacccagcagaaagaaatctctcccaccctcctgccctcatgctgttgggaggtgttgataatgacctcgaggaaaatcttggaggttgtactgttttaaaataggcacttggccaaagagaaggaagtctgcagcatgccaacatccagtctagtacagggtgctcctgataaggaacagatgtaaacacagacaactgttcaaatttgccaggagaactgatcatcctttagccagtaatcaaagtctagaaagtaaccagaaatgctttcctataaacaaagagaattggaaaaggaacgggaaactaacatccaggttttgaaattgccgaaaaaggtgaggatgtgctacatgttcagacagaacaaagacacgcatgtcaaagatgcaatgtggtgaatgttgcagagagggtccaggtgcagtgccctctctgtgacgggacttggggctgggacctaacagccctgcagggaagggcatgggaaattaatgggcgttgatgctggaattgttcacatacctcatcacacacaatggagaagttttactgaaatgcatccctgggaatggcctgtaaaacctcagcgtgtctgtttccaagttaagaacacaggaagttcagaaactagaaaacaaaatgcattttgttgggatacttcatgttgcaatcttgaacatttgggtttccaagatcaaggctcaaaggctgcct

SEQ ID NO: 38224 - DNA, 1644 bp, Homo sapiens
aagtgagtctaatgcataaccagaatcaagagccaccatcttggatgatctttcaggagctctgaataggaaatggcaaggacagaggcgtgagaggtaggataaaaaggagagaaatgaggtaattgagatgttgcttgcagatgccctggggatgagaaagctagtttttcatctctgagtgcaaatgaaaaatgagctctgcaaccagcccttgccagtgacagttcctgagccactcttcagtcttttatatctggttctggcagaagtgtagcagtgcagccttttgcaggttcccagtggtgctttggtagaccgctgtccccattctgtgcctatatgtcccaaccctgccccttcctaagggacaggactctgagaggcacaattgcaaaagtaaggctttattggctgataatttttcccactgcataaaaatgaatagggagacagagttttgtctgttacagctacttatagggtacttatagttcttttcttcctggagtagaattaggtgcaatttatgtcacatagcctacctgccaggatttctgtcccaaagtgaaacagagaatcttgagggacataaatgatagtactatgagtgaacagagatagctgtgccccctaactcctattaggaggtattaatgtctaggttttgctatgagacctagggtgggctttatcgaagcactttatgactgtgctttcgaaaatgtttccctctagtcatcattatgaggtaatgtattaggtaatgtcttgaaaaatagccagagggctgaagtgtcagctttacagctcacatacctgaaaataacaattttggttattatttttacactacaatatatttggaatgcctcataaatagaaattaatcgtgacaactctgtctctggacttaaacacaaccttgccaacaaaaaatgctcggagaagcctaagccatgaacttaatactttagggaagaatttctctcttttatcccatctagggaacattcccagcatcttttgtctcagccataagagccaacatccgttacccaaggttcactaaaatccacagataatctccaatcaacatgtttaaagagttacaacctctgtttccgtcttatcttctaccagaaactccaataaccgcagagaaaagacttaatatattcagctctaaagacaaaaaggctggcttgaaaagtgagagtgctagcaaagaaatgaccaaatcattttgaaaccccatatatatgtatataactcatctcatttttttttcatttgtttagccctgtaggtgtgattcagtgctgtttttgttttcttttgttttgtttttagaatttaataccttataaataaatgaaaagaaagacaacttagtgtcagtgaagtctgggccaaaaaaaaagcattgatttgtgagggtcctatgcagaaatcactccagcaagtatgaccttcacatgcaaagtttggtcactactctggagtaatacttttcagattattgaaagaaaaccatattaatgaattaaatatgaactaagcatacactatgtacaaaacaatattctatctgtcggcaaaatgcaaagtagtatctctacagtcctagcttctaggagattt

SEQ ID NO: 38225 - DNA, 3438 bp, Homo sapiens
tccttctgctagagattagggactaggttatacttgctttgttgttgttatctccagtgcctcatagatattcacatgaggtaattaatatatgtttgctgaataaatgaccacttatagagaatgtgtacactaatatatgtacatgcaaatacacatatatgcaataaacacttatccacacttaaaattatatatatatattcacttacatgaaatttgatgtatatttgtgtgtaagattagaagaaaggaaataacaaatgaggaaataacaaatgtattacaatatttccatcatgctggtgttatgaaaatggagctatgcctaaattgtcctttaatatcatagtataagtggtggcctacaagatatatgagtaggaactggtttggcctttattttaactgaatctcgggcataacaatgccctttagcacatttttccggacacattctccaagagttttccaataaagcagatttcggcattgctgcttcttagtgaggtcctgaaaaaactgcaatgaaaaggaagataacttccttccaaatatgcatctctgtattatatggaaataaacaataaaacatgtgatatgatatttttattacctgaattatgtattttgaggtccaaagactgaaaaagatgttccattttttttcttccaacttgcttggaggcaaatgtcctttaaaatttgcacatcatgagaatggaatgtgctcagagatcagctgaaagttttttttaaaaagtgagggctttgcagctgtggctgtgtgcttaggctcggcaggagaggacaggtccccttctggtcatcctacgaggagttttgacaagctcaccaggaaatacagacaatgctgtctgtcctgacaaagccccatgtgggctctaagccaaacaaatgcaggtgtattataataataatatcttttctagtacaatataatctgtttcccactaaaatcttttgaactagacagaaaagataattatccccaggttatagacaagaaagccaaacgttagtgaggtttagtggcttggaagtttctacagtagaaagaggttcaattggaagtaggacctagtatcagattccctatagatgtcaaaggatataaatgtttgcagtcttattatttcctggctttttgaccctctgcaagtttctcaagctctgagtttgaccagcttcttcaataacatagaataaaagtctctcacatggttactctaagggtgaaataacatatgaaaatagttttatcaacagcaaagtagtattcagagttcatgtctccttaatcttttattcctctccaaacagaaactatagtttcccagaagcatacacttacaacaacacagatacacaattctttatatacaattctgaaatccccaagaatctaaatccaaaagtatttgtaactcatttagaggcaaaatcttctctgaactgacaggcctatgtattaccttgtttttctttatttagtatgaatattcatttgtttcacagcagaaatatcaatgtaattgcaaggtcatgagttgctgactcatacctgtaggaggtattctgcaataattgctaacataacattttatctttattgggattaccaaacatcctgtatcccaataaatatcttgtcttagggattttggagacttgtaacatgaggcttgtgacatagaatccgattgacccagcttcgagatcatctgacgatgcgatgctgcagttctaggtgaagattgtttggttctcacaggctgagtggttctggggtcagccataggttgggtctactccaaagcagactcgggacagccttggagatgccaaacacttcccgtcctgagcttaaccttgattcctgtggcccttagaatgattattcttacagcaacacacccaagtgctagaaccagtagccacgttaaaaaatggatgagcactggccaattcgatctgagtttgaatccctgacctatcacttaccagttctgtacccttgacaggtttatcaagttttttaaacttcagcttctcatccttaaagtgggaattttaatagcgtttttgagggctgtgtaagttttaaatggcacagcatatgtaaaagggctttctgtggtgacttattcctactaaatgttcagtaaaagtcagattattttcccctttcatttgttggcatttccgtactatttccatcaacagaaatctctaccataaggctatttgtgaagattttcttcaaataactgatttattgtggtggtggttgttaattaaaataactgatgattgttattgtttttttatttctgaatctcagtctggatctgtgccatcttaaagtccagaaagttgaattggtttaattccaatagtattctgccaagattttttttaagaaaacaaactctgttaataatgtatgaggtttataatgcacatgtatcacagtttacaggaaacagagaaaaatacccctaagtggtaaagtgtgtttattgtaggtcaactaatcacatttcttaaacctggaatatatgaaatttgatgcttggctgtagtctgtgaagaactgctgggcatggactgtaccttggctgtgattcattctgatcttatgaaggctggagctcatgactatagagtatgaggctggcatgactaattcccttataattatcaaaaggtcttgagtcaaaaagttatctcccgagtttgatcacaagtcgtaaatgcacaaggagagattccctccagtgttcaagtttctctctgctgctgacttgggcggcatgggagccccttcttaggccaccagagagcctcacggtgaggtgctggatgatactctcagacccttctcctcaagtaaaggaggacatgctacacaaggaaggattgcaagtttatggaggtggctttataggtcagtggggaaaggaaggacaatttaataaacagtcataggacagatagacattataaaataaaataagcctccctaatttggatctgaggaaatcaatgccaggtgatgtgaagacttgaacagaaaaaaatttataagaaaatacgatatgactttaggagagtgatacaatttagacgtttgctccttttgagtctcatggtgaaatgtaatccccagtgttggaggtagggcctggtgggagatgcctggtcatgggggcagatccctcatgaatgggggttggtgctgtcttcgcacaaattagagttctctctctaatttcacatgagatctggttgttgaagtgtgtggcacctctcccctcactctcgctccctctcaccatgtgacatgcctgctcctgcttcactttctgccataaaagtttcctgaggcctcaccagaagctaagcagatgctgt

SEQ ID NO: 38226 - DNA, 1296 bp, Homo sapiens
gttgccacaagccaaggaacaccaagagccaccagcagttggaagaggcaagaagggatcttcccttgaagtttcagagacagcatggctctgccaacatcttcattttggacttctagcctctagaactatgagagaatacatttctgctattttaaaccacccagtttgtggcaatttgttacagcggtcctgggaataatacacaggtgaaaaatagaagtagacccctcatggggcacattgaccatcatggactaagaaggcttgagagctggccactgactgggccctccgtttcacaagaggacatggaggaggtatttcttcaacacaatgcctgctcactgttgtgcatcagaagttgtgtttacctttccatctcacatgagcccatgaggtaagaaatattgaattggatgctgtctcaaaggtcagcatgcctgtctgtctgtgtgcaattcacactcctctgggtttctctcactcctaccttttcatcaaaaaccttctaccaaagtctgatcacaaggtcttcctgtttgaactggtgagtttttctgagtggcatcagacaaaaaggctgaaagctgttggaagcttcctccatagtagattagcagcacatgggtgaaccaagctcatacattattcagaaaggaaaaatgtgggctttgactgaactttgaaggaatcagcagctattccagaggagagtgccctattgttctgcctcacagaacaaaaagagcaagtggcattccttacagcatagctaatggagtacacgcagacactatgatgaactgaccagtggacatctttcatgagctccgaaatcctgtgcagaatgacctattgctgatcagagagaagatgttcacactttttttttttaaatttatgtagcgttataactcattgctatccagaggaggaggtttctggaagataaaatgctgccatctgtggagcatgtatttatcaacagtaccaaagtccccttggaagggttaccaggaagattaggttgacctttcaatcactgtctggcaggtctttcccaaaaacatgggaagcatttcctgtgtcatgaagcaagaaaataaattttttaaaatttcaatttttaaaaaaataaaatccatactacacatgtttctttgataccagaaaaagattttccaaaatgggaagaagaaaccctgccaaaatgttcaagtgaaggctaataggaccttcagccaagagcatttacaagaattctgaattaattcctggtgaagtatctatttc

SEQ ID NO: 38227 - DNA, 751 bp, Homo sapiens
acagccattttcaactaccacgagagctggtagttgaaacagacccatgctccatctggcattctatgtattcccatactttgtggggggaaaagcaagacttagtacaatttcgaatttgtagatctgagtcgatgatccatttcctgaccttttcagcagcaagtcctcagaaatatttcagtattttcagctatgaaattttcagctatgaatatttcagccctttctcatggagttctggctatgagtatctttctgagagatgtctgatttattgaatttcttcctctcctctttttcttctttctcttttcttcctgttctggctctctcactttctctttcattcatgttggtaccaatattcctgagggtggcaagcagttcactatgggagacagtcactaatctctggcccagaaaaggggacttccatgagtgtgtgtggataggcaggacaggagaacaaaagaatgacaggaaatgtttcctcagaaagtcctgctaacctttgacccctagctcagcttaacggcattgctctgctcacctgaagttctaatggaatctgttttcactacctaaggcactgtctctgttaagtcttcctgagtacttcctagaaaaggtcaaatgcaaacaatgatattttacaggaatattgcaccttctagcctgtcacctggagtgtaagagacacagtcacaattgcaatgcacataatgtctcacattagccatacaggaat

SEQ ID NO: 38228 - DNA, 623 bp, Homo sapiens
aatctccaatagcaaactgtgtaaaatatcttaaatggcctcgaaaccagtttaaaagatcaaggatgtgttagcatatatgaagagaactcagtaatcattttaaggaaacataacctgcaaccagacctatttactttttcatgtgttcatggcatcaaaaatgtatttctaaattttgtttttttaaagtcactctttaaaggacctaggaaattgagatgatgccagtgtgcatagctggtttattgacataaatatgtcatcattttggtatttaaaactcaattaaactctcttaaaaactaacaatccaggagaaaaaaaaaaattgtacaaagggtttgaagcaaccattcaaagagaaaacccaaaacagacccaaagtgtttcacccatgatcaggaaactgcaaattaaatcaatattaaaataccattttgtatccatcagttttgttaaataaaaacaggaaatttcaccaataatcaggaaaatgcaaattaaactaacattaaactaccatttttacatccatcagttttgttaaataaaaaacaagtgttagcaaggttatagcaaaacaactttcttataaccctggtaggagtgtaaattgatat

SEQ ID NO: 38229 - DNA, 1230 bp, Homo sapiens
aggacagatacccagaaaatttgcatggaataccaatttcactgtccgaatgaaaaattagactagaataacaatgaaaacaaatcctagtaggtaaaaccacagtggatttgtttgtgtcaggtcacatctgccgagcccagaaagcctgctgaggacactggttaatagtaaacacctttttggagctgcctgtcacaaggaccacatcagggaattccccttaataaaatcagtaactttatttaaaaaaaaaaaaaaactaaaaactaaagtcatcaacttatatttaaatttcaaaaagagaactagctttttaaaaaaattacaaacaaatgtataaatctagattttgtatgctatactggatctgcttaaggtgccacatgcctgtatttagaatatgtcccacaaataaaaataatattctatgaatgcaataaaaaacagagatattggctagctgttttgcttaatctgtaaagtgagatatgaaaagctgatataaaaagaataaccatagcattaacaatactgatgtcatggcagctggcatacctacaatgttttaggccctaaactacattttctaccgtcactgtcacgtggcgagccacatattgtgcaatatgctttagcaggcatgttgctagtaaactgaagaagcacttgcttgatgggaaaaagaaaggatgaaagaaacgaccagagcaaacttgaggtcaaacacaaaatcaaagtttatgatttggctctcagttttatttcaataactgagaaggaacgaaaaagaagcagtaaagcaaaacaaagtagaatgcactcatttggagccaggaaaatgtttttgaaggaatctttggggtggaagtgcttagtcacaatactggttgcataaggagtgctacgcaagaaaaataactcgatcttgggggaagagctctcccgtgtggtgtgtccctcctgtcactgtgaggaccacagtcatggttgtgaaaccagccggcaactcaggctgccctggtgccacagagctccaagtccaagaagtaagaccagcagcgtgttaatcttattaatcccaaaactggctttatttctgcactggagaggaaggatagggggtttctattactgactaggaatctgaaacccaactttgtggttcccaaaaacccagttcagaaaaccttatttaaacatttatttaactcacctgcttaactcagt

SEQ ID NO: 38230 - DNA, 2033 bp, Homo sapiens
agtacctgagatgcttctaattgcagaaagatggctgggttgtttgtaagagagtctgatgctcatgttgaccacagttttaaaaagtacagtcacgtaccacgtaacaattccatcagtgatggattgcatataaaacagtggtttcagaagattataacggagcatacatagaaacctgatatgtggtacttcatattggcatttcaggtcaagtaggggaaatgattgatattcaataatggtgctggcatatttggttttcacatgaaaaatatatataccatttaggttggtaagtacactctatgaggttcacacaacaatgaaattgcctaacacttttctcagaagatatccctgtcactaagcaacacagaagtgtactctttttcccccttaaagtaatatcatgacacgatggttactgaattagtctgctcaggctatagtaacaaaatgccatggactggatgactcaaacaaaaggaatttgtttctcataggtctggaggggagaaagtccaagatcaatgtactggctgattcagtgccaggtaaaggctctcttcctgacctgtagacagccactttctcattgtgtcctcacatggcagagacagacagagaacaagctttctggtgtctctttataagaacatgatcctatcactaaggcctaaccacatgaccttgtctaaacctagttacccccaaagggtaacccatctctaaataccatcacattgacagtttggatgtcaacctatgaatggagagtaaggggagacaataacttggtccatgccagtaattaagaccatgatgaaaattcaggaacaaagcaaggctaagagaccattagaggaaacagtcacaatagtgttctcatattttgtaatagctcctgtgcccaactatataagatctgtctacagacttattctccttgaaagcaaaatgtaatatctatgtttctataaaataggagaccagttttcagcttgtatctgaaagtttaaaaagttctaccaaaatgagcaaagtttaattccctcttaccctgccaccaagggaccaaataagagaggcagccaaccaggtaaacagcgtactctgactaaagacgcagaaagctacaaagctgtaggaaagaaaaagaagtcacgtccagggcaacttaaccagcaacagagatttcacagaagcccttactcataagcagagactcttgacttcagaacacatctgcattttaaacacagaagagaaaaacattaatacattgtgggagacaagaatatgccaccccaaaatatgaaggattgttaagttgaattaagaacaagcagatgcagtacagctctctgccctacctctatttgccaaaaagcaggaagcagatttacaaagataaaaggtatcctgacccccttctctaccagggagagaaaaaaattaaccactgaagacagctttggacacatgtcagcctggagatgggatgacaggaatctacattaacaagctttactaactcacctttatctgcctgcccaccattggctgctgctggagattcaaagtcctgtcttttgtcttgtcatttctctaaaatgtcactgttctttgttgatgatacatataatctggaattcaaagccacttctttaagactattcatctcctgggtgtttcccatgtatttataaaatatatatgttaataaatttttgtttgtttttctcttattaatctgcctattgctacagggctccatttcaacaaagaacttatgaaagttgaagaaaatttttttttcctagaacctcagagtaggatccatagaacctaaaaacttaagaaaattagactggtttagaacagaaattattcccttaactatacctgattacatatgtttaccaacttctactaatggggcatcagaaattaatatcacacttccaatttttatcgacatttatgtagtataataacataattttcattccataaaatggcttaattct

SEQ ID NO: 38231 - DNA, 1881 bp, Homo sapiens
tatcaaagaaaaacatgcaatcaatttaaactcaggaaatcttacttcagctctatgccctcattagtactaataccatatttctttattcgaatgtctactggtaatttatctttaaaatcaaagaaacttctccctgaaccagtatttttagaagaaaaaaacataaagatgtaaattttgtttggtaagaactagtttctatgaatcatctaatgaattagtacttcaatgacttgccaatatttgtccttaactccctttcataggttggagaaagtatggctaacatagataattttactgaggtcaattatgaataatgagggttgttcatctcttctacccacgattaagataaagaaatgcctagagaaagacagtcctttcaaggactttgaaacgagcagcttttagccaagacatactaacgtgatggcgcatttccttgcatcagtattgtgttataacagacttggccatcttatcagaaagcaaaaagtatatagcaaaactttacttttgtaagtaaggcattgggaagaaacagaagattcattgactgcatttgtttatattgattttctcaaaatcagttgtttattttcaatgacgacgcctctaccgccaccaggtcaacaaaaacgtacttgcttttgcatttccgggactctagcatttcagagcaggaattaaaggccttgccaaggcttttaagcgattgatggaaacaaaacaaaacacagaaggataaattttgaatttgctaagacaagaattcgcaccaaggcagacataagacatgaggatgtcttcctgacttgcgtccttggctcgaatcgttcttattagcccttttcaaaaggcagctgtgacctccatttctggctaatcaggccacttttgttccccccgaggcgtgggaggacaacagttaagccctaacagcctgcgaagcagctcctcgacgaacggcggcgtccccgtcgcctgggcagtgggtgtgggaggtgacagcctagtcctgagcctctggagcgggcctatactgcaccgccgtacgtgaatttcaggagcgcgcaatgccgccacctgggaagggtgcagcgaggctgacctgagtttgcccgccggggtggacggctctccggggcccccggggtccctggggcccctccgtgcgccgccccctcccgcgcagccctgcaccctggcccgtcgcgcccggttccgcgcccttctaggggaccatggcgacggtacaggcacggacctgcaccgcaaaacccaaagcaaaagcaacttgccatggcggaggggagacgcgccctcagcggccgcagaaagcccacaaccagcggaacgcaggcgatggggagaggagcgagcaggcaggttttggtttcgttttttgttccagctcccttggaggctacgaagaaaagggcggtccttccacccgatccggctgttctgcgacctcgtggcctctgagtgggagctcggactcaggagtgctgttgccagcgcctgcccagacgccctccgtagttttgcaacttgtggaagcactctggagagaggccgagaggattcctcgacaggaaatttgggaattctctgggtgatgcatcagtgattgcaattttgtttttacccgttttgctaagcagcagcaacaacggcagagttgatttaaaaaaagaaaaaacgcaaaaagggaaaacacatagtaggtggtggccgcttcctgtgttgatactggggggctacgcttttcctaacatcaatcatctcgtagttgcagagagccctagatgtcatgatagttttgaatcgcatgcattatcatgtaagggagttaaatatcttgcatgcatg

SEQ ID NO: 38232 - DNA, 592 bp, Homo sapiens
cccaacaatgggccttccagagggacccagtatcagtccctctttccagctgcatccctaccatcctcatccagtctccatcctctctagctcctcagtccattcttgctaccatacccagaaggatctttttaaaatgtaaatcagattcgacttctgtttaaacacatcattgtttgcattgctttcacctgagccacaatgaccttgatccttttttttctggccagatctcctaccactgccctgaccctctgctgcaatcgcaacaagctatcagcctgggagttttgcctgacctatgtactgtgtccctgcctcaatagctccgccctgatcttcacttgactggctcctgctgtcacttgggtcttagctacaataatgttaaagccgaaagactgagggtcgtgatcaactcagtataccactggaggctgtatgggtaaacagcaaactgttctcataaatgcagaatgttggcaaactgacaaactgagtatgccacccagaaggaatgctgagggcagtcatgcccctcgatctttcagcctccaacacaataacctctcttcagaaagactagctctaa

SEQ ID NO: 38233 - DNA, 1936 bp, Homo sapiens
gaggtcaggagatcgtatccatcctggttaacacggtgaaaccccgtctctactaaaaatacaaaaaaaaaaattagccaggcgtggtggcgggcgcctgtagtcccagctactctactcgggaggctgaggctggagaatggcgtgaacccgggaggcggagcttgcagtgagccgagatcgcgccactgcactccagcctgagcgacagagcgagactccgtctcaaaaaaaaaaaaaaaaaaaaaaaagagagaaaacagcgaggaaacacaaataactttatgtttcaatttcctcaatgaagcaaagcaaacaagtgacaaggctcgaagccctgacggcccagagactgcacagcgggcccaggagcaggtgcgccccctcgaaggcggcgtggcctccgcgactcggctgcgggcagctcccggggagcagggtctcaactccggcgctgtcccacttccgtcggcgctgagggctcccacctccctttccacccccggctctccagcccgggactgccagcggcgggagtggcagccggggaagggactccccactcacccgcgtccgcccgccgagcgcagctccccaaggcccagcgcgcctgcccttcccggaaaacagcagcgcctgaaacgccggaaccccgggaggcactgggaggggaaggcccgggttctcgaaactgtcgctgcctcctgcagaagcgccgcgggagagctgcggggtcttcctgaggaggtggccctcgcaggaacagctgggttccccgcgaaaagaaaaagacagtgaaaaagaaaactgctttaacggcgatttttctttagcatttaaccaatgctcaaatactaaacatggttgtctccaatgattagtcactaacagaaaaaaaaactaatttcactttcgatttttaaaaaggggtggttttgcggaggaaagcagaagtatacctgaagtttccgtacacactaattttagggaacgctttctaaaaccagttttttgcatgtattttataaggtatgttggaaaagtggatagaaaccaaataaagtcaaagcaggaatcgctcttcatcagattgtaactcttttgtaatttcttagtcattgtaacactagttgacaaatgtttacagtcagcacaagatcggcgtttctgtgtcttttgtaacatcccccggggccatgaagttgggaaagctgtggtgttcctgttggtttctgtgacccatgtcccttgaaagttttcttataatctcttgttttgttgtggagcttgtaaataaatacttcactaggtgtgaacttttcctttgaaaattcaaacatctggtttatttcaagaactgcagtgtctcttaatcccacacaaagaaccaccccacagctgccccggctcataaatacagatgtgggaagaaaatgagtcaaaattatttcaaggcataaattataggttatcatgctacctagtcacatataataactgatacagtggtctaaaatagtttaacaaaagtaaaatttctttgtatcaaaaaggttgatgggaaccagtttaaagtggtgacatttctcttttttttttttttttttgagatgagtcttgctctgttgcccagtctccaactcctgagctcaagcagtccttccacctccactcccaagtagctgggattacaggaattcacgaccgcacccagattttttgtacttttaatttgggtgctgggggcaggtatctaactgtttcccaggctgatcttgagctctggcccaagtgatcccaccacctcagcctcctgtaaaatggcatttctaagtaaaaaaaacgacttctttgtgcttatcagaccagttagaaaatacaaaaactccttctgctgcaacttgagaaagaattactttagttttaccttgaaatt

SEQ ID NO: 38234 - DNA, 707 bp, Homo sapiens
ccctctacctgaggaggtcagggaagtttccttcacagaagaggtgaaaattgagttgattcattaaggtagagaaagtagactgagaagaaagatcgggtgaaaaatctcagagggatgtgcaatggactaaatgtttgtgttcctccaaaattcgtatgttgaaatcctaacccccaaggtgacagtattagggctggggcctttgggagatgattaggtcataaagggtggagcctaaatgaatgagattaatgcccttatcaaagaggtccaaaggagtttgttgacctcttctgccatgtgaggacacagacagaaggtaatctatgaatcaataagctggctctcaccagacactagatctgcaggaccctggatcttagacttgcagcttccagaactgtgaaaaataaattctgttgtttataaactaccagtttatgatgttttattataacagtccaaaaggactaatatagcataaaacaaatgggaggcaccaagagtttagtgattatgcaaactatgagaaagctacctgatatctattacatgatgattctcttttaagaaaaggctactacaccaagcttatgctgctgttgctaagattgtgttgatctggtttgcagttcatccttggggaaactggaacacttatgcccagtattgtgcaagatcctggggggatacaaatgaattct

SEQ ID NO: 38235 - DNA, 1426 bp, Homo sapiens
tagtcttaaacccaacagtacgttatctccttttgctaactgatttgttgctaaaacttcaacaagcactggacttggagtttgaacacttagtctgagggcccactatgttcagtctagtgagtctgagcaattaactcacattttgaatttcaagtctctcgccttaggcaaaacaccaccacctgatgctcaccagaggggcgtgacgcggcagctgggcagggaagggatgggaagggatgggaagggaggcgatcgataactccggtgtgccgctgactgttggattggctcgaacttctcccgccaggcctaacctactcccgcgcactcctgggcccgcccagccgccatcttggtctaggagggagcgcgccgcacgcgtgagtaaacagccggagctgggaaagtcgagctctggcagcgtctgggtgctgaggggcagaggcggagagaaccctgtcctgatcttcctaggtgggataaatatcggggtgacagtggtaggccgcggggaaccctcagtctgcccaccctccgccccctcgcggcgagatgcctcgttccccgggcttctcccgccctccgccgatctcctccctctgttgaaagctgcccgggaaagtggtggcgggagcgggcccaggcccgaatgtggcgtgggctcaggtgtctggtgtcgggcgccggaggaggttcgcgctggggtttggtgattcggaggcctggggtgcagacgcggcgtggctgtgaggcccgggcgggcgtgcgggtgtgagggccggactcacactgggccgccgcggggctgtttccatcggtcactggattttctcctcttccggttcgggcctcagggtggccgacatgacggccaggggtcagagccccctcgcgccgctgttggagactttggaagacccttctgcctcccatggagggcagactgacgcttacctgactctgaccaggtgaggtccgccacggggcgtagcggagagtggggcgctctatagtggggagaaagaaggtggttgggaggggcgcgtagaatgaatgtgagttctagaagtctagcaaatgtgaggacgcccgagtcgcggacgccttggggggcgggggagatgtattctaggtgacgttcccgggtactgctgctgctgcgcttgaggtgtgtgtttggaacgagggagcatgcacgtgtgttttgcaagcgagggatttttaaaagtttcggttggaagtagttgttggaggaggggtcttcagtgtaaacctccgatgtgttgggaaaatgtggctacccagagtttttttaacagagcaatacactgatttttattaattgcaaaatgcttcaaagtaattttcatagaaatgtactaaagttttgtaaaaccctttggaaaggcttagcaaatcg

SEQ ID NO: 38236 - DNA, 574 bp, Homo sapiens
cttcttccttatgcctaaggttttctttctatagacaaagctcagttattttaactgaggccttttctgcccctttactctctctgccctggaaaggtgcagtgatttactgatgtatctaattggtagggatggaattagtgggcatgaatattttggcagaaataatgggccagtattttatctgacaatcctctgaagtgtctaaaatactactcagtcccactgactcactggaaatcaccacgaacagaaaagacattgtgacttcagtttgccagtggaatcccataaaatgtaatatttaacccagagatgaaaggttggatgagtggagtgttaaatgaaagagccacatgcaccatgacagctgaggcccaagaatctccacaaaactaagtatagacaccaccaccacaatatagcaccacagatttttgctcctacctcactgtagttgattttgttctgccttgccaacataatctctggtgtatcaggcattatgtgaatttgagtcttgtctttgtcccaggcctctgtgtataaacgctataaaagaagataagatgct

SEQ ID NO: 38237 - DNA, 862 bp, Homo sapiens
tgtgcaccagcagtgacagctgccaatgtatcctgggagcacaggatgcagaatagaggtcatatgtccagaagaggaaatacgatagttaagtgtattctacatcagtcattccccactcatagtattttgctcagttctgagagtcacattttactagtgatgtcatgtgaggaatgccccgcagcttgggatattggatttgaaggtgaacctggggtgaaggtggcaggggaggcaccctggtgctgctctccatctctgggggttggcacagatttgttctgtgcagcttcagaggactatgtgagtttacagagagaaatgttgtgactcaatacatcagaagctttctcataaattttccagaacgaatggactgatttatgagatcagctccttgtcactgggaacccttaagcaaaggcaggtcaaaaacctatttgtggggaggggtacctttgcactagggtggaggcttgactctctgcctaagcctctatgattctggaatgatggcacgtggccctgtgcacactgaaagtgaaaggaaatgggcttgctaatatttacactgacagatatttctctctctctgtgtgtgtgtgtgtgtgtgtgtgtgtgtgtgggttacctggtagtactgtggattttagttcttgcctttaatcttatatactaaaaatcttaaatttggatcctaaaccacacttaggaacaatatatggaaaatatatttactacagttatgctttagcataaaggggagatacatgtataggtcaattgctaatatcctaacttcaaaaaaataataaaagaaaatggtctacataatctcatggttacagcttaaataatt

SEQ ID NO: 38238 - DNA, 1580 bp, Homo sapiens
tgtgtctaataacccacacgagtagaaaaatgaccttaagcttaaccttaaacacagatataataagtaaaacaaatggagagaagtccatctctattcaggaggcagaagaaccccccctgcccccaacacacacaaagacgggtggcagtggagggcaggctcataaaccagaggtgtaatggacaagtcgagcgattcctcccgttttccgcattctgcaaccctcggtcgctcagtggtgcggttagggcagcaatctataaccttcattccagaagaccccagcacttctatgtggtgtccaaacacaactggtgagcaaagaaagggctgaaagacaggccaggccgtgctactcagggacgtcggacctagggcaagaaacctttaccactctcattcgaaatcggagcaatgggtctattacggaaaagacttcttaggaaggtctcctaagacaaagggctgcgagtcaggaaccatccccaagctcgggagccgggaccgaaccgtcccgggcccgtatccgcgcagcctgcaccccgcgctgagctggcgcccgaccgagccgcccacattccgaagtattcggagacccccacctagccggcccgagctgaccctctccccaacccgtacgcccgcggaccgagctcctcaccctggtgattgaacagtctccatattctagtgaagagaattcccattctcgggcagcggaccccccccctccagacacccgggccgcctggcttcccccggctcaggctgagggggaggagagagacgcgctggagcctccgcctctgctgctgctcccgcgctggtcgcgggcccgcttccagggaaccggagggaggccgaagcccaggccgccctgccgcgcgcaaggccccgccgctgccgccgcggcactcgcctggctcgcggacatcgccgccgcgttgtctgcgacgagcctcgcgggccaccgtcctcccccagctcctctcgggcggctgcggtggcgacgaccacgcgggcgggggaagtgaaggggcgggcctggagggacgtgagtgcgcaggcgcgcggccagaggggcggagcgtaggaaagggcgcccgccctgtcctcgcttatttgcataaccaagactgcggaaggcgcaggactttaccctgggactgaggctgtgaagaccgcaagttggggcagatggcttccgactgcttgctgttgcgtccccgagtatttatatttccctcgaattttctccactgcgccataatgtaaacatataattgagtaccccatgtccatccccaacccttcacatacactacacttaaagttccacgtcatgactctttaagacattgtgtcccctgtgggtctttgagggaaaagtctgctgccctctgacactcagctgaagtcagtggccttacctagatagtcaccttaaagccatttttgcacttcagggctcttttctctccaatctcttaactctcacgtcagtattgcccaaaacaacgattttgatcaagtcactaccctgtttaaaaacctttagtggccaccaaagctccatc

SEQ ID NO: 38239 - DNA, 650 bp, Homo sapiens
ggactgcatgactgcatttcactggagaaagtcccaagctacttcctggtcaacttcttctaacacagcaaaagtcagaaacacagcaatacacacattaaaatgtcacttggaaatgtattctcttaaaagctaacaattcaaaccactgcgtccacagagttttgtagaggtagaatttgagctcagctttgtgggacacaagcgtatctttaaaggaaataccaaggttgaaaagagcaaacatttagcaatgaatggtaaatagcacagaggcagaaaactggcaagaaagattgcctggcttgagtaaagggaaaaaagatatgcaaacaagaaccggagttaaggcttagaacagacaagtcatgacttggaaatcaatgaataaggaaatgacatcttctctgttaacactaaccactgtggccccgtcccccatgtttcactttccccttggaattctacaagaatggctactccaaccaggctctacctcaagatccctgtacccctctaacacttgaggcccagctggggagaagaggtgggacctaaggatattttcttttttcccctcagaacacatcaaagaaatcttattaaacaaaacaaaaaaatgaatctagataaaatgtttaaagagttct

SEQ ID NO: 38240 - DNA, 2019 bp, Homo sapiens
atacatacatatatttctcagtttgttttagtgttactcaaatttcctaaataatttcgtatatatcttatccatgtttttctcattctatagtcactgagagaccagcgctttatgactgcaacatgtaaaatacttgttgttctggagtgttttgagactggagatttccttttcatactctaaaaccgaacatctcctagcacccgcgcaatctttgcaatccggggatgaagagcaacacctttacaattgtaataaatcttaaagctaccctatcagggattgaatgcatgagtaatataaataatggggaagtaagttcttcctattcaatgcggttgtctaggtgtcaagtgtctagtgttgggcttctctagacagcagggtctccactgctgcatcatcttcagaaaacgatggggcaaagacggaggtaaccagctgtcgaacgagcaggaagtttttaatcaccaactccacaactacttaatcagtccagtctccagcgagccctaggctcttcccaaatcctacgcttggcaaggagaacggccctttgagggtccccaaactcaggcggcaggaagcactccccagaccgctagcgacgcgccgaggttgccccagaaaaatcccaacgtcgaaggagcgggcggcaccgcccctcccctcccttcgctttgcttcctagtccccggagtcgctaccgcccactttctagccggacaaacagcagtccagggccaggcacacagcagtccaggaccgggcacagcactcacccacgtcttgctcgaaggggttggcggtgaacaaaggcatctcgccggcgcccgagccctagtcgctgctgtctagctgacactcagcaactgctacccgccgggtgacccgcggccgcggctccctagaccgctccgcttcggcctccgtccctgcacttccgccaccgcacctgcccggctcttgcctgacaggccggctcggagtccacccttcgatcccgcgctcctgtcccaacttttctcccggggcgagatccctccgaccatgggcgtcctcccaaggcctttgtcgctgcccctgtcccagacttttgtaggggtcaggcggccgctacggccacctttccagcgctaggaccccggctagccacgaagccggggaccttcggagccggaagtagtcccgcctggaactggacgaccccggaagctgcagtgccagcggcggcgcggcagggggcgcggttacccgtggtttttcgcgttggacgacgggctctgagggccaagttcttgtcacgaatttagtttgtttcagagcggcaggactcgtagctagagaacgaggacccacgacgcgtacgcgttacagtcctgtttccctagaaacggagctgccggcgcggaggtggctttgagattctgcgaaagacctgactgctcttcaacaattattgtgttgcaccctcccaggcgcccagtccaaaccccgtcagaataaccacccgggacagcggtggtcgaagtaactacgcctaacttttcgctttccatcgtgtcccctccataaaaacactgctgggcccccggaatccaaaggcgaaggaggcacactccctgccttagacttgttgagagttttataggggcagtgcataacgtacatgatggtgtatgacgattcggatggtagtacgagtcataaactcaaattccaacagcatccagccaggtatttaaatgaatgcaaaagcccaagcacccttcccacccacatattctctgttcctcttagaaaactgtagtaatgattatgttgcctgtctctcctcctcattagattataaactccctgataagttttggtcactactatatccccagcgtctaaaacagtgtcccaagtaatagacgctcaatgcttttcgaatgaagctgtaactttctaactgaacagtgcgtatctaaagatgtcaactactggtaaattgcagccatttattgaaatgtg

SEQ ID NO: 38241 - DNA, 1643 bp, Homo sapiens
aaagaacgataaacaagcacccatggacccacccccccgtttatgaaacagaactttgccagtgctttcgaagttccttactgaactagatcttttaaaaacagcaacgattttctgaattttaatcagaaggcatgcattccttcattcattgattcgattccgtcatggtcagacccgcctaccaagtgtcaacatgatatacacgatgtaagtattccactgttggggtgaggagggtcaaaagtgacaatatgctatctccagagactacggatcgcctttgctgcaaatggtcccaacccggcctggcgctctagagcaggcgtggtttctgcgcgcggacactttggagagaaactacgcgtcccggcagtccgcggggcgagtgggcggagccgggccgggggcgggggccgggcgccgggcgagaggtggcattgtgtaggggagcgcggagctgcatttgtctgctccaggtgctagccaggcaggcgcagccgtggccggctagggctggaagtgtcagcggcggccgcgggcccggcagaaggccgagtaggagggaccacgcgccgggggccgcgatctctggcagggggcggtgtgccagcggagcaccatgcacataggcgcccagcgccccaactacccctcccgaggaaaagaggccggggccgcgctggggcggcggagagcatgagggaggccggggggcggctcggcttggagcgctgctagggagcggtgcgcgccgcacacccgcctgggcgcggcggagggcggggagccgggcaggtcgcgcctgcgggcggcagccgaccgccgggagctgttctgatttccgacgcgcacgctaggggcccggagcagcccccggccccggcgcgccgccgacatgggcaacgcagggagcatggattcgcagcagaccgatttcagggcgcacaacgtgcctttgaagctgccgatgccagagccaggtgaactggaggagcgatttgccatcgtgctggtaagtgcgcggcggcggtcgggcgcggggacccggggccccgggccgggcggcgcagctgacccccgcccctccccttcaccccgtgccgggagcgagcctccattcccgagggggaggctcccgctttcccctttgtggccccccagcactcctcttcacccccctggcagtcccccgcgctcagtctctcggggtcccgggatggggatgggggctcagggccggctgcccaaccagcctcgaacccattgtctggctggagaggcacctcacggcgcgtgtgcccgggaggtgcggcgtgggcgtgaagagaaggtggcgcgggctgggaggaggaggtggcgagccgcttaggctttttttttaaaaaaaacaaaacaaaacaaaacaaaacaaaacaccctgagcccctgcggaccatccctcgggcggccagcccgggacctgcgaagtccccggcagatggggcgcatgtggccggccgcgggcgccgcgccgggcggtgagcggaggcgaacttggagggctcacgtcgcggcttggccaaggggagcttccccgaaagggaaagcggagacccacagcagtgcggcgccccggcccttggcgaggagcaggggcatct

SEQ ID NO: 38242 - DNA, 562 bp, Homo sapiens
agtattgggaggctgttttatccctggcatctagctgcttgtatggacgctggggttctagaaataagtttttactcctttggctataatgagctgggcattatcattaactagaaggctggattggaaaggtttgggaagcaaaggtccttctgacattcaacgcatcttcctttctggtcttttttggagcagatttttcttctgtgctctctaggaagctgatgtggttcctgtcctccaactgaccagtacctagaatgtcaacagaatgactcatgtccccaacatcctgtccttgttctggagaaagggaactgtttgcctttggaaaacacagtgcttacctctggaaaaaccccaaagcaagcatagcttcaacacagttttccttaaagctcttgtgatgtcttgtgattttttttccttgtgactttttgtaatgaaagtgttggttttcctgtgtctaccttgcgtgccaggtggttgagaattagggagctttaggtgttggaaaggaccctagagaccaactggtccaactcctctttatggttttaga

SEQ ID NO: 38243 - DNA, 1068 bp, Homo sapiens
atataggagtggctacttactatgtgaaatgcacagacatgactaagagtagagagttgtatattctgcctcccaaaatcctcctcatgtggctttctccaaagccttctcagaggacactgaattcacctaggaacttcgagaaatgtgagatgattcaattctgttggcagcagtgcctttcctgttactgattactggctacccgggagctcatttcctttgtactgagtcatgtgcactcagagagatatgaccagggagtgatgttatagaaattgcgtaagtgtagagaaaaggtttggttcccttattttgcatgatgatctctcactgtgcattttattatgtttatatttaactatgaagtaattgctattactgcactactgtgtttgatgcctaccctgtgtcaaacattaggtattttacgtttattatctccaatcctaagtaatgccttcaagctaggtaggtttattgatgaggaaaccggtgtggataggtcaaaataaactgttttaggccatgcaggctgaatttgaaatcatctaatcacctttgtaaatctgacagggcctgagctctttaggtcaaacctgctgcctcccatgtttaggggaataggcttaagaagttcagggaaagtacttgcctgttgaggcatgttttcttagttacaaagggcttaaattgttttgtgggtatgtgaaacattcttcccagaagctgaaagcctcctagggattccctcgttctgtgttttgcccattctttaagtcacggatgcccaatgtgaagagatcacatatgttcatgatgccccgtgatcatcattgtcatgctgttgcctgaagggggaccaggaatagattggcatcctggattttgtgacttaatagttgattcattggataaatggttgtctcattctttttttgttaatggctttattgaggtatactttaaatgccataaaattcactcattttaaagtatagaccgaaatgatttttttgtgggggagttttccttgggagacagggtcttgcactgtcacccaagctg

SEQ ID NO: 38244 - DNA, 660 bp, Homo sapiens
ttttattcctctctctgttatctgtgtgtatgtgtatatacacatacaattttatgaaatgtggtttatgtgattgttttcagtatttggctaatatctatgtaaaagaaaaatgggcccacaggctgaatatgtgttttctcctcataaataggggactggtggttggttgcatttctttttttttttaacagtctcagatgattctgtcttcatttccactttgctcccattctggcattgcctgtgtggattgagcatgtgaaagcttgacatcatgattcaatcattctctgattttgcaataattcaaagcagagcggaagcattgtgaaagaatcatgccagttttcttaaggtctgatacacccatcctaatttacagtattgttctaaagatgcaccaggaaacacacatgcatgcacacacacaccctagtgagacatctgaggggatttggctgcctcccgttcctttcctgtctcctccctttgtttccagatgcatcagcagatggccgtccaaagctctaaatttgtaccttgtgtgacctttagcctggagaaaggcaaatttattctgaggatagacttccctgccattgcaagtagaccttctgtcagttgttataaataaactcaagtctttggatgttcctt

SEQ ID NO: 38245 - DNA, 888 bp, Homo sapiens
gctctagaccagtggtttcgaaattttatcatgcatcagaatcaactggaggacttgttaaaacatagattgctgggccctgtcctccccaaagtttctgattcagttggtctggatcaggggttgaaaatctacatttcttacaagttcccaggtgatgctgctagcctggaggaagccacatttgggaatcaccactgtagactttgttctagtatttaattaatatgctaactcacacagatagaattgccatcagccagtcgtcagggttccgggtcagctggttgacaagcagcctagtacctcccctcctttcccatccctaaaccacactggcttcttttttccaaaaacattacagctcatctttaagggtgattcatgatactttctaaacagccacagtagctgaaacattggactactggggaaattccagccttgaacagactttggttttcattccagttttactaatttgttctctaatcttacaagaaattagaccatgtgtgtggcgcatgtaggctgtgagtaattttatctttgccaagctcatacttggcattatagtcagtgatttctgtgtccatgctggctagcctgggctcagagggactgtccctaaaatcattttttaatgagtagctttttaacccaatggcaaaatcatttttaatacttacaaatacggtctaataaatattttttttagaataacagagcactgtcttatgggtgattgtttatacaaggtctttctcaaaagcatattggaatatttacagatgaaatgacatgctgtctgagattcactttaaaggcctggttgggggatggtagctgaaaccagattgcaaaatgttgatgattgttgaagtatac

SEQ ID NO: 38246 - DNA, 810 bp, Homo sapiens
tagctcggcgtggtggcacgtgcctgtggtctcagctactcagaaggctgaggtcggaggattacttgagcccacgaggttgaggctgtagtgagctgttatcatgacactcactgcattccagactgggtgacagagcaagactctgtctcaaaaaaacaaagaaaagaaaagaaactgaaactgaaagtccacggtaattcttgtattttattacagtactacagaggcacttcaacagctaacatgattgcctataaaatacatagatattattccatatatataaaagcaatcaatcaaaacattacttcacagaaaatagttattttcacatgattaccggtaaggcaggctgcatggaagcctgagacatatgagacatcatcattccaggcattactgacgacatcattccaggcatctaaaataaaagtaaaaaaaggttaccataagaccaaagcacttaatatgactttaagaatcccataacttaagatttaaaaccactaaacactacaccatgtgaatagtatgcttagtaagtgcttgttgaatgaatgaagtactttatcgataatctattttaatacttatgtcacagtttatatatatggtcaaaattattttaacaagtaaatttaaaagtttggactattatgttatttctagcctgaatttaaaaaaacattaatctccttttagttataacacaacattcatatttttctcacttctttggagcaagagaatttaagataaaattttttctgtatttttcacctttgatttttaatatatgcactgaat

SEQ ID NO: 38247 - DNA, 3133 bp, Homo sapiens
ttccgtaaaaaaatgggaaaagttaagatgaatcctggaccgctggatcataggttttctctctcttttttttaagcactgacttaaccagctactaattggcttgctaagcttggaggatacacattgaatactaattttaaaactgttatggtgaaaacaacaactctcctatttcatgcagatataaaagatagccagctattgttattttataacactactgattttaaactttaaaatgctctatccaattaactcaggtgagagtcggtcttacaaaacacaaacagtatggctacccaggcacaattcactcctaacaaacttatttcctaacataacctttaagacaggtaaaattccttctgccaaaaatacattttcaaagactgaggttctgtcactcacggacactaaatgcaaacaactaattcatcctttttaacgcagtttaaaaagacaactactttctttaccgatgagtccattgttctatgttttaaattaaaaccacctaattatctcctgccaattgtcccaacagttccccctgcagaccaccccgacgactaatgaaaacaaattttggcagccgctgttaaagtcttacagtatcaagcccctgcctccccctcccagctaaaatcgggcctaaagctccaagacgctcaccccgcccaagagccagcaccttcaccacgcatctgtctaggccaagcccacggggaacttccagggtctcacatccttctctttgtgcatttccaccctccacttctctccctcagaacatatcccaccatctcgagttcttccttcgtccactcttatcttcttctcctttcggagaaagcttcctgtttctcactccgtttttcattgtgccgccttccccctgccccactgatcccttaccgagggccgtctcctcaggaagccgtcagcagagacccaagagccggagcagaggcttgagccggacaatctccgctccccgtccccaggaccctgcgagggaggatggctctccatttcactcaccatgaggcctccacgctcagctcccgtccccggcctcatcgtcgggctcagactgctccgccggcggccactgccgctacacataccaacaagaagcgatctgagtggctggcgcccactggggctaaaggttaaaggctgccctgcgctacggggcgggatcagcggggccaacaggctgacgggcttccccgctgtccaatcagaatgcgccgccgacacgcagctctgcggcgattcgcccccagcctcagcctcactcggcgtcgcctgcatgggggggggggaggaggaggacggaggaagtttctgcgccgagtcctccgtcgggaaaactctaccaacttccccaggggaagggaagacaacagtgtcccagcttcccgagcttagaccgcctcaccccgtagggggtggggcagtgggggtctgccaccttcaccctccccgcccgagttacgtacgccccacaaacctgaggccgccaggggtagggtggagggggcgggggtaagcagcctgtagtgttagcggtggctgggaccgaatgcgcgcgcgcggtgctcgaggcggaggggaggaggcggggaaggcgaaaggaggggttcggaggagagggttcgatctccgtacgcaccaggtggagagcgcgcgcctggggaaggaggcgtgtcgagtagcgggagggaagttgtagtacgggtggggagaaccacactaaagggagatgggggtgagcagttaaggaaccgcgagagcgccaggtagagaggtgcccttaatgggggaacctggagaagagtgtgagcgtagtggggaagaagggagaagacaaataggttcgggaatgtgtctccgagggcgcgagcgggcgctaggacccggcgtcgaaaagatgaggctttggggctgtcggggcgcgcgctcccgttggtgacgcgggggtggcggaggtctccggccgggacgaagccccgcagggagtggatactcgacagccttcggcctccgctcgcttctccctgcgcgctttcctgctcccctttccggctacagccctggggtcgagctctggtcgaagcgcattccgcctctcctttggccctgcggcttcctttgcaacccgccgcccacccttgctctccgtggtttacccctgggctctgaggcctggtggtagcggccactgccgcggattggctgttgcggacccggggcggggcaggtgggagaggctcgttctccgcgggtttcgttgtgtttcgcgccatgtcgtttgctgagagcgggtggcggtcggctctgcggcgccgcggtcccggcaccccgggccctgtggctcggccatcgtattcctcctttactcagggggacagctggggtgaaggcgaagtcgacgaggaggagggatgcgaccaagtggcccgcgacctgcgggcggagttctcggctggggcgtggtcagagcccagaaagcgctcggtgctcccgccggacgggaacgggtcgcccgttctgcccgataagcgcaatggtatctttcccgcggccgcgggcagcagagcccagcctcggcggtggccggtccaggtcctctctattctctgctcgctgctcttcgccattcttctcgccttcctcctcgccatcgcctacttgatcgttaaaggtattgaagccgacgccttgaaagtctgtccagagtaaagttgagccagggtgtggctctcgtctccacccatctccctttccctcgcgctaagccctcaggctggcagctgctttcacccagagtcctcatttgcatcttactttgctctcccgccctttgccttttctaagtggagcgtcctgatccatgatcaggagacgtatttttaaaaaggatcgtttgattaaatgggtactcttgaagaaatatcttcaagtccttgaacactggggatgaaatattgtgaagattaaacaaaatgcgaaacacccaccattaaaaggagacagtgaaaagtgcatataattaaaataggccatgttcaatggccttcatccacaaataaagatgtgctgtccaccaattcctctacacaga

SEQ ID NO: 38248 - DNA, 958 bp, Homo sapiens
ttattggaatttatgaagaaactaaaatataaatataatgtttaaaaatatgtgatcatcatgcccctgtttttatgttatatttttaagattcttaaaaatacagaccaaactattgtaaggattttatcaagtaagacagattattttttgctctgataatcactttctacaatgagtgtcttacagtcacagatactatagcttgtttagtattttgaaatgggaacatctctagcagttttgttcatttgggtcacagctgtgccatctatttgcatgtttaccaaatggttactgaataacacatgcctaagaaaactaagcttttgcaaaagcttgttaatatttgcagtcctcaactgaactcggagctcacaaatgggctttttgcaaaggagcctgaattcttggcaatgcttgataaatgtcagtcagtttctttagccatctgcaaataaaggtatattagacaatgatgacttcataacagtcaaagatgtataataattaatccagggacacctgtgcacagttccttttacaaagctatcacagtgtattatactataaaaatcataaaggattttttaaagaacagattttatctgatgtgctagcaaagctaaagacgaaataagctgcactgattattggttatcttttacagagactcacgttgcgacatgttaacagtaaccaatgtctcgatgaaccttctgaagaagacaaaatggtgcctacaatgcaggactgtagtggaagcagatcccaacagtggctgctaaggaacatgaccttgggcacatgaagatcatgtcctccaagccatgaaagtgtctacgcttttgtttttccattatttcaattgggggaaaatattaactttgctgaattgaaagttttaaaaatccttttagtattctaaaacacaattgtttctaattcgtttctagaa

SEQ ID NO: 38249 - DNA, 810 bp, Homo sapiens
aaacactaatctaggcattactgtgaagagattttgcagatataatgcaaatcacaagtcaactgactttcaggtgctgagatgatctgggtgaacctgacccaatcaggtaagcgctttaaaaccaagaatttttgctgtctagtggtagaaggggaaggtagattcctaacaccaaaatgctttaatatgctattgctagtttgaagatggagaggctccatgtgacaagaaatgaaaatgacctcaataagctgagagcagcttgtgctgttagctagcaaaagacttcaatcataaacctgccaggaacggaattctgccaacaacctgaatgaactggattcatccccacttattcatgcttttctgtatccttatgtaactgattatacttttgtgttgcctttgcaaaagaatatatgagtcattttttaaggttgctacctggatgactgggggcgctcaactggaccctttcttaggcaggctttggacttcggcttcagtcacgcattggccctggagttcatcaacatcaaagctcaattcaccactctgtttcatgaatattgatctcctaaagtatttaatagtttctcaacaaatttctgggttactaagtgcttgcagctcttaattgtctgaaaatatctttattaggtagccttattcttgatgttagtttagcttgacataaaatttcagttcagaattatttttcctcggcatttgagatttttttcctgagatgtaggctattaactacgtggtttttcccttctaagtaatctggcttttctgatcaat

SEQ ID NO: 38250 - DNA, 902 bp, Homo sapiens
agccgcttctcattggaggggctcgcttttcctgagctgccagacactgcaggctcaactgaggctcggaggtgcaattcaggctggtggagcagcgggggaaggcagggacaggcggggctagcgcggctctgcagctgatcacacgcaccaccacacacaccacattcctgctgccccggcttgcgcctcgcatcttccacccggggccaccgaggcgctgacaaggagtgggggaccgaagaaggaagaggcagaggaaaagctagagcggcgctactgtttaacctgaaagtctgaccggcagcccaaggctcgaaccccgtccagcagcaccgctgtcgcctggaaggagggcacagcgccaaggaacccacgagcccccgctcgagtcattctgtgctctgtgcgccaaggatctttctggcagggacagcgcggtgccctcagggaggtgcggagcttgggggacctgcattggcgcccatcgtggtacaccaggaaaagtgggaacgaggaaaacagccgtgagcgcagagtgcgaggccaggctgccgctaccgcccgctgcgccgcctcctgccctctcccgctgggtgagtgcccaggcttcgcgcactgccgtgtctcagctgagcgcgggggcggcctgcgggcccttgagggtccgccggagggccccggtggcgcccgcggaaactcggcggtcgggggacgccaggcggacaggtctctggagtccggaacccgggaatctgagcccggagggcgtgggtagggggcgttgcaccagtgcccggcagacatgcctttgggcgggattttggctaaaagataggagacaggtgcgccgggggtgcggggagcggtcccagggggcgggagattggggagcggcgggg

SEQ ID NO: 38251 - DNA, 1368 bp, Homo sapiens
tgccgggtgcgccccccacccaggagcgctcgcttcgccccctttcctcccccgcccccacctccttattggtgctagtttgcagcgcccagctcctgcgccttcgcttcgcgtttgaatctggctcgccccttcgtattatgtctgcactccgaaggaaatttggggacgattatcaggtagtgaccacatcgtccagcggctcgggcttgcagccccaggggccaggccaggaccctcagcagcagcttgtgcccaagaagaagcggcagcggttcgtggacaagaacggccggtgcaatgtacagcacggcaacctgggcagcgagacaagccgctacctctcggacctcttcaccacgctggtggacctcaagtggcgctggaacctcttcatcttcattctcacctacaccgtggcctggcttttcatggcgtccatgtggtgggtgatcgcctacactcggggcgacctgaacaaagcccacgtcggtaactacacgccttgcgtggccaatgtctataacttcccttctgccttcctcttcttcatcgagacggaggccaccatcggctatggctaccgatacatcacagacaagtgccccgagggcatcatcctcttcctcttccagtccatcctgggctccatcgtggacgccttcctcatcggctgcatgttcatcaagatgtcccagcccaagaagcgcgccgagaccctcatgttcagcgagcacgcggtgatctccatgagggacggaaaactcacgcttatgttccgggtgggcaacctgcgcaacagccacatggtctccgcgcagattcgctgcaagctgctcaaagtaagtgctccccgccccttccccaccgggagacctgcgtcccccaaacccgcggagtaactcgtctgagaaccagcccgggccccctcccctggttctacctatagccacaggtaaacttccttttggggggttgggggttggaggactgggcaaagaatgcggttgacagttctgttccttttccactcactctcgtgctcttgtttatattcgtcatttcggatctgcttgtatcacttactggactagtaacacgtgaggactgctgttggctcctggagccatgagggcaattagtgccctgttcgccttcctgtccctgttgcttcgctattcagagcgattttatttgttgtctacacactaccccattcaatgcgaggtactagaactcaactgaacagctgttattttgaagaaataggtgctgaacttgcctcaactttcacgatgggcttttcttatttttttctttcctttttttccccctaataatattaggaggcggattactcctctggac

SEQ ID NO: 38252 - DNA, 584 bp, Homo sapiens
taaagaaaaagcaaaaatctaggagaaagtttgtagtttattttcttaaaaactggcaactttaagcctgtttttcttttttttttctgtgctcatgagaaaagaaattccatattttctggaactgttttaagatcatttagtaataagctgcaaacacttttagctgttagtaataagctgcaaacacttttagctggtggaaaagttggtctcatagtgcaaacaatacttcttggtttcagaagagggggagctaaaggccaaagggtaaattccacttgtaacaggctgcatatttttgtgggcagaatcaatgccagaatggtcaacagcctttacaccaccaagctggcttgttgctaatgggatccacttcctttagatatgatagaaaactcatgttgaaaaactaaatgtattgataagttgtggcaaattgacccctgccttattttcttaaatttatgatttatgtattttcctcttgaagatctgctttgtgaggttttgtctttgttttattcagagtgtaggaagagaaggagggtgtgatgaagaaaaagcctgtgaaagagtttgtt

SEQ ID NO: 38253 - DNA, 1043 bp, Homo sapiens
gttaaactcggcgcgacagggttcagctaagccgagaagagggcagcgagcggcccgcagtcagcatcttgtagagaagaaggagcgctcccagccgcgggaagataagcgtacaggcggccccaaggcccctacaggcgcagccctgatctggccacttgactagacgctcgctccagcgctcgcaggcctagggctcattacatgcgttgcgaggagacctgaaagcagggcgggaacgcacaatctatcttcagagctttgggtcgtgagcacacgtgtggagcatggttgtggcatgggcgtctgggcccctctcctagacctccacgaggtgcggacgcgcctctgccccgcccttttgtgcgccctcaccactagaaaaagagttttccccagtgtcgcgtgggaggtcgccccagtccagctcagcgttccaagagaccagagactgaccggaaatcgttgggtgcagggagaagcaggagacgcgctccgcctcctgtgctcgtgccctagcgcaacagacgcgacctagaggcgacggcagcctgttgcagccttcgccctgagggtggggggcgggggggtgtagaacagctgaggaagacgcagggagcagctggggaggaaagggagggacaccgaggaaacaaagttcacccaagtgaatgcgtcctaattgctccaaggctctctccgcaaagtctacgactgcaagccgcaaagtcaaactacgtctccaaaacgcagtgggcagagcaggagggcttgtgtctccattttcgccgcagggcggatcgcggacacaagtcctctccagtaattccgaagcctcgaaataagactatgctgggaggaggggttggggggtgactaataagaaggcgtgggggtgggggtggggagtacgcggcaagaaccctgctttctggaattctcccgccactgtctgcagggcccagagcgcacttcgcggctagggaacaaaattgccgctctcttcgagcgcccccagcgtggggtggggccctgctttcccg

SEQ ID NO: 38254 - DNA, 686 bp, Homo sapiens
cctggtagctccacagtttcataactgtactctttacatattcatattctcgctctgatacattcgcaaacccaaggacagcatatgtcaaaaccagaaatttcaggcaacttagtaacaggacacgctaccaacaccacccttactcaacaatacccgggaaacatcgcgcgctggccagccgcggagacacagttcccaagcaacgcataaactgaagaacttcctctccctgtcagtttgtgggcagcttccctcgtatacataggacttggagtctccgtgttcacaggccacaatcaattcctcactaacagcaaactttgcgcacatttccgcgggctagtcctcagctcccaaactgtggagtctcccttccacgtccaccaatgaggagcctggaaacctctgtcgagagccaactccccactagtgccaaagccggagttcgaacaaatgccccccggtaactgcgcgcacgcactccccatccttcggtcccactctcactagaagcctctggctcccacttccagagaacctgtcccacacaagtggaaagaagagacgtgcaaaagaaggaaaaagcataaaagaaggcgaactgcatgggctgcatctactcacttaggagttctccgcgtctgtcttcattcattcaactctgccgaagtgcagttccctct

SEQ ID NO: 38255 - DNA, 3534 bp, Homo sapiens
ccggggtcgggtaggggtgggagagctgggcgaagggaacccggacacctcacggagggagggagcagggacaggcggccggctggacaggcaaaagggaccgcggagccgtgcgcgagccgccgggcggactggccctggccgccaatgtgcctttgtttatgtggcttgcgctgccgctgccaacatgcacctaaagtctccgcgcgtcagcgcgcgtcagcggcccgccgcccaatcgccgcgctgccgcgctccctggactcctggcccgcgctcgctttggtatatttccgacctgacgtcacgagcagggccgattttaaggtgggaaccgctctgcgttcaccttggtagccagcttgggtggtttttggtgttttttttcttttctttttttttttccgaaagaggtgtgacctctcccaggtctgcgcagcccgcagcgtcgcgacacttcactttccccgaagcccctgcgcccgcgcagcggctcggccgctcacatgtggggagggtgcaacaaaagcaccggcggaaggcaaggccggcgtggccaggtagtacgcacctggagccgcacggaatgggatgtgccttgcagcgccctaacctctcccacccaccttcgtcacccccttagcggaagagcgtacagatgtcccatgacacgagacgctcagagggctcacgcagttcgggtgggatttccctacccggttcatccccttttactcccttttcctgtcccaggcctcctcctcttctggcatatattcattctaattatctctctctctcactctctctaccccacccccaccccccacactcccatctgaaagggaatgggagtgggggtagggcttatttttctatgtttccttatttccatgcagtgcccacgttcgatggaggacgtggtgcttgcgggggggggggagaggaaggggagagggtagacagtgaccgtgacccagctctttagaaaccccaaaagtcagagtgaagcgtcgccccttttcctttcgcagacaatgcagccgagcagcaggcaacaggtgcgccttctgcagaaaggtactctgattcccaccttctgcaaactctaatactttcgatactcctctgtgcccaccaactcgtaccccttccacgagttttaagggaataaatcgatcttcgtttgaaacacaaggtctatcacagcctcaatcttagagcccagaaagactggacaagaaaagcgaagcgggtggggattgggggcagcgtctccgcaaagcgtaaggtgtgagcctacagcccagccaggagaggggcccgagctggctctgggagcgtgtcccacccccgcggccgtccaagtcgccgccgcttctgctttgcaagtcatttcccctagccacgccgagagcgcagggagctttctagcaaaggaaacgccgcagctccggagggcaagccccctccccgtctcccggccggagctgggagggcttcctagggcttctcccgcggggcttccagcggctgggccttgggagggagagttcggagccgcccccgcttttctactcgcgcagagcgtcccagccgcccctcctttctcggtgtggctcgtttccaggcagccgggacccttttgcaacttgcccccctactcgtgttctcagtaccggccgatggctccgtggaactattcgggatcccgggctgctcaaccctaatctgcagccccgcctttgcctactccctgctgcccccagctcgccggcggctggggaggcgttgccatcagatgccctgcggctgccccaggaagccgcgggctcttttgcgccgcagcctcggggaaacctacgtgaccaccttaagtttcccccagatgttgcggctgccgctgctgctgccgccgccgccgctgctcggcgatgccctagcgggcgcgagaaaaaaaataaaaccaggaagtgggtggggggggcgggttgtggtggcgggtgagggtgtgtgagtagggggatgaggaggggagggcgaagaatagcatattagcatgagctcggtagcgtcagcgccccgtgggcagaagcgattccatgcgaacgaaagggaaaaagtgagagtttggagagctggggagaaggaagggggtgggggtggcggtgacgcaggggcgcaggcattgacgcaccggccaggctgggcccaaaatagcagcaactccagctcagaggcgccctcccgggttcccttccccttccgcgagggagcagggcgcggccacgggaagctttccttgatccccgcggtgggccaggctcccggccgctattttcaggcagtcggaaactcaagcacaggcacgccggggtggcagttattattttttaatatagtcctaggaaaacgggggccgggagaacttgaaggttgtaaccaccagcctccatacacatactcccgtctaagtagatacattcactctgcacgcttccccctccctcattgccattaaaaacacattcagtttaggttgggttgagcctgggacaatttgaaaatgcctccccagagagctgaaaagtgtcctggagttcttaaagtgagctccaaggaagccaaacattgtaatatgatgccttattctttaataacaacctgtcgagtgcggcttcctgataacagcctttgtccaagtcttaatgcaaccaagaatgaagggtcgttttcacagcagcttattataacaattattattaactgggaatataattaaatataaaattaaatataaattaaaatgagagaaaggggagacctttctcatctattccatcatctgtgtaagagttctctcctcttcaaagtcctattctggtttctgggaagcttttactgtttcttaggaagacacgccggatgtaagactgttaaactcgtttaaaccaattttgaataagctacttcttaggctagggtttctgtaaggcccggatgagatgggttggaaaggattcagcatatagatcagaagtgtttaaaaaaaaaaaaaaggccacgctcaaaaccccagactagttttcctcaccagattctgatgggacgatgtctcagtagcaccgccaatgtgtgtgtaattgactgatccagtcagtagggggcctgactccacaacgttcaagagaatcactcacacacacacacacacacacacacacacacacacacacacacacacacaagctatttactacctaagctaaaccaaagagaatgctgcaggcccaaatattcatattgtgctggaattcataaataactaaaaatctttgattctcttctattttctccaaaagggaaacagttttaacacatgggattaggttcacaaaagattttctttatttcctcctgctcatgcttaactcactgttaggtcacagaaggaaaaaatcaaactggtaataaaatctctcattttatcaccaagaagttcaaattggcatacagtttggaaaaatgaaagca

SEQ ID NO: 38256 - DNA, 2367 bp, Homo sapiens
actacaaatagatgtagaattttaaatgtagctctgtagttcaatttataccacagaaattgcgagatgctatcttcctgttgttataacgtatcaggtcaagggatataaattgtaccaggtaattcattttgctgttcagagagtcattaagttcctcccagaatatatgtgattgatatccctggaggtgaaaggctaaaggaaccatatggcaacatgttgcattccgtatgctatctgcccatccgtgcttaagctgtcattagcaacatctgtaccttacggaaatccagctgcgccgacgacggctgacggaattgtacttggggggaaaatctagcttagcgccattaacttgagacttagagtctatctaccaggacggatggaagctttcacaattagacgagacgacacgaatgctttattaaagtttaattttgaactcccaattagcgaaagtgcattacaaatcgattgcaatttcctagaaggtgcagcaagttctctgcctgcctgccacgtgcgagacgctccacagcgagcttccccagctccgggcagcagaaaggggatggttcagagccgatctccgcatcccaggaagtccctaaaatccgcgccagcccctcctcccgcagggcgggggcgtccacggcgcgaacccgccagaggtgtagggggaagtgtggggggctggtccgcagccttcgaggggtggggcgacaggagcgagcggccgggggaggagaaaaaggcgggcggcgggagagggggcctctattatctcggcttctcgggaggagcctcatctagtcagtcacgcagaagtttctctttcgctcttcgcgctacacacccagattggcttccagcgcgcaggcgagtggggcgaaggaggggggacaggagtcccggaagggccgtccggcgttcacacccacccctgttccgctcctcccgccccaaacaaagtcccccgactctaggtccaggatacgttacctgcccggcgctcccggcccctcggtcaccgcatcccccgctgggcgcgcctggtacgggtcccgctccccggggctcacaaagtggtcgcccctggctgggcggctgggtagatgcccctctctggacatgttggggcggtttttggggtggagggaacgcgggaagtgaaagcggaggctgggacaaggggaacttactgataaaatggaaaaaaaaaaagcccacagggcccaggtcctggccgggggcgaaagaggcctgttacctttcggggggtcgcggccgaccaagaagggagccggggagtcgcccgcccccctcccccggcccccggcccccggcccccggcggctgcggcagctgcacacagaagcccattgtcgccggcgtccggcgcgcagccccgcggactcggccccgcggccaagcgcgtcagcggccccgtcagccgggccgggctccgtgacgcgcgcgcagcccgcgctataaataacctgccgccgggcggctcgggcggctttccagtgacgctggggcggaggcgcggtaggaggagggcgaaaggaaacaataaaaccgcccggcagcctcccaagtctccctcctcccttcccaggccgcccgcggcccttcgcgtcgagctcctttttccccgccccggcccgccctgcggggagcgcggttcgcgggtgggaaggagcccggcgtgctggcgtccccgagtgctgccggggccccggggcgggagggggtttttcccgcaccctgggatggcgaggagggaacttggcgacaagtttagtgaggggatcgctgtgttcctttctagtccagttaaaatgacccgagcttttcccgctccctcacacacctattctagtacaggtcggatgtgtttttggggtagtaagtcctcaaccgaaaacaaaagcgaaaaacctgtcgtcttcaacgtaagcattatctaggtttttgtggggccaggcttgcattagtgttttcattcggggggttgtattatagaaagggtgccccgtagtagcagcgtgaggaagggttccaggacccaggctgtcagctccggtgcatttacaggtctttttgccgtagaatttagcataggcctgaaacatggcataaatgaactttctaaaagtctataatctcaacgttaaagagcttactttttaactctggactttaataaaggctcccactttaaaaggggctttctctataggaaagtattaatatttttgtggagactctcactgctaccttccatactcaggcaattctgtcacacaccctgacacttgtcctactcattaaggtacccacatacaactggaggta

SEQ ID NO: 38257 - DNA, 2694 bp, Homo sapiens
gagtggacatttaaaagggatcttctctgggctctgaaatttccgaattgcctgagaaaaaaagcccccaaaatggaaggcctcaggtgatggagaaataaccataacatgaggaagaggatccccaaaaagatgacaaagttgaagacgccagaggccatatttccctcataatgaactgaatagtatagtttaaatatgcattgggtagagaaatgactgtgtccccatttcctgattcagaatcaattgaagatgctcatgttctagtgcctgagggtggaatgcagagggtgatttggaaatgttcaggcttggtagagcagaactcttcaatgactgtcctcttggacattgcgtattatatttgaattagatcagcctgtgtcctgttctagtttaaaccaaaattcaattatgagccattatttgtttaaattactgtaagcaaacacaatggtttatttatttttaattcagaagttgattgtgaaacttgtggtttgctcagaatgattttgaaatctctgttttctgctctggctctcggcttgctgaccaaatggtcatttatcgggagtgctctgcaactgaaggagtggaaattctaggccctcacggtgctacctgttggggccagccttacaggtcagctggaagtgacggtgacccagctacctcgacaccagatctctaccctgctcccatcggagtgtctgaggcttccaccactcagctttcaccaggctggggtggtatcagcttaaactacacctgaaaaagtcaaacacacctcatctgactatactgcaagtcagcacatcgatttacctagcactcagccaactggagaggcaatttcagagggaacaggactcagggtaggtcttttaatttggagcttgggtaccattagtggttagagagggttcagaaggcatcaaaggagatgttcaatgacttacactacgatcaccacttaccaatccgttaagactggcccagggtgtgaatatcaaaaggagaaaaaaaaaatctacctggagcaagtcccctgccccgatcttatcatagtttatatatgactaagctacagggagggtggtggtgtcatattctttctttcagtttgagcctcatgaaaatgaagagcaagctgcaaatcatttttatctgcaaggggttatctggctgtaacccttacataagcaaggtatggggatttggtgtgaacacgtggttttcctgagatgtgcatttattttcgggggtgaagagtgttcaggtaaatccataacattttcgtgtgcaaagagaaggtctccacctttctgctccatgaaccagtctccatgagcacccgaggcgacgctcgcggcgcggcccgagcgctgggcccgggctcgaggtttggaccggggttctacccggcagcaaagccagaggccggacacaccacggcctcctggatctgcgctgcctgcgcaataagcctggggaggtgccagctccggcaggcattgggcacccgggagtcccgccgctgtggccgcgcagggcaccggatccctccaggatcccaggctcccgacgtccagcagaagtgctctggagtgaggcttcattggtcccaggtgagcgtttcgttgccagctcgttgcgcgaggtctgaatgcacagtggaaacaacttagggtgggtatgggaaaagaagaaacatatttcagaagcactcgccaatataaatttttaaaaataaagatcttaatacagtaatttgactagagctagcagactgaatgagtatggacaccagaaatatgctttcggctgggggatgtagctcagtggtagagcgcgcgcttcgcatgtgtgaggtcccgggttcaatccccggcatctccaaatcagccgacgtttgctttttattttttctcctttcctgttgtatcttagaacacttaccccattacttgtacatacattttgctcacatctaggccgcccaaaaacaatataaaaggagggctgaaaaaaatcagcgaagctcagggaaaccaccttcttgactgctcgaagtaaaagtgaaatagggaattggctttcattaatacttctttatttgcatgagtccagtgtttaaaggccctgttattgaactttgaggctcctgtgtatgatacccacagaaaaaaactagaagtcaaaacttgcattggccgggaatcgaacccgggcctcccgcgtggcaggcgagaattctaccactgaaccaccaatgcttatagcaaatgtgcttttctattgcttactagaagacacttacaccctggtaattctctaaacaatcacgtatttgtgtattcaaaaacagagaaagcaattaaatttttaatcacatagttataaaaaattagaaaaacattaacatttacaaaaattttcattatactactttagaactttatgagattcttctgaaactctctttggtgaaggaggcaaatgaagattttgtcatgtatgcacaggattacacaatcacctagcctatcttcagacacttagataatttataacaactctccctccaaccccctgccatttttttcttttattattttacctattcagacaaatacataatggagatttgttagaaattgggaacagaggcaaagaaacagggaacag

SEQ ID NO: 38258 - DNA, 923 bp, Homo sapiens
caaagttggagaaacaggacagtggcatctgtggaggcaggcagagccccacttcttttgctaattctgaataataaaacatgacaaacacatatgtcacagtgtttcatagatatactgtgtagtaatcctgtttcacatcgggaatgctgtagtaggcagtgatttcattatccacgtgatcaagcttgaagagatcagaggatgaccaacagtgccttctgggtggtgcacactaacacttcccctggtctgctctgttcccatgctcagataagaagctcccattgaagctggtagagagaaggaaagcacttgagcactgtgaagtgttacacaatcttctcttttaggcaagcctggccattgtgacacccagtgcgacaggcaggggttgtaagttgcatcatagcaccttggagcacttgctcaaggtaccaagttcctagctggtgttagctcatcatagaaaagtggccaggcttatatcatctgaagaaagtaaacagttcagaaacagaaatagttcatataatacaaagtcaccaaagcaatgccttttttttttttttcacctgtgagtgatcgtattgatttaatacacacagcttatttctgtcccaggttacaaactagccctagggaaacggtggagccagtcatttggattgccctttactggctgggaattaaatcattacttattccattttagaatcacaagtagtaccctaaggcctactttcctaaggattaaaatcaaggcatggaagtgaagaatccaggtgtaattctcagatgcatgcagatgttgagaatgcagcaatttttcctggaaagctgtcactgcaaaatcatcctgctcacgatatgctcattcctagttctcaagcatatccaattagtcaacaagcctgatttct

SEQ ID NO: 38259 - DNA, 2049 bp, Homo sapiens
gactcattggacttggggatggaaatctggcattccacccctccctgccccctccccccaattttaatgtgtccaagggtgagaatcattgctcctctgtggactatggatggttccctgaagttactgagtttgggatttaataaatatatgcattcctctgggtcaactacaggaattctgcggtatttaaggacattaaatgagtgacttaatactttatttaaaaaaataccactgctttttggttcacactaattttcttccttcttttggaaaggcatttccgtccatctcctggatattttccaataccacgatagaaaggttattagtacagcacccagaggtcttcggagcaaagctgttaaagaagtggggtccatttgagccccaactttgccttccttaggtccccttgggcttgtctagccctaggagttccaacaagtaagctgggcatgctcagtgggcagggtcgttttttttttttgggtggcggggggttgcaagtgggaagcctgctgttcagctgccggggctctccgcctccccccacctgtatgaggctgggtctggggaacctgtgctcagcattccaccccctggagcttgggcttggtcttccctgcgggtccctgcgctgacattcaggcggggagccaggaggcctggcgcgcctccagagcccgccgggggagccgggcgagggttctgggctctgacggcggggtcgcagggtcgcccgcctcctggacacgtctgtaggcctagggaagcctgccggccgggaggtacagagtaggagaagccagatcccagggcggacaacgagaagtcgtcaggtaagccagccccgccagcgtgccggcggacgagtgtctcctctcccgcaggcagatggccagggcggcccgcatgggcgagggcacaggaaatcggacaccgccaccgtcttccccagcctggcctagctcaggctttccagtccgccagcccgctggcaaggcggggcggaggtctggagtccggcatcgccgaggcacaaagcaggaactgcagccaggggcgagggcccttgcgtgtggcgctgcgcgaccccacccggcggcaggacccgcgtccccgtctagtcacgttcattgggccacggagaccacctcgctcgccgcccgctgttggcttttccctcccacacccccgccaaccccggccccggttcccgcccccacttccgcgtttccccgctgggccggaggagcctgggcccgaggtatccgggcaggaggtggcggcctcgccgccctggtcaggcctccgggagggagcaggcgcgggagcgggaggaggaagtcgggaagagggaaggcgggggcgcggcccgcccggcgctcgagttacacccgcccagcccgcctcgagtgacagccccgcgcgcctcgctgggagcacccgggccgaggctctgattctggggggaggccgactccaccctggctggaggaactgggtgctcctgcccgctggcccctcgcgcgtgaggatctatctcaggtgtgtgcttcctgggagaccccttcccccgcctctagtattctagggggggagtggtccctttctgacccgggcgagtgttctgggactccagtcttggcggtaggtggtggcgggaaacgggaaagatttagaatttcttcccaccagcagaagatggattcgctcttctctagggtttcgttgtttatgttttggaggcggcatttgtaaaatagtaaagtggcaggacttttggggcgagggttggtaccccattgaaagttcatgcaaacttttagcttgtagatgcggctagtctgataaggattgttgctcccttccgaagcaagagtgagaacgagtctggaggagggctgaggcttctttgagaaactcagctgctggcgtgtgaccgtcctaggaggaaatggaaggtgcacactgataacttaaaacagcctccactccctatgtagtaacttctaccagcaaaaatagatttgcaaagagtgc

SEQ ID NO: 38260 - DNA, 1035 bp, Homo sapiens
aagctaggattgacagggaaagtctttcttttgctttgaatctctctgatttcccactgtgcctgattcttctgtcttcctcttttgctttttagggctcatgtggttacgctggagctaccccagataatcctaggtaatctctctattttaaggtcagttgattagtaaccttaattccatgtacaaagtcctttcatagaagtagatttgtactgaataaccactacatggaaatcttggaggacatctttagaattctgcctattacaatatgcacacagaaaaaacaagaaatgtattaaattgtttttttttttgttttttttttttttttttttttagagatggagtcttactgtgttgctcaggctgacctcaaactgctaggctcaaatgattctcctactttagtctcccaagtagctgggactacaggaaagtaccactgtgcatggcattagaaatgtattttctatgtgaaagccaactatagaaattatgccagtacttcattccattgcaacataagactgtggaatttttccaatgctgcttgaacacctccactggcatttcatctcattgcgaggaagaggcaaagtcctcataatggcttacaaagctttgcgtgatctgggccaacactaccggtcaccagtgtcctgtctctttccccctggatactccagtccagtccagactgtcaggacttctgtctcttctctcagtacagcaagcatgttgcacatattggctttgcatttgctacaatctccacctgtaattacttctccctccagtgttcacatggctttctctctaccctcctggaagtcatggctcaaatattactttcttagtgagggctttcctgaccatgtttttacaattttaattactgctcaacccacacatttcctatctttctttcttgccttatttctggccctcttctggcaattgtcagctatgaatcagttacttatttattcgattagcttcataaaagtagacattttcatctatcttgtt

SEQ ID NO: 38261 - DNA, 1234 bp, Homo sapiens
aagaacccccccgccccactccaccatccactttgaatcaaacaataaatgcaaatagaagaactaaaccagagcagagaggtagggggatgaacactgtgctctcagcattccttcctgaaaatgctcaccagcctgttttaggcaagaatattctgctacgtttaaatatatatatatatatatatcataatcggccatcagtgagtcctcttcactcagcttcccaggtagaattaaaacgtagtcccagaggcaccaagacatgaaaactgagccctctcaccgcagataatcaacacagaagagcagctaacttcttaaataaccacaattaaattgcacacactcttctcccttcctggttttcaaacgtagggttatttatcagagaagaaaaactggaggctgcatctttagaaggcagccaggcacttctaacctaattagcgttagtcacctctgaaaataaatcccctgaatcctgcagctccaaagtcacccccgccccctctactcctccatacccacaagcacctggtcagaattgagcagcccgacaggaaccttcctgccctgacccccagcaaacagcggtaagagggatttgccacgaccttccaggaaatcaggtaaaacaacaacacagggggtgatgcaagcgatttgctttttctgtgttcaaacttcatgcccacgccaccacaaaatacagcccggaagctgctccagcccggaaggctcccggctcaaacagaaggcacagaaaagaatggagatttgcagatctgataatgagccagttaatgacataaatgatacctcaagaacctcactaaaccatccaggtcctacaatttaatctgtaataaatactcctgcatcattgcgagatggctgctcataatggcaaatgaaatatgctggtatgataggtacaataaatctggattttcctatggttccctcaggctagaacaatatgtaaccacagtgcgcactgtcaggatgagcagatctcaaagccatcataaaatctaaatggggactaattaggaggcccttcccttccagagttactatttctattgacattttccatgcatgagcccctccataacatcgtaagtcaccaagataagaactccctagattataggggaaaagctttaatggagaagttgaactcaaaggcgatgcataaattttccttttgatactatgggaagtctgt

SEQ ID NO: 38262 - DNA, 1083 bp, Homo sapiens
ctctagccacatgccacttcctaccctatcttttacaggaaaaggaaaaggagagggatctttaacagtattcctttgactttcagactgtttctacttagtgcctttgctctcactaccttatattcatggaaaggaaatctatcctctgccaaaaacacattgaaatttaaaaatcatttggaagcacacagttgtaagaaaagttgatagccagcaaaggcattaagtatatgtgtgtgcatgcatgcaaatgcacacacatgcacatacacacacacacacaggaaatacgtgttgtttccacccttgtttctcattttccacctagaatagactagagctgggtggccacagcagcattaagtgttgaagatagaacttagtgattgtttaagtcttgtacaaatagagctgtttgattacgttaatccagtgaatcatttcctccctaaccaggctacatcctgtttggtttgcaatttttattttaaaatttccaaatcaatttttatttgtccaaatgagtttgttttggcaataacagaaaagtatcaagtttccccaaacaaagacttttcctcatgtctttgtgtcttcgtcattctacaggaaacccaaataaggtgtcagtctgagtctgtcttctgagtccagagactacagggattcctccttccatcttaccaaacaaacccatctgaactaagagattaaatttaaattgtggcctggggttgaggccatggatcaactaattaattattacccctgcctgctctgtgccagggacttttagagcaattttctcattttatcgtgagagcatgtctgcaatgtaggagtcggcattacttccattttagaggtggtatagaaatctgatcgataatctctgcatgatagctagttagcactgttctttaataataaaaatagctaatatttattaaaattttactgtgcactgttctaaaaatcctatgcatctcggctcatttacaaagacatgagggaatccctgtcaatatctataatgtatagctgaggaaaaggaggcactgagaagttaactgatttatc

SEQ ID NO: 38263 - DNA, 1734 bp, Homo sapiens
gatattgaaggaaatgtccaaagggtcctgagttcaagtctctttcgtttctctaactgtagtctgagtttcacacttcactgcctttgcaagcctcagatggaaaggttatttccaggttatgataacattattggatccaaagtcattgtcatcatttcattccacagaaagttattttgcactttcccctgggagcaggaattgaattggtggggagcagggcagggggagatctgaaacagcttccagctttttcaaaaagattttcatttcatcccacttcttcacagcacatgaaaagagccctcaaatgccctacatagcacctgctgtctgctcctcccacaagacttctttttctactcctctcttcttccttctcttttctttgctataatggaggccataaagaggacaggatcatttcagggggatggatgagaagaggaaggagagtcaggatcagaggacaggacccgttctgagggcattcccagggcagcacctgggaggctgcagggcagcagtaagttggataggggttgctgctcggatggaggttgtcagggccaagggtaggggacccagcactcatgttgttctgcgtgacaactttgcttaggccgagccctacagaaactcgctcaggtctttgttctcttaactcaagctttgcatatgaatcactgaaacttttaaatgagtgattcagagagcagctgaagatttaattcagtttctgccaaaagagaccacggaaggatttttatatcattactaatagattttcaaagggcaaagtcctaacatgcctgcagttgttaaagaatgtctctttctacaaataaaatcaacaacaaaaatctctagtgccttctttttattctcgcctgtagaatttctcctaatgcttttagatacggcaattccactttctaaaatcctttcatgatatccccttctttccacgtttgtcagaaatcattactccatatctgcttccctgtcaccttttatcactctgtctcaggaatgctgtgggagtgtccacatgccttctttgttctactgtcactcattgtgttttctccttgcttagaggcattggttaaaatgccagcaggactctcgaagctctctgagaagtccttactcttgttctgaggtagcacatttctttctcctcttaacagctgattccaaactttaccaagtgcatccaacccctacccactgttaaataaaatttataggaagtcattgagttggactgagctcctgaactaggccccaaccgaccaaatcaaaatggaatcactcgtgctaaagttccttggtaccaaactaaaaaagttgcttatttcacctttcaggaaatcaggagagaaagaccattgccaagtatccaaacaggccagttttagctggtagagtcaggaaacatccttttaaccctgcaaggaaagtaacctgaagtaacctgatggtaacccatctgctttttgtattatgctatatgtttggtcctgcttagactgtcctataaaaacgaactgttctaccatgcccatcagagcaccttttctaaatttgtggaggagatactgccccaattcctgttaaatctttaaactaaatttgttacagtgttgtcttttgacatcactcaccctcaactcttcactgttcaccattagtctatctcgtacttctctgagaaaatcagaagtc

SEQ ID NO: 38264 - DNA, 829 bp, Homo sapiens
ccaggtataagctggacacacgggggcaaactgaaacccgcgtcggctctcagtgcctctgaccttagcggttggaatgccctcccaaagaagcccggcccaggatcatagaagctggaggaagatccagggaggtggaacagttgcaggcccagctgctgcccatgcaccaggtgaggcagcagacgggcagcagtgtgtgccagctacaaaatagctgcttcacttccgccccaccaagctcacagaacaatgtttactttggctcacgtttctttttcaggaatcattcaggaaagaaaattcagggaaatttagtttagcctagtcagactgacatacaacagtcacaatcctaccaataacccatagaattttctataaggaatagagcaatgacccagggaatgtgcaaccctaaacaagcctgaagagacaggatcatcccaattggttcacttcagggattaaaattccaaattgaagggccgtcccagctaaagtgaactgttacagaaatacagactatcataacacaacaaaatcaatcaacagccatatattttatttcacaaaacaataattgcctgccacctggtataaatcagattaaattgattatcgtgtgccatgttcatgctttccttttacttttatgccaagaatggaataatggctgccattctaatgatacagtttcctgaagtaaataatggtttatcccaggaaaccaatactgaagtctatgggtagctcatgagtattaagggtttaatgtaacagaatttcaaaatttaactgcatcttacaagaagcatgcttttcaatg

SEQ ID NO: 38265 - DNA, 782 bp, Homo sapiens
ttataggctgagaaagaaagagaatatattcaagtaagaagctcacaaaatcaggaaatttcttctctctaaggcatttctggaaaagttagcagagtttctagagaagagcaccaactgtgtatttatataaggtgaattttattagttgaaaataatgatctgcattacaggaactcaggtgagattatctataaatatacagaaattctagaactagtgaaagagtttctcaactttcatcctcttaaaagagtttggaagacaaaagccaaagtatggcagtttctaaacgtaattaacattggctgaatctttcttatggaccagacactgttctgagagcttccactaatgaccttatttaatcatccaacaactctgtgagttatgcaacaatttaacctctattttaaagatgaggaaataggcaaaggtcacacaactattagagaatactggcatctgattccaaaggccaaattctcaactattttactgcactctttgccaagactggtaaatctcttgagcttctgctcaaatatttccacttaccagttatagcctcctggtgtttacccttcagaatcaaattctttaaaaggaactgtattacatgagatatagtctgactatttggtattattttcttaaagagcacatgaaagttatattgggattttggggggtattttttcaaaataatttataaacaaaactattcccattttatttttctttcaccactatcactagataccaattttactaaactttga

SEQ ID NO: 38266 - DNA, 924 bp, Homo sapiens
ccagacataccctgggccagaagggaacccattgctttgaaagaaaggacgctttcctggcagcattcatcacctgctaagtgaagagcccttaggtcctgaataaccagcagcaatatgcaggtactacattgagggtcttgggggagactctgaaacttgctggctttgggtgactcagcacattcccagccatgatggctatgggtgagacttcttctgcttgaaaaaagtgaaaggaaaagcaaaggggactttgtcatgcaccttggccacagggttgtaaagcacaaagcaggcctcttggggtcctcaattccaggacttggctcttggatggcatttctggacctgccctgggcctgaagggagcacgctgccctaaagggtgagtcccaacccaggcagcattcaccacaagctgactgaagagactttgtaccttaagggaacattggtggtagtctggtagtactccctgtaggcctgtggtgacggtggccaagaggtgaggctcctctgcctttgaaaaggtgagagaagagtgagatggactgtatcttgtagtttgaatgccagctcagctgcagtataatagacttctaagggttttgactctaatccctggctgctgggtggcacctctgggccttcctggagcctgggggaacttgctgccctgaaggaaaggacacgggcctggctgtctttgccacttgctgattgcagagaacataggcagtagccagggagtggttgcaacaggccttgggtgaaatccagtactgtgctggcttcaggtctgactgagaacagtcatagtggtgattgccacaagggagcttgtatcactccacccccagctttgggtggctcagaatagaaagagaggctccatttgtttaagagaaactaagggaagag

SEQ ID NO: 38267 - DNA, 731 bp, Homo sapiens
gtatatgggccacataaaactgaaaaaacagctgtttccacacatacccccgtttgcctatatgacacttctatctccccttcaggatctagcttgatgtgtcctcacggatgagtgtgtctgtccaatagctacttccacgggtggccaagcatctgcatccctctaaacaccaatccctgtaagaatcattagtatcgacccaagtttcatttctcctcggtggccttaaagaaatctttccgatgtctgctgtgtctctacctgtcctgtagtgctggagctggctggagagaggcagtaaaggccgtgaggctgccctgtgggagatattgaccctgcacagagctgggggagggcacagtgctggcagctggaggaagaggaggaggaggaatttgtgtgccactgcaaacaatacacagtgccaacaaaaacaccatcccttttcccaagaagttcaaagcactttgcaaacattaacttatgagcccacatagtcacgaagcaattattactttattacacccttaagataaccactgcaagcaaagtggctagaaaaaaaagaatgcattcattgtttcattattcctcagctatttattgaatgcctactatgtgctgggcactggaggtggaggagctcctatgggctctcacactactccatgctcttttgccaacccagttaggggccctaagcacttggctacactagctattatgtt

SEQ ID NO: 38268 - DNA, 1302 bp, Homo sapiens
ttccgggcggcttcgtccccaacacacctgtctacccctacggctgccagacgtcaggtgcccacgctgcaccctatcccgcgccccctcaatccgactggcgcttccctgtccgccccgaaggtcagtttgctcggagcaccccctgtcccccacccccgtgctcacccgcagacctcctcccagctcccaccctcgcgggcgtcgggagagaaaccagcaccgtacctggcgagagctcggcggccgctgcgagcagcaggagagcctggcggagcgctgagcagagcgcccgggtcatcgccaccaggcggccgcgccggggctgcgaggccccagagcagagcgaggcagccggggcagcacggcccgctttgaagttcccgggccgcgggaggggagcgcggcaccgacacccttttgaagtgcgcggttggctctagtcagtgtgggcgcccccctccccggccgcccccatcccacgccccctgcggctggcggtgcgcggcgctcctgccactggccccgcagccgggcggggagcgggtggtggggcgggcggcagagcccgcccctgccgcgcctccgccccctgcgccctctcgcagccgcccgggcctgctgctgcagggcaggcaggcaaaggcggccctgtgcccggcagtgagatcgcccagagctggggcgaagaaagagggggcgtggggaagcagtgcggagcctccgggactagatactcaggaatggggcttctcacgggaggaaaagccccactgagactttagggaaacttcaactacgcggcgattgcgcccaggtgatccgctctataacctcccgcagaagagccagcctcctagctctcctgacgtttgttgtccagggtccttaagtccaaccaggttgcgctgtgagagccccgcgggcttcctactggcttgtcccacccctgcgtcctggccatttgtgcctctggggaagggcgccctctctgttcatccctggaaatgaccagttgtccgactgccttctggacctataagctttggtttaacaaacttcatctcttcttgggtgccttttgggaacccttccctctatgaatggcgaccaaagctggaccacctgcgccaggtgatgtggccatctacaatgtgtgacccacgtctggtggtaaaagacctcacctatggaagataatttcggcagctacaacttcagcaattgaagaactaagggaacatacacacacacacacacacacacacacacacacacacacacacacggattaagggaagg

SEQ ID NO: 38269 - DNA, 497 bp, Homo sapiens
ttagcattgtaattattatgattaatatctatctaacgggtgagacaaaacaaaaatacgtaaggccagcagaataaacaaagggatttaacaaagccaaacgcaaagggtcaccagtgtgagaggaagcacaggacagaagcctctcttctctggtatttgacactaaaatttatttgtcaaataagtgaatcatggatgcactttaaattccaagctgaggagtttccaagcaactttagtgacctcatccaataagagagagttgcatggagagggtaacagttattcagagtgattcggctaatggaaactgtcaaaatgacagtgcagcaggtcacactctacagtgtaggtcttgcacaataggacactcctcaaaaatgtgaattcattaggttttgaaatacagctgacccttaaacagcacgggtttaactacatgggtctacttatattcacaaattcaatcaaaaacagtattcgcaggatgtaaa

SEQ ID NO: 38270 - DNA, 978 bp, Homo sapiens
aaaaaattacagactagctttagagggaagagaacagagaagacagtggggagggacagtggcacttggcagggctcagaggaggaaacacctccatggtatcacaagtccccatatataaactgggtgccgtggaagcacaggtaagccttccaggagggaagtggggcatgggcagaatagaaaggtcaagagtttgcaaggcagaaaagatgacagggaagagaaacccctacggagtgggtgcattccaggcagagggaggctatggggcaaggacaggaactgacaaaccatcctctgacgttggagaggtggagagaagttctctggggctgaaataggtgcatgtggtggcaggagagccgggggagaagaaggggacaggaggtgaggccagactgcgaggtgacacctgctgtcaaggtaggaaatgactgatttacaacagtgcctcatttctgccagaaagcgataatcagcgtagccaggcaaaaaagtgaactctaagtcctttagaggcagcacccaagaagttactgccaaatcgtgagccagcaaagagcacagcatgaattcaggcaagtaactaaaaatacaaagcacttcaagtgccaaatgagcagtgcaaacaacaaatgacacaggaaggcaggggaagaggcgctcttaaatggtggccagggacggaacagactgagccaggcctcgcctcccatgtaaggcggccagcgtgactcaaagggccacgagaaagaaataaaaaacattattcataacctactcccccacaacttttggcaggggtgtctgatttatacaatagttttttcctgggcatatgtctagttgaaagttttctcttttttggggtaagcctatctttatcaaccaatatccctcccattagtttgctatatggctctgagtaaaccccttagctgccaggccttagttttccaatacctttaaagcaca

SEQ ID NO: 38271 - DNA, 865 bp, Homo sapiens
cccattttccgtggaaaggaaaccataccaaagcactttctatatgccagacacacatgagatgctttacatatacgatctcatttaatcaccataaccctttaaagtagatattattattttttaaataacgaaactgatgtaagtcatcgagtcagagagtatgacgtcagactctggaatgttagtgattccacttcactgcctcccacagacccagcacaaaccccacacagctccggagtgcactcttcacacagacttctgtatgcagtgcaatggccctaagagaaccacagcaaggaagacagaagcacatcatgctaatgtatccaaccaaattggtgtttgtctattcaatctgggtacaccgtcttttttcaaaaactctcgtgtgtatttggctgggagcctcggcatcacattttcttaccctagaactactaaatcagaaatgctggggctgggccccgggaatctgtgtcttcagtactctaggtgactgtgatgcacattccagtttaaaaactatcgatccgagtgaacccctgccttaagttcatatggaaaattcacacagggaaggtaagaaagccgttttctttcctaccaattccaaattcaatgtcaaattaaacaccaaaagtaaattccaaaggacactattgagaaatgctcagatgcaaaaatggacttaactctcatttcctgtaaagaaacagcatgaggtttattattagtagcaaataaatgtaaaattccaataaaaaatataaaaatgcaacatatttttatgctcatggttcacttgaggatcatattactccaagagatctatctggtcatcaatttttataatgcattc

SEQ ID NO: 38272 - DNA, 968 bp, Homo sapiens
atgtcatgtgaccatttaaaataaaaacagcctattaagcaagattaaaaaaaatacgaataaaaaagatgatacggaattatatctatatatgattacaactaagttttaaaaatgggtgcatacagaagtagaaaaagatgtgaatgttaaaatttgaaggcacaatttctcctactcattttttttctgttttgggagagtaataattaaaagactaacagtagtaaaacaggtttgcaagcagcattgaatactttcaggtttaagtttagataaactgatttgtgtgtgggggggtgtacattgtgtgtatacacacgtgaatgttcatagaagagggaacagagaacaaaagagaaaatatcaaattagtcattgccaaaggacagtggctgattttaaatgagacaggagatacccttatctcccctctaaaaaaatcaaaccacattacagcacagaagctcaacccacaacattctgggaaccagttaacagtcttggtgatgatgcaagggagagatcaataaattagaaaacaatcaaaacattctcccttcctctaccttccttttttttctttttcttccaaaaataatgttaaacacaggaactaccaagcaagccaccatttgttgagctaaattttaaactgatgactctgacttccaactgactactattaatcacagctgatctttaaaagccacttgggtttatgcctgcaacacagggaacgggtttgcaacacgagttcttacaaagcctgaatcccaagtctctgctgagcaggcctgcttggctcagctctggcacccccacagctggaaatgctactgtctagctatggaatgccaacttcctcttcatttggggcaagttccacatcatacagtttatttggacaccaatccttctctaaattgtttgttaagataaactaatcagaattaaaattttcagtt

SEQ ID NO: 38273 - DNA, 871 bp, Homo sapiens
tatatatatttttttttagacgaagtctcgctctgtcgcccaggctggagtgcaatagcgcgacctcggctcactgcaacctccgcctcctgggttcaagcaattctgctgcctcagcctccccagtagctgagattccagacgcacgctaccacgcccggctattattattatttttcttttttttttttttttgtatttttagtagagatggggtttcatcacgttcgccaggctcatcttgaactcctgacctcaagtgatccttccgcctcggcctcccaaagtgctgggattacaagcgtgagccaccgcgcccggccacgatcacactgttatgcaagtttctaacaacgcagaagtacagggcacagcgtcaagccctggagttcctcttggctaactcccaaccccatccgccttcgccctcactgtccctgtctcactgagtgaaagcagtgtcagcacttgggccaggtaaatagataaatagacttgcacaaaaatacagggtaattgagaaagccagaatttaaacccaaatcgccctggctctaagagccatggaataagccataaaagtcctctacaccacaactaaaaatgcctgcaaaaaactttagggccatgctctttcaatgcttatcctaaaatctttcgtctcctacttgggaaacattgtaatttctcaatgtaaaagcaaagactttaaagggattcaaaggaaataaattttcctaacatgtcaaatcccttatgtttaaaaacaaacaaaaataaactttgttatttacataactaaagctatttttgtctaaacctttatcaggctaacaataattgcaataatataaatatcatataaaccatg

SEQ ID NO: 38274 - DNA, 1282 bp, Homo sapiens
agcattctcggatcttaatatccacaattctaaggaagacagcgggactccaaatgtccatgactcactttttcagtcttgtcaaatttaggaataagcataacatgtgtgggcctgtgatattttatttggtgtgggagtgggggtggggttcgagaatgatcacaaaacccctttcagggccacaggtatgggtgtgtggactcctaatctttcaggctgtgatataaatacagtacacatcaaggaacaccaaggaacagataatcagattctgtgactgattttcaacagtactgacaggaagcaccgtatctgatgtaaagtattttacacttgcctgtgcgaatatccaggaagtgccctggcagaaggcagaaagtctactccacctaattgacattcatttgaataattcagtaatttaaatgtcaagccagaggtattccctctctgcagagctcacccacattgtttgttctagaaggcacctcccggcattactcagtgttatggctggcactgcgtgccctttgtatcaccagagccagagccgtgtgaaaacactcgcagcctgggctggctgggaacagcagggagttctgaccacaaacagggactgcttcggaaccgccagggagaatacggggctggctccacaaaccagcggtgcaggctgggaatcccaggagttcaccatggccagctctttaaaaagatttttcctgctctgtatgatcctcagttcaccacctgggcacacctcctccgagtctaatgccggactagcagagagagaggcagaccaaagaacatcgtggacttttaaaaactgtccacaatttggtataatcttgtacttcatggtaaaagtattcacatttatgtttaagtgggactttagcaatcacaacactgtggacttacctattcacgcctgcccagtcatgcactctgcaatgctttaaggcattgaaactgagtattactctaaatggtgcacaaaaaccaacatttcccactaatgtctttgacataaaagacaaataagaaaatgctacaagtaaacaaaccggcccatggccatgatttgtcctagagggcagcaaaaggaacaggctgaattttttacaagttcacctcaaagtagtacaaatcataatgcagaaattagactgtaattataaaagtccaatagctcaaaatttgtatagctaaaaaaggaactcaagtatccctggactccttccaacactctaaacaattcattcatttgaaatgg

SEQ ID NO: 38275 - DNA, 1309 bp, Homo sapiens
ctaaaaaaaataaaaaataaaaaaataaaataaaaaaatcagtgccatgaaatgaatatctatatagtaaactctagcaaattttcaaaaaccattcattgagctgagtttttttccaaaaatttagccaacttatttggcgatggagtttcaattcttggcagctaatcaagctgtgtaaaagtctgaccctaaagggtcaaagacacattcctgtgcaggtggttggaggatggccatgaagaaggagaaggaaaatccaatcaaattttctaactctaattttgggcatttaacattacagtacagttttcttcaatccagtttaaaagaacatgcatagtttcttaaaagttgttgcaatatgatgggacctgagtaacaggcaagcataaaaagcacttaaaatcaaacaagctcttggcagtccacacaacagctaagcaacaggggaaaaaaaaaatcaagacaagttttctcagctctttagttacaatcatatccttggcttctagaaactgtggcttctaaacattgaaaatccttaccctttcaagaaccattccatactctccctgtctgttcacccagcccataaaccaaataaatcaaggtgtatcttgccgtggaattgccattaaccagaactacttcagaaagcaggatatggtagcaagaacatggacttaggaagcagccaaactcagttttccaacctattaaatgtgacctccgcaaatcatttaacccctgagtttcagtttccttttccatgaaatggggtaaatactccccatctagttactaattatagcagctatcatttagtgagctcttagttctataactgtgttaaccacattacttgcattgtctgacctaatcctaacaatgaaattgagagcttatactattcccaaattatacataagaaaatgtgaatgaccatgagaaatgggaatttccaggaatttctccagaatatattcttcttaaaatacttgcattctttactcattatttggatatccaaaaacattgttaaatgggaactatcacacttagtaggatttacaaagaattgtagcatagcaaatactaagatcctggaaaatgctagtgaacattattggatgttatgccagtagcgggcaaaatccagcccacagtctggatttgtaaataaaagttttattgcaacaggcacacttgttcattttaagtatagtctatgactgctttcacactgaaatggtagaactgatagttgtaacagagtccgtatggcttgcaaaaccgaaaatattta

SEQ ID NO: 38276 - DNA, 2731 bp, Homo sapiens
ctgtaatcccagctacttgggaggctgaggcaggagaattgcttgaacccaggaggcggaggtttcagtgagccgagatcatgccattgcactccagcctaggtgacaagagcaaactccgtctcaaaataaaattaaataaaaggcccttcataaatgttgataataaatgatgtaccctgataatggattcaaagcagaaaagataccatccaagagaaatatgaacaatttaaaaaatgaaaaagaaataataatgctaatggaaaaaaggaggtagacctactggaacccattttcagtgttgtcatggcttttaactcaaactaaaaaacaaaacaaacttccccaaaccctaagttatagacaaagagaactaccaacgtttctgatttcatacaaaaagacaatgtgtaaactaagtgtatatactcaaccacagcttccttgtgacttacatttgaaaacaaagtattccctactctaacattttaggacataatcttttttctaaattttatatacacacagagagagaaaacaaaacttgaaatacttatataccatgctaacaatgtaatattactggaaactaaattgttatcaataaaatgtaagaagggagatgctttgtttcaccaaaaaaaaaaaaaaaaaatgtaattttttcccagagaattattcccaagatggtcacttggactcatgcccccatacaattcccttggctaagctctcactggctggcctgcttccagatgttgtcagtcaaggtgactgagggagctcaagtaggaaaaagaagtgttcttcctctcaccatgacaatgttacatttgctacattttttgtcttagaaacagggtctcactctgttgctcaagttggagtggagtggcagaaacataactcactgtagccttgaattcctggtctcaaacaattctcccaccttagcctcccaaagcactaggattacaggaatgagacaccacacctggcctttaccttcttaaaggtttttccccaccccactacccattttctcagccccagactgtttatatcacactgggaagaaaagacaaataacacacattgctatataatgttattcaatttactttaataagcatgaaaaaggtaacagaaaggaggcaatggccaaagacaaatgttaaagaaaagagtaggaagatccaaggaataataaatggctgttattagcatttgctggctgggatcacttttacacatgaaattgcttaatgcgtgagtcatctgaactcatgactgcactgaatcatttcatgtgttcaagcaaacctgcaatgaaaataacccagaagtcttgagatgccaatgactctccaatcaaaataatgagggtggcagatctacccgagaaaaatcaaaaaacaaataggtgcttagaaaacaattttaaatcctattgttttcataaaacaagtgggcagagtaaagtgagattttttagtttaccaaaattgggactgggttaaaatttcaaaagttgagaattcactgttctggaggattctgtgagagtcaacactggtgtctactctgtgcccactgcagggttgggccaggaactggtttctaccctcactcagttcacaggatgatcaggagagcccaatccttggcttctactccaataatgttagctttaaaattagtcttacatgctaatagtttctctgtcagggtggtgaaaatgttctaacattagatagtggtgtcagttgaacagttctgtggctacactaaaaaccactgaatagtacattataaaagggtgaatgtttttggtatatgaactaactcaataaaactgttattttaaaaatcagtttgaaaggtcttacagccttttttgtacaacttagacctcgagtacatgctgggctgtactcctggacctagcttcaccacctggacacagcttgtctcccagttaatttttgtgaaaagagcaaaagctctggaatcgcacagcttgaggaatgaacctaggcatgttacttcccaggcattggtatcttaagcacattactctctgcctgtgtcccatctataaaacaggcagacaccaccccccaatcagatgagaactactactgagaatctgcaaatcaccgccaacttcagactaacattagtaaatggcagataattaaaatgaaattaaataattaaaatgaaacagcctctaccaaaggacacgtgaggtatcagaagaaactaacaggaaagacaaaaacgagaaaggatgatggcaagtcaagagtcaggactgaggccagcctacctggaatcctctttgggattccagtgatgctttgcagtaggggtgatatggggtgggaagatggggatgtgtctgctcccagaattatgtgctattatcaagatgaccttgtctatgatacataaatctctggactctttaatgcaagaccttttatatgagtaaccacaaaacagagacattttctatactttactctcctcaagtgtcactcagcattcagtccactaatggaattttagcctcttgatttgggttactattaattagaacacatagctttgcatcagaattcattttttatagattaattctataacataaaacatgcctgaatttgactgttaggagtcttttcttcacaagcctcaagattccacacctgtgattaattta

SEQ ID NO: 38277 - DNA, 3221 bp, Homo sapiens
acaggttgtacctaaaagcattccttattgctcctccctacacattttatccaccaccttatatctgcacacaaagtcctccatttcaggaaggaaaccaggacaagcgtcactcccagctgagctcttcgccaggtactttactcaagattcatctcctccagggtgcttggatacccacccttgttctcccttcccatggctttcccaaccaggaaatcatcaccaccttctgacagcagaaggactttgtcctctttagcactgagtccccagtccctaccggggtgcctgacacagtgagcacactcaagggggtgtgctgcaagataaaggaatgtctctcctcctctgtgaagccttccaggatttataaggcttccagaatttaaaagtaatgtgtgcccttaccccacaacaccagcattctgaagggcctagataaagaacactccatctcctcttctggatatctactgtaattaggtggaataaataccagatgaattggttcatatcatgtgcttcattacatctgcacccatgaacaggaagaacagactttgcagccttgagtaaatgagctccttaagatttacgtttctctcgcctgtaaaatgaggctacagatacctacttcctaatatacataaagttcatagcacaggatgtggcacaaagataaacactcaaatatcttttcccttccccatgtatagtaatgaataaaagtcaaagtaatttaaattttacactcacatgtaacagaggcagagctaggtaatcagctcatctctcttttgaatttacagggatgcttttctaaatcactcaaacagcatgtctttctttccctttggagatcgaaggatttacctgaccatgaggcagtaagttcccaaagtcaggtctcgtctgagcacagccttacctggcccacagtcacagaagagagcttcactcagagaacgggttcaggaagtacatatagaatgaaagctgactaaggcaagcctttaccattttccattatcttctaaaatgagatgcttttttaaaaaaaacttttaaattttttaatttaatttcgagcacggaaatttaaagatatttgagggaaaatagagcggtacatctgtgataagtgactgttctgtcaaagtttaaggactgtaaccctcagatacattttattcaaaataacaatttctattgtcacacactcaaagcaacccagacaaacaggcttggaaactaccagccaacttcattctgtgagtaaccattaagttttaatcagatgtggttcaatttctggaacagtgagcattaagaggggctcatcaaggaaaatgggcaaaagtaggaggagaaggaggaggaggaggagaggaggaggtagagaacaaaagaactgccccgcaagccagtcattgaacgtggactcttgactcgaattctctgcccctctttgcagctgttgtctcctgcagttggcacgaagcgttgccagtctgggaccggcttccagtgaggacagcattgttttattggctacttaggcaatgcacacaccattaatggagtttttatctctccattttcctgtcagtacagaaccagccagtctgactctgttattatcatcaagaaagcttttccccccctccccacacacactctttaatccaaacaacatctgggaacttcagcctctatcatgtaaaagcgaaacagatttagagggagagcaggagaaagtacagttccagtcgcactgaacaacaaacgaattccaacaggagaactaaccttgagccgcccaatatctctgaaacgctattcgcttcaaaaaggcaaggtacttcccgctgcattgctttaaacttccgatagacccttgctatcaagaggtgggggaaaaaaaaacaacccatagtgacaagttgcttattggtactgttttcctagaagggaagtcctgttgtgaaataaaagtcaagaataatatttaggtgatttttttaaagaatgtcttttttattcaaaaaggaaaaaacaataaagaccctttagcagacattactagtaagtacatccccagtgtacaaactattaggaaaaatgtggcgccattaaacccagaaaatatgtccttctgtaacagacagctgtctcctctgtagtttaagtgtgctttctgcttagctcatgctccgtgagtcatggaatcaatacaggaagcacacagagccagccacactgcagattccgaggagggtcaagccacacagctcctctgttcctctcctctgcttgctgcatggctcttccaagtatgtacatctggggagaacgcacaaccccatttctacttcatgtttaaacctgcctcataaggtctccaatcctggtcctttcagcattgtttctaggtaagtagaacctaaaaattacagccctccaacatgcaggtgtcaagcaatccatcctgcccctcagccccactcctttttgagttttctgcaatgcaccaataactatacttaggttagaagggacttacttccccagaaatgctcatcacccagtagaagacaaaatcagaactgaacatctgagtgtcagcaaaggttaatggtttatttttaatttatttatttttgttccattcagcaaaacaggggaaaatcactcactgtctgagccacaggctcctgctcactggaagctgtgcccagagccccttgcagtctgttgttaatgacagtctcagtaacctgatcctctcacagtgggagtcttgagtaagcactggcctctctcgggtctcgcctttctattgtcccaccctgcagggccagctgtttctgacagccaaattgctgcatgctaagcaatgaatgctgtcagataaggaattttcatttctataatgcataggcctccatggacaaattatacagcttatggtgctggctgcaggatgctgctccaagcttgaagcactgccaaaatgaagcctgtcctcccctctccccagccccaggctgacaagacagtcacccaaaatgaatctgaatggcccagggagaaatggaacacgtgttttcagagacaaacaaaacatatgttgagaatagctgtccagcgacactctttgatgtaatggcgtacagggaaagctaattgatctaatgtcacaccacacaactaccagg

SEQ ID NO: 38278 - DNA, 1829 bp, Homo sapiens
agaaaagaaagtgtgattttctcattatacttgaatgtaggatatgccatagccattttgctaccttgaaaagagaacctgctgaggatggaactgacaaaagaagaagtggaggggaaataacagggctctagggacactgcttgagccctgagtcaacccagatctaaaacctgttttaccctggactccacagaatggcagccattccatgttcatcttattaaggctcgcctgggttggagttttccatcacctgcaaacgcaaacgaacgcataaattatcactccaccattagagcatccaggaatcaacataaatacgcatatcatacattgctatgaaagcaagaaaaaagttttcctttcttggttatttcttgtgagaacttactttttcaccttttccttctagtccatataccttaatgtgagctaaaagtgcaaagtgtcacctgatcttggccatttttgcaaggcaaatctagatatttgacctgaactcagagagatgaggaagctaaattcatgacctgttataaatcttaacctgacatggcacatgtggaataaagaaagtggactctggttagcgagtggtccatcagctccatgtcagtgaagccagctgagaaaaaggccaggaagccagcatgggggcagggagcacctgctctccggctgggttcaggtcagccaaagcacaagcacctgcaggctgtgagccgccaaggcgatcacgcgccacatcctgcagccgtccactttatcattaactactgtctggccagcaagggcagggtccgcttcaagaacactgggaactttaaggcaggaggcatattcagaaccatggtgggctcacagccactcactacagactataaatagcctcctggctgtgatcccgacggcaaccacaattcctgttcccctggtggtaacagaacttcaggccttttgcccaagaaattcagcacaacctaccaggtatggcaaaaattatgaaatgtacatacatgcttactcaatgccctggccactctcctcttgtccatacttggcttctaatccccaaagatcaaaaagtggggatattaaagttgaaaaagatataaataagatttcagtttgatgctgagaaaaaaaaactatagaatacacaggctcaaaattgacataggaaggtagggaggaaaataagacccactcactctcaacccttctccttcgacaatcacagggatttcaaatccttatagtcattattttatctgaagttataaggggataggatgaagcaggggggaagacttgccctgacttctaacttgggaggagcaaaggaagaccaagaaggccactaagactgcttagacatgtattttaacgaccgcatttacctagctgcttctcagggacaataaaatgaaacaaaattgtcaggacttacttaaacttacagttaaagatccacccagagctgggtgcagcagcacacacttgtagagccagctattaggaaggctaaggcaaaaggattgcttgagcccaaaagttcaaggttggaggctatagtgtaccatgatcttgcctgtgaatagccactgcattccagcctggacaacatggcaagaccccatctctttataaaaaaagaaaattggcagggcacggtggctaacacctgtaatcccagcactttgggaggccaaggcaggcagatcatgaggtcaggagatcgagatcatcctggctaacacagtgaaaccccatctgtatgaaaaatatttttaaaaaattagctgggcgttgtggcaggcgcctgt

SEQ ID NO: 38279 - DNA, 941 bp, Homo sapiens
aaaaattaacaattaatccaatcccctgaactcagggatcactctgctactttagggggagtcattctagggaaacatcccttgttacaatcactgtcaaaagaaaaagtagaacccccaacagtccaatactgaagaagaccttggaaaaggtctttataccatatcatctccaggactggcacagtgctggcacacagctgatgttctaacatgtggatggatctctcttccaaccaacttcctgacccttaacaaaggccaagccagaaataaactgcataaagtacagagtacagaaagcgttctgaactgcagcaagttcactgcctttccttcccatattcattcatgcctttggccaggaggtactgagcacctacaatgagccaggcactgatttaggcactggaggtatgacatcaaatgcaatcaagttcctgccctcagagtttacattcaggcagaaaactccacatggaagttctttcatgcatccagccctgtatctcccgctgtcagactccaaatcttagaagatttcctccaagtatgaacacacgaccctgcataaggaactcttcaactcatgaatcaatgaactctggcaaagtcttcaacatccagttacaacatcaatatttaaggttcaaagatgatgcaatttactcaatttctagcattttatgttcctgcttcccccaccccctgaaaatttcagaaataatctgctacacagaggaatttaaggaatgtaattttaatctaaaatattaactctgggcaggggactgttctaaggttcatctactatgattttttttctttgatctgaaaaccagcgaggcagtgtacagattccaggtttcctagtacaaagaacagtgtatttaatcacatctctattataaaagccatgtgatacagaataaacctctcag

SEQ ID NO: 38280 - DNA, 3237 bp, Homo sapiens
ggcctagatttcagcttcaaaagaattccattttttaaaattccaagacagaaaataaaaacaagtgaatcataaaataagtgatcgaggtcccatccaggcataagataacctcctgacccctatgtccccatcagtgaaatggatgaggcccatatttcaaacttaagcagtctgcacactatgaagctgcatggcgaggccgatgtctgaggtcagcacaagtctagtgtctgctggctgcccaagcctgggcccctggccagcaacccacctccagagacaagtgccaggacatactatagtgtttccatttaaggcccgccacttggatcagcccatctctgaaatttcttaacaccacctttccaggaagaatttttttggggaaaagggaggtggtgtctattttttgccaccgccttcccttgggctgtcagagcaatctgcatctctgggacaggattctttaaaaccactgggttatgtctcaattcatgggcctcttctcaaaaatatgtaaaaacatgtatggaacgggcccctttgcccatcatctaactcttatcatacatccctcaaaaaagaaagaaaagcccaataaaattgacaagtccattgtattaccttgctgcctctctccaaaagccaaattcatgacaactttttaaccaagacttttcttctgttactaagtggaacgttttcttctctaagtagcttttctcccatgcaagcagcgttcaaatctccaggggaaaggaggggtggggagggggtgggagactatctggcacaaactggacagagccgagccagtctagaacccgacggaagttactgaatccagcggccccagaggcccacatctcttcttagtgcgcccgaggttctagcctcactgttttggttacagtgttgaaggaagggttttaaacttggcaaagtaccgtgcaacatctgtaaccacatttgccttctggggatcggaagatgaatcccacattcctggctttgaagctttttgaaactgcagctaggaagaaccgagggagggagggagttgagcagagtttattggctgtctctccagcagaaaattcctcttggaagagatggatattttgagggtgggggaaattcgcctatctatctccttactctctacaagctcagctaggaaggtaagccccgtggccccgcggccagatcgatttacaagtcagagtcgcacaccctgaaggagttcacaacacacacacacacacacacgcactcacacacaccccaatacaaacctgagacccccgctccacgcctctgcccccccaccccccatatcccaccagcagttcaggcccaaagcaagacagttttgttccgcggctgcttcccccacggagaggggatcaagcttgggggagaaaggaatgaaagcgagggggaggcaccgcagacgcccaccctgccacccccgatccctgcctcttctcccgctaggctacctcctccctcagtcctcccggctccagcaggcgcggccggcgacctgcgctcacctcgggtcccgccgcggccgggggctgagccgggggaggcggagtgcgaggcagccgggcgctgcaggtcggcgcggcgcggggcggcgcggggcggggcggggcggtgcagccggcgagggagcccggaactctgcggggccgggagccgggggccgagggccggcccagagcggcggcggctgcggtggctgcagcggagcggtgcgtggggccgggagcttcccggccctggggccggcgcggctggccgaggagcaggctggcagcggcagcggcggcagcggcagccacccgggggaaagagccgggggagggcggggaggcggggtgaagaggaggaggaaggggaggagggcgggcagaataaacttcccgaggcgcagaggctcgggctgggagcacgaccgcgggcggggcgggcggaccagctgggcttgcccccgggggcggcgggggagaccgtcacagagagtagaaaagttccccctgcgccgagggggaggctgcggcggcggcggcggctgcaaagagcaggagccggagcgggaggagcgggaggaggaggaggaggaagtggctgcggagcgctcggccaatgagtgtctggagctgtgattaaccaggcagcaacacatcatttcctcccggcgcggatccagggagccgggaggggagagaggaggcggcggggcggggccgtccccgcgccccctgcaggcgcccggccgagggcgagcccgccgagccccgccgagcctgaccgcgccgcccccggcgcgcctggcgctgtctggccggtcgcttggcccgggtggaagctatgagcgcgccgccagcggggctcctcggaggcggcggggcaggcccgagctgggctcctgtggccggggtgggaggagaagaggccgcgcggcacgggtgagtgcccaggtaggcgcgggcggggccgtctggacagctcccgagggcgcgcggggcaggcgggcggacgggcgggcatcccgggcccggcgactgcgggcggccacctactcgagccctgcatgtcagacttgggctggattctcagagagaagccttagcattctcatccaggccatctctgacctgccttcagatccccttccactttgctcatttccttgcaaggtctagggttatgacagagcttgccatgttcgcctttggcttccttagtaacagaaataagcatggaggggcttctgcagtgatctagccctgtcctaggcgccatgggagcttacagtggaaatgcaggaacattctccgctgcagagagtctgataacctcggtccttagatacacaaaaacaccccagtgtgctaatattacccagagcatcaaaaaggcatgcaaggatcaaattttgcatggttcctgctgagtgtaaaggaaagcactaagccattttctctgccctctagaagcttataatgtacagtcctatcacaaagcagaataaaaacatgaaacctataaatgggaatgccataaagtatttttatctctacaggttcattcatgcagagggcatttattgggtgactgcagtactgcaaaaggttgcaaaggaaatggaagatctggtccctgcaggttgggagtttacaatctaattagaaatacaaggcatatatacgtgaaaaaactaga

SEQ ID NO: 38281 - DNA, 703 bp, Homo sapiens
aaggacatgcaccttatttaaatgatgttttaataaaaataaggcattactgaaggttcatggtccttttttttaaaaggtacatacattttaaagctgtgtatatcagtcaaatgtgagaaatactagcccagatgcatcataactgttcttggagaaaaatgaattataaggccttgagatcttaaatttagtcctaatcctgaggccctaagaaaccaatattatattctaaagatctaagcaactcgatcaaaatagtagggggtggaagagaaaatcataagcagaaaggatcactaaaagtcgtgtctgacttggcaccctttttctcaaaaggtaaacatttaaaccagtcaggacagacatttgtttatcttccaagttaaactttcccaggtgtatcaatgactcattaattgtgcatttcatataagagttcactggccacctaccatattctgggaactgtgagagttatacacagagtcctcaagctgcctatagttgaaatgggtgtcaatgcagtcactcctggcataggaggctacgtacaaaccactgtgtgactatgggccaacagtgtgatataagaggcattacaaaattatgctgattatttattaaatggtattgaggcacttggaaaaaaattctgttagtgcctcccctcaaaccattcctgaaaatatttccaaaagga

SEQ ID NO: 38282 - DNA, 522 bp, Homo sapiens
agtggctaaaatgggaattgaaccaggtagtaccaggccagaggctccctcaaactccagtgctgtttccctacttgctatgtgttagtttacagcattttcctgattcctttcctactcctctgtgtgtttgctagcagattttgatttattataaactcagatgccctcgggattataaacatggagctggtaagggatggtaaacattagggatggtaaacaatatggacctaattcagtacacacacacacacacacacaccagactgacctttggattgccttttgcacagtggcaaaaaattaaacaacaaatcaaattaaacaaaccaaacaagaaaaaaacaaaaacaaaaaaacccaaataaacttgcactggctctttatgaagtaaaacaaagaaaaatatgaaaaaagcaagctaaggataaaacaataaaagtaaagcaaattaaatttatttaaaaatcttgtgatgtccaaacaaatgtattgacttcagctgcctgtttgggaact

SEQ ID NO: 38283 - DNA, 1318 bp, Homo sapiens
tggaagaccaagatcagggtgctggcatggatgagttctggtgaggacacactcttggcttgcagaaagctgtcatcttgctgtgtcctcatgtggcagagagagcgctctggtaactttttcttctttttataaaggcattaatcccatcaagaggactcttctctgatgaccttatctaaaccgaattatctcccaagggccttatctccatataccatcacattggggggttagggtttcaacatgtgaattttgggaggacacaatttaatccacagtactggcctagcaaaaacatcagctgtctactacatggctaaagtagtctgcatcttatcagagagttccaaaggtcacagactgaaagatatattatagtttcactatcagcttgcttagtgacttggggaacttaacgtcacaattctatctcttccttctttcacgcttgcaaaatagtgtttgagacacatacttttttttttttttttgagtcagagtctcgctctgtcacccagactggagtgcagtggcatgatctaggctgactgcaacctctgccttccaggttccagcgattctcctgtctcagcctgccaagtagctgggattacaggcatgtgccaccacacccagctaatttttgtatttttagtaaagacggggtttcggcatgttggccaggctggtctcaaacccctgacctcaggtgatccacccgcctcggcctcccaaagtgttaggactacaggtttgagccactgcacccgactcctcactcttttttcatgtctgaacctgctcccctggcccagggtgggcatttgtcccaggcaaagccaatgattgtggctctgtcccaccagggtgagattaagtctgcttggaattcaaactctgagtggaaacccacagaggtgaaaggtcatctagatagttatccaatgataactgagaaaagcaccaagaactgagttcttcacacttgaactgctgttatttctgtccttaccaaccctgtttttgcagctctcctgatttgtgagccagcccagaggccttccaattaatcttgtttgcttgtggtggatataatcaaagagccttagtgagtcaagctacctcaaaagtttgctttgaaattaaataggacaatacatgagaggcaattagcacattacaagggatataataaatgctcaagaaacgttagctagtattattactacaatttgacttcctacttggattctacatggttacacaaataaatccctacttattactgagaagtcagctatagggagttgctcat

SEQ ID NO: 38284 - DNA, 628 bp, Homo sapiens
ggtaatttgttactatagtagctacagaaaaccaatatgtgattctaaatacctttgtcaaatgtattgaaaatctgtctaatcaattgttttaacagacagaaacttaactttatttatatagattattttgccctttcctaccatgccgatgttccaaaaagctgtgaagagctgtttctgcacagatacacctcctcctgtggtgtcactcatgactgtccctagttgaatcatccttctgcaatgtacccaggttcatatgcctctcatgtggttcccatggtccctggatcagagctgcaatccccaagcccttgggccctttctgaaggaggaatgaaagagtatggctgactacggacagtaagcccccttctcctcattcccaccttctccaggggcaaggaaatgactcatcgcacaagctctcaatgcccatcacccattcattctctcctcttgggttgggtgaagtgaggtcaaacttcttaggagagaataaaggacatggctaaagttttcttccctcttccagttctcttcccctacgttgattgatccttttacttttcctaatactttaaaatgttatacaaatatttgcaaaaaatatttagacatggaa

SEQ ID NO: 38285 - DNA, 725 bp, Homo sapiens
ccaggcctgggcctgtgaagctccccagcaccctccgcaaagagcaaagccaaatgttgacagtctcaaaccctcatttcaccacatcttaaggtagccctaaatgcttgtagcttttcatttaggagcaggaagagagatccccttgggaaaccaccctttgaaggcataagctctaatgtttaaaatctgttcacaaactagacatttctctgctctcactggggcagctggtttccctctaaataaatcacagggctggggagcatttcaatgagaaatcttaggggtctcctttcaacactgtacaaaaagcccagcctcaggggagctggcctgggaacaccttctgcaggctataatcctgctcatgaactcctttgggattggtttgtctggaaggtagatttaggaacattgtgcaatcccgacattgcaaaagggcatcaggggttgaccagagtcccatgacatcagaagtcaagcctggcagatgggcagagagagagaagtagagtctctgggaaagcatccagatgcctcctacctttggcggtcagcaccttagccatccaggggctcacagagtatgcatgggaggaaagagaggaagtgcagcactcaaacttaacagaatctgaataagcctcaaatgtaaagaccatgttgctctatatgggagataatggtgattcaatgggagaggccagtcaggggagataatc

SEQ ID NO: 38286 - DNA, 720 bp, Homo sapiens
tcacatggccgtgagattcttagaaggacggcagtcgtactggattcaggacctaccctatctagactgcatcccaacttaactagttacactgcaatgaccttattttcaattaaggtggtattctgaagtactgggagctagaatgtcaacatatctttttttctgagaggagatgcaattcaacccataacagatctcatccaagacaccacattatgtcatgtctctttaggctttgcttggctgtggcagtttttcagatttcccttatcttctgatgactcaacaaaattgaggactactggataggtgttttgtaagatgtcccgttttttggaatgtgtctgaagcttttcttatgataacactagggttatgtgttactggcaggaaggtcacagaggtaaagtgatattttcatcacatcttatcaagggtacacagtgtcaacaagatttatcactgttgatgttgaccttggtcacctggccgaggtagtgttttgtcaggtttctctactgtaaagttactcttttttctccctttccacattgtgcattttggaaggaagttgctatgcacagcccgcacctaaggagtggggagagttaggctcctgctcttcagggtgaaagatctacataaattatttgcaattcatctgtgtggaagatttgtctgtttccccccatttattaatttatttaatcatgtatt

SEQ ID NO: 38287 - DNA, 2916 bp, Homo sapiens
tagctccccttttatacaaaggttttgaggcacctataacctatgtattggaaaataaacactcaaggaaagatcaaaagatctttaattagttttagttatttgtcacgaaggagagaatgctgaatttacacttagtatatgtgttttaacatacagaaggttagtatgaggagtgtggtaacttgcgttttctttattcatggaatgtcaatatttttgtggaagaaaagaagcaagaactgtctttttcatgcctttatcttcagcacttcctagacttcctggagcatggtgtatgctcagttaatatttattgaatgaataaatgaaaatataaactgcttagcctcagaatggatagcttaggacatttttggagctctctcaagccattgctggtgctatgggctgaatggaagagccagggaatctgatgtggcaggaggaaagggctcttggttaccccatccccactctgagacccgccaaagaaggaggagatgtgaggactttgctgtgcgttgacacccctactcccataggctgtgaggctagtgtgtgtgtgcatgtgtaaggggcagtgtcttctgggaaggggtgcctgctgcagcctcaggtgaaccaatacaacctttgctgataccccatggagagacatctaagaattgagactctggtcccagggctagtctagcaggcagggaaagagcacaaaagcatggtctcagggaggcctaaatgctatccagttgtacatcaagactgtgctttctttttctaatattagaggttcagggacaaaattaagccagatagaaaactgtaatggaattgagaatgtaatagtgccagcatcataaaggaagacggtaggaagtgaagtgttttgtctcaggcaagacaccatggagcatggatttggcagatctgatgcaagaccctcctgatcacaaggctggactgagtcatgggctgtgcctggcacacagcctttgtttgcaaattacccagtggccaggtctgagtttgccttgtgcactcctgtgtgcataatttttaaaaacgaaaccttttcccctgctcttcaggtgactggccttttgcaatacagtcaatcaaaaagcattgctgagaaacaacctaccataagagcaggatcgagtcttgagaagattgaaaggtggggagaataatttaagactgcccagaaggcattaactagtattctactttcatcaacttttatagattccacaagattattctgaacttcatccaaatgacaattacttgcctaaatgtctgaccgagttgttacatggggtccataaatcttagatggcattacctggcactgttagtgatcaagatcactggttgactgaatctgcaccggaaacagacatgttaatcaacctagttaattcactgtggtaattaattactgaacacttatctaattagctaacatttttacctctcaaagccagaggtaaatgccagattgaaattggtggttctcctcattataccttaaaaataaaattgagagatatggcatggaatatcaaataaaggtgtgctggtgccagcagtagtgagtgagtatgttgagtctcaaaattgccagtggttcctgggaaggagcagcaggtagaccagcctgagatgagtcaggaggtaagagacagatgtatacaagctatcaacaagaactactgttctaagttacaaaggcaacacacatgttaaagactattttgcctcatagtcatcattaccttttccaggataagtgtcctcaggaattttttgctatctgggcacagttgcaaacgtctagttggtggtaacagtggcaagatttaggctacatggattccccaatatagagtcccctattctttttccttcctattctgtaaactttgctgtctgaccaagatggaccaaaggaggccagtggggcattcaaagaatttgccaagaatgactgtcaccaggaagaggagcatcttctaacatggagaactcagttaggatatgagcacttgattcttgactgtgatgcacattcttggaaagaaatccaagcatattaggaggtgtcttgtatttgctgctgtttggcatttatagacattttaggttctgatttgcctgaaagccatgagactacgttcttgaagctctcaccagcatagaacttcagctgattgctatgggagtgaagagaaaaaagatcaggatgaagttgtctagttttctagatttttctgtcccaaaagtgaaaagtgagaagcattagtgaaagtagtgaattcatgcctttcttggcagagactccgttttctgaaaatactatgctgtattattattccatgtggattaacccctggttcaataaattttaccaatggcctacagtttaactaaagaaagaggccctgggaaataagttttgtttaattatcagttcttctgtgtgaactggaatgagcaaagttcagataaagggacattctgaggtccagactttggatgcttccctaacttgtgatgacaaagaatgaaaacaagttggcgaggggctggatggagatggggaactgaaatgtttgagaactgaaagttctcgtatgtactggacacagttttgagaagacctggtaggtgtgttatagaaaccaaaagaggactcgtatccatatacagttgtctcaaagcaaataagcctgtttgcaacatcaaacctgtgttgggatcaaggacagatgtaagggaaagttctcaccaatagttaacaagctaaccaacctggtcaaagagctaggatgccacaccttcaaagggggcctatcttcttgaggaagtgctgctctgagagctgggctgtggtataaaagtcatgtc

SEQ ID NO: 38288 - DNA, 1113 bp, Homo sapiens
tttgtctacgcttaggttctgcttaaatcctcttctatgtctagttgtttgcagcactcacagtggcttttctttaaagaattcagtgttatttccttggacagacactggtaacttagggaaatatttagtctttataatattaccttagtacagttcaatgagagggagcagaatcttgactttaattccatgtttatattcttctgctgttcccaacaatgaaggatattggactctgagaactgcatgaggatcattgataaaggtaaaaagataccacaaggattaaaggttataatcagtttggagctagagtatttcttaaccctaaaatggagataaatccagattttgaaaaatctttaggccagggtacaaggagaccaattgcagggctcttcacctttacaagagaaaaacttcattctgtatgtattctacatgactgtagctcagggaggttaaataactttcccaccttctcagagctgggaaacaggtgagctggactttgaacccagcttggctgactcaggcagctttgcaccctgcctgccatttcttgccagcagcctccgtgtggacacaacatgttcatagtctctggacggaagagccaaaatgtgcaccactaaaagtcaatgcagatttttccattttaagtgtggtgagcagatagttgcaccactgccacaagcaaaccctaagggctgagcacataccaattgacttagtgatgggatcaaataaaacattaagcagatacttattttatagtatgcagagccctcattttgccaagaaaatcagtcattgtagctggaaaatcaggtataaatggtatataattcacttattacttttacagggacaagatttttacaaaggtgtctttttgctttttcacatattttaatcaaggtcagtgtctatagttttgtttgattcattttaattccaccctcctagcctctattctactcttcccttcccactgccaacaactcacacattagggatcatttagcgccattgattccaccctgtctgtggttgtcattatttgtggccctcctctcccctgctatgaccccagggaggctatctgga

SEQ ID NO: 38289 - DNA, 2288 bp, Homo sapiens
agggaggagaatggcgtgaacccaggaggcagagcttgcagtgagctgagattgcaccactgcactccagcctgggtgacagagcaagaatccgtctcaaaaaaaaaaacaaaaaaaaaaaaccactgtgcattatacagccaccattagctagtaaaaacatttgcggtttgtcacaaaatcttgatccaaatgttaaacttaaatgaaattatcagctatattataatgggcagtgtcgttgatagcacctttataaaaggtatgggacaattcttcataggtataatgaattggttctaattcagcattgtttgggcacccaaagaactggggtccaggtatgtatatttgtggtaatgatgattcaaagatagagtttaaagtctttgaagcagtcattttcaaatattaatgtaaaaataatttaactgggaagatgttttcatgcagattcactgcgctttcccaacacccatccccaattgtgatttagtatgtctggaataaagcctaagtatctctgattctgatgcaagaggccagtggagcacattttgagaaacatgactctagaagaacaaattgtttctatgtctcttaccattgaccagcccctttgaatacaaattttccccaccttgtttttaataagcagccaatagcctgagattaatgtttcagcggagatacaggaagtgcaaagactctgggttgttgattaaaaaacatttcctgtgctttacataccaggcatatagggagcaaaggtagtgtttgcttaataaactcaaacccttgaggagcaatgggggagggtatgaacataaccaggaagaggtagaagaaaggccaggctgggaactccaaagctaatctttgctgcttttcctttttccaaagaccagccctgtttgacttctgctgtgcaatgggcatttgtgcccagccctgctatctttgcccactgttcatgggaaaaccttgttgaaagttcattctgaatcagagaggtggggttaaagtggtggtccataggggtgcgtggattcctaaggattcatgagtgaattttcaggggccctgggacccctgaagttatacacaaatattttgtgtgtattggcagatgtgtatttttgtgtgaaaagaggttccaattaggactttcatcagattttcaaagcagccataaatgttcccaaagggttgacaattactgggcagtcctagttcagctcagggtgcatccaagctccatgttcaggtctgtgtgttcccagaacattctagcctcaggtcagttcactgacaatctccttggtggcagctgggtcactaagtatctcttcctccccagcagccaccctccctgcctaatctgaggattttgctagcaaagctgtcaggcttaatttcagcaaattgttttgggtaattagtcccttttaattgctcatggaaatagtaattttaagtgacaagattattatatgctgctcgctagtggattctccagggtcaagaaaacaccactgagattgctataacctgttcttttctatctttggcattccccttgaaatccagaaaagacatttagtaaagtcggttcccactctgtaaaaagtatagagcactggtttccttttatccttctgccaaagtgaaggattagagaaggactttcaacttttctgtgcgactgccagcccatgtcaggcttcacagatttgctgatcattaacttgaaaagctgtgggaagtttctagctcttccatttgcttgtttacctgtacagccaagttgctttacaactgactgagttttgaataaatagggtcctaggtgatgaaatatttgccgcagctcaagttgaatattttcattgcttttcacgtcactgaacaagagggtcagtctgaccgatgggtcagtataaccgatagggcaggattgcctaatggttcaccatgtgctagctcaggggaggagtggatggaaggtagagaactcttctctcatcagtttaggaagctaggagttgattggctctgaccagctgtgtaatactgggccatttggttgatcattctaagccctcatttaatcatctgtcgaaagaggacaaaaataatcctagctcaaggaatagctgtaaaggattaagtgatatcataaatgcttggcatgtagcaataactaagtcaaacaaaaaagatacatggattggagaaatgtggagaaacgcatggagaaaacatttctaaactgatacatctgataa

SEQ ID NO: 38290 - DNA, 1102 bp, Homo sapiens
tttaacttcggctacttattgtgagaactgattttaattggtcctcgtttttctggagatagacatctgtatgattatgatgatggaactgggttcccttctttagcagcactgctgaaccgagagggcactgagaccacaaaagaaaccacagtcttctccctcaaacaaatgatttaagtaaataagattaataaaacatggcttctctaatgctgtttgaaaaatccccattacattctctttcttccttcccagatctctcagaacttctgtagaaagcaaacatcaaaaggaccaaaggtttttgtagtgattcagccgcccacagcaaagaagtaaaccttgattttctttcagcctaggaaatgatcagcgaagaggcttcacaaacagcctctttaacatttgaggttaaaaaagaaagtcagtggagcagaacagttattttcacaaacgccttcggggttttttcttctactttttaagtaacccttctaatccccccaagtaaaatattttcattagctaaagttttggctaggcattttaaacatgctttaaaaaaacaaatgataaaatatatttatgtattgggtgtgactttttctagtgcttttttcctttggctttctcaaatgctgatttcctctggctatagagtttcaactagcttctttggtgactctgccaagtcacacctaccttagcagtttccgttttgtctcagaattcagcttttggaattgagctccggaatcactgttccttttttttctttggagacagacaactctacaaagcagttcaccctagagttctgccaagtgaaccctggtgtttggatttcaggaggagagcccatctccagtgcctacttggggaactctgttacctaccctgtagttttttcaggtgagatgccaaaggttatgttcaagaaaggcaaagagagagagatgtgttgctttcatcaacactcagacaataaagtcaaagatagtaaaattaattaaattaacagggaaccaactttactggaaaagataaagcaataaactggacagagattcagatgaacttacaaataatatgtagatca

SEQ ID NO: 38291 - DNA, 1880 bp, Homo sapiens
caaagcaataatttccattgacaaataaatagggaaataagttgaggatcccaagctgcatctgaaccaaaatgaaagaataaaatttttcatagctgatatctaaaatgaacaaaaagggaaagaaaatagaactattctgagacttctaaaaacttgggaggtaggattcaggttacaagaaggcatgagcaaactctaggaaggctggcacagtaaacatttagggctgttttgggcaaagctgtctaataaataacagtcagtactaaggtttaacagatgtcagggaattctgagtactgaatcaccctgaattcttccaaattctcattctcacttccagaaggaaaaaaaaaaactgtggagaaaccccacattccttggggcttcagaagtagggagaaggaaagaccaactaaaacttggagagtcggcccctcctctgttccctttcatgagcctcataccctcaatagggcctctctccttgaggtaatcacagatgctaactcacaggcagtaaaacttgcccacctcattctgactacaccctgacaactaagaaatttttcattcaccctcctccaacgccaaaactctattgtttgttctccttctaaaatgagttatcttattataaaaaattcaaacaatacattgaaagtccataatcctatcccttagagagagctattttgtgattatttcttcagctttgttttctctttaattattgacagagtctgttccttaatcaggaaaaaagaacattaattttctaaagataatagttttattttagaaacataaaaaatattcaaaatctaattcacagccaaaaaaaatgctacatttctgtaccataaatataataggataaaaaacaccagccaataatatggttttgtctagttgaggggacagatctaggcaaaaggtaacataattaacaaacttctgtgcccactcttctgcttctgaagcagccagaaacctgcccgtggtacacagggcctatcccaacttccacagcccagtcaccccatctaatcaatgacacatatttctgaagagccacttcctcctccctgctgtccagggaaattcctattatctcagctagttgtttgaaggatataatctgattaacttcatgttaacaagtgaatgaaggaaagactgcttgagcaggcacctacacaggagtatgcttgttaaaactaaagaatctgtaaaggctcaaatttcagcctgagtgataatgtgaaagggaataatttctggtagtgtacaaagataattttgattagaggaatctccttgttgaaactgaaagtcatgctgaacaacatggacagcctttccctgcctatgtgagatccagcataatgccaacttcacagcaatatgtcactgtaaaggcagcagagctgagcaggaagacaaagggctctggaatcatgcacatctggattcacaccccacactgccccttgctagagctatacatttttggcaagttgctgctattattttttgacctctcaaatatctatcctcacatgtctaacaggaatgttatgggaattaaataaaatagctatacaaagtgcttggcacatagtaggggcttaagaatacaatcattattacttatgtgatttctttcagtctttatacaacatttaataaactgggatttccccagagtcttccgtaaagcaattgttgatggaatggctaaggacagtccaactactggccaatacggaagattatatctcttattgtattgtgtcatcactcattgacatggtttgaatgttccaaaatttttccctgagagaggtaacacatcaggcccaacttggtcccca

SEQ ID NO: 38292 - DNA, 2610 bp, Homo sapiens
agggaagggggagtggctgcagagaacaaacataagtaggatttaggtggctcagtgacgtcaggaggaagcagcgatggaagggatggggtgcaaactcacctggagaagcagaagctgcacacatgtcaaaggtcaaagggcatagcctcagggactccccaaacgcaggaaaagtgaaacgcccactcctgggctctcgccgtcaggggtacatctaagggctcagctgttcctacctttgacgccagggacaaaccctaccaggcacagttgggattggcagtaaggcaaggaaagcctgccccagatttcagagccagcgctggggaatctccctgtcctctccgccaccccctcccgcgcccgagacctgagacaccttctctctcacacccaccctctccaggccctctcgcgctgaacagcatcggtctctatggcgacctgaaaccgcagctcccattggcctgttcaatatgagggccgggccaatggggagggccagccctctccttcccgccaatggggtggcgggagctggcccggggacggcggcgtgctgacgttcccgggagcccggggctggccgggcgggagggctggcagcggggcgggcggcggcggcggcctctgggcagtagagggggctccggggctgagtccgcgtcgacgccggccgcggaggcggcaccatgggcaaggggtagaggggcaagttggccaccgccgccgccgggggtggtgggagagccgctccgggggcgggggccggtgggggagggaggggcgggcagccgcgccgccgcggcacttttttaattttttcgggtgccgcagcggcgacccctcggcgccgatgtccctgatccctggagcgacgacggccgctgcctaagctggaaagtaagtgtgtgggctcgcgggagggcgcggagactcctgcccacgagaccctcggccctcgccccgaacacgcgccagggccaggacctgcgcgccgggggccgggggcctccctcccgctgccgcgtccccagcgcctcgcggccgccgcggctttcctgccccgcctcgtgttcctgcccgcactcgcctgctgctcccctccccccggcaggcgcacaagtttcaccctccatttgcttttcccggcgattcctctccccggtctcccgtacgcgcagcgcacgacctctgcccacgctgggctgttcggattcagagctcccagccccgaacttgagcgccgcgctgagccctgctggacgccctcgcggcggcttccccgctgcctgccgccgcgcgccccaagtcgccctcgacaccactgggcgcccgccctcctcagcactcggggccggctgtctgtccttctagccccagatcctgcaccttggtcccctccccgtcttcccacgcccctgctgcccgcgcggtcttgcgtttgtccccgaagtcctgtactccttgccggtcctgcccacccctctgcctagtgcgcccctctctaccggccgcggatcctcacgctccacccctcccggctccccagcgccgagcctcgccgctgccctcctgcgccgccgcttcctcctctccctgccaggagttgaagcggagctgcggcacctccctggcggatctggtatccccgcccgctgccgaggctgccggccctctcccctggaccgctacccggagagcgagcggcggggccgggatttggctgcgtgttggctgagtgcgacacaccgcgagcgcgggcagtggaggtgccgcggcggccgtggccgctcggggcgcagcggtagtcaggtgtgtgtgtacagcgggggacgcgcgctgccggctcctgggctggcgacagattgtgcaggaatgcgaggaatgcaccaggggcagagtccacacagcccgccgcggctgccctagcgccttccctccccagctctcgccgcgcagccagaggtcaccggagcatcttcggagctggtgagcctcattccactcctctcctcccatagcttccctccatgcggcagaggggaagcgcggtaattctttggggctccagctagcctttcgtctgggtttttgctgcattggtcttcaggaccgtgaatttggggccgatgactgtgtagccaaggttattgatcattgcacagggctgttggcaagtttggtgtgcaaggtttggatagtgcctggttttcactagggttttctgaaaaccagcagaaacagggggcctgaaggttgttagagtaatgagcttgcagccaacatattttagctctatcaaaaaatgcctgttagtgctcacgggcatgtactgcgagagagatcttgaatgcatcactttggtatcctaagaagtgtaatttttttccctcgtcatactgggctgtgtttagacctcgtataatacataatgaatagaaacagagaagcactgttcggtcagcgatgggacagatagaactgtctggtacagttaaattcgggacgtgtcagttaccattgaaagtaacacggggacaccacaatcatgtatatttcaagatgtaatttattagtggaggtctcagttttttctctttgtta

SEQ ID NO: 38293 - DNA, 612 bp, Homo sapiens
aaaaaaatagaaaaaaatattttgcactcagaaacgtttatgttttggttgctacgttgtttttcagctatgtgcataatcagtgaatcttctaatttagaggtttaatttgtgtccagtaacactgtggaggatattgggaggtgtttgtaaatgccaacaggaaacttttattatgtaacagtatcatattacagcagtgtttaacccatgcttaacccgtgcttttttgacttgatgtcaagattgggaagtaaaagcaaatttagtttccctgccgcattagaaattgaaaaccctgttcagatgtatggatcacacacacacacacacacacacgacacacacacacacgattggctgtgcagatagttttgcctgcttcaggtaaaggtaacctttcagttagaaatgctttctatttgttacagatattcaaagagtggaagtttttcaactagtgatcctacacaattgaaaataaccgaaattgtattttgaccaaagtgcattccctccccaccccctactattatgtaaggagagggtgctgcatctggtgtcttatgtattatactgaagagtctaagttgggaaagctaaatatccaat

SEQ ID NO: 38294 - DNA, 465 bp, Homo sapiens
gcccaatgctagataagaatcacacagagaaaatagatactgatttaggagttatattctcttaaattgttttcttttaattctctaaaatctggctttaaaaaacagtctgtcagttattctggaaactcacagagtggtggtgaacagcttaggaatcaggtagacccaggcttgaatttaaactgtgtcactagctgattaaccttaggcaagttatttcacttctctggctctgtgtactcagttgtgaaacagcgataatgtgtaactcagttttgccttaaagattaaatgatataatgttttaaagtgcttagcactgtatgagtcatagtattcaataggtggttgctgatgttgctattatagcattaacttttcagagatgaaggtagaggccagacatcttatttcaaatatcattgtaactttaaaaatcccagtaaatgttgcctgttcggt

SEQ ID NO: 38295 - DNA, 544 bp, Homo sapiens
tgtgaaaataaccattctatcttcagtatgtccttattaacttaagtgatatttaaatatcaaagagtgaaatgagagccagagatccttaattttttgaagataaaataagaaaatctgaagcccaactgtgtcctattgatgttacttcatttttacatagatatcttagcttcagtaattacacacccttcctgtatggcaaaatgcccagaagtgaacaaattccagtacaattatttactttattcctctggaactgaaacaactcagctgttacacacctgcctttgtaacttccttttgtttggcccctatgcttattttcaatgaaatagtcctctctgacacacctcagccacatgcagaagagagaatttttatttcagctgtaaacaagcatagtttgtcacttaactagaagtcttgtgctgtaagtacaatgcctgaaacttctgatttttccaattggcaacttagttatttttccaattggtaactgaattatcctggcagttattgttaccgtgtaacccacagtgaa

SEQ ID NO: 38296 - DNA, 1233 bp, Homo sapiens
tgaatagctttttttaaaaagtgggtgggcagcttacataaaattctaatggttttggtttccatggtgaaaaatgttgagaccctgacactacatgccacctagtgtttctaagccaaaagctttaatatattggtgtcctagattttaccttatatttaagtaaagctgagaactatctgaacatctttttcttttccaagacagaacatttttccatgtatgtgaagccttgaggctaccacagtggtactttttatctgtagtttcttgctagttcgtatttgctttcccagggtttccgtccctgatggaacaaaggttgactgctgcatagctctgatttcaggccagcacctgtgcagctattcccagctattccaattccttggtattttacttagtccttagcaaaactcctttgagaattactgtataagaatgtttagaactctggaaaactcatgatagaagatgtacaagtaaagcagagcactttctggtattgtcagcctgacagtgactcagctcatgtttcaacgtgtaccagggaaaccatatacaatctttaatctttgttgaaattccaaactgaagcaatcagaactgtcacagaattctaccatacagaagcattctgtcaaataatataacaggagacaggtcggtaaaaacctatactaagaatgtcagctaatctttccagaggctaggaaacaaaaccttgaattgaatctgacatcaagttaaaggtttagaatgcagtgggatttcccacttctcccttaaaccttgtattcaccttctaaagcagcttaatcagcagtccctaagaagtttgctttacatagccaaacttcattgaacacagtaaggtaaagccacaatgcaatgccaggcatgagtcagcactcagtaaaaggaagctgctgttgttactgggaatttgcttgttcaacaaatatttactgagcacctactgagtactctgcaccatcctagacactgaggatataacaaaccagataaaagtctgtctgtcctcgtggagcttatattctagtggggagaaatggtgataagcgctatacagaaagagaaggctggcctcctgtggtaaatggatgctacttagatgttacttcctttaggaagattttcctaagctccattcccccagacacacacacacacgcacacacacaccccttaccttctctcataactgcatag

SEQ ID NO: 38297 - DNA, 544 bp, Homo sapiens
ttcatctttaaaaaggaaggaggccaggcacagttgctcatgcctgtattcccagcaatttgggaggccaaggcaggaggattgcttgagctcaggagttggagaccaacctgggcaacacagtgaaaccccgtctctacaaaaaatacaaaaattagccaggcctggtggcacgtgcctgtaattccagctattcgggggcctgaagcaagaggatcagttgagttcaggaggcaaaggtcaccgtgagccaggattgcaccactgcattccagcctgggtgacagattgagacctcatctcaaagaaaacaatcctgtcacgagctacagcatggatgaaccttgaggacattatgctaagtaaaataagccagtcacaaaaagacaaatgctgtctaattatataagtttctatataagattctaattatataagtttctaaagtagttgaatttatttaaaaaaaaaaagaaagaatggtgattaccagggactgagggcaagaagaaagggaagttgttatttaataggtattgagttt

SEQ ID NO: 38298 - DNA, 651 bp, Homo sapiens
acacaccattctgtgctttggtttggtcacctagcagtatatgctgtagtctcttcagcctgacatccttttaggatgtcatccctgcctgtagaaaagtgaacatgattgctgcttctatttattcacacagagagtgtgcccaagcctgatacctggctctggattaaatgaactgtgctttgtatttgcacttcacagctggctagaaaagtcaactcctacaattgtcaaaggtcaagttcagaatgtctagacactttcttaaatattccgacttgttttgaacttcaaggaaaaatgaaacttcaaatatttttcttgaaagaacacagagaagatgggctggccacagagtttacttacattttcatgattccttttttaaatgcttcactcggggaattttcagacaatctttgttttgtattcctgccctttgttatacatggctgcaacccagaactgtcagaggagattaagtttataaaagaagagtttctacatttttgaaatattttgactaagtgaaatcatttttttttctatctgcaatgcaattcagctcagttcgacagatatttactgggccttgtgcaaaccactgagctttaatagatgaatgagacattgctcctggcttcaggtgaa

SEQ ID NO: 38299 - DNA, 1055 bp, Homo sapiens
cttaagtgcattatctcatatctttgcaacaaaactatgaagtatttactattatttcctggttttcctcccatgttttacattaggaaactgaggcacagagggcttaactaactgacctagggtcacccagatgatgggtaggaaaactgggatctgaagctaggcagtctttggaagatgattttcaaataatcacaaaaggcaaaagtggaaagtctgtcaagtttagagattggttctgggcacggccaaggtctcttgggcaaactgccagcaggtccctgtgggaggcaattatgatgtcatgtctttcctgctgtaaccacatactctcagactccagatagtcctaaggcagctgtgacaagcatctgtattagcttactagtgaggcagggttcatgggtccaaaaaacttggcacatcagtgcttctgggcagcaaaatggattgggggaggggtgaggcaaaggtgtggcctttctgccctcttagcttagggtgtgtgtttcagacatgctataaagtacttcaggttcaaggagaaaacaaaatcttttgaagcaataaatactgacaaaaacttacataattattaaaatgctgggcttttttggggggggggggcgctcactctgttatctttattcattgttttacttaactttaacagctcctggcctgtagtagaaaacatgaagtgtagcaacaagaagaaaggctctgctcagggcaggagagcagaggcactgggagccagccagtgttctcaggttgtaaaataaaatctctagaccaattggacactggcctcaggccatggcagtgattaatgccagagttgtaaaaagtgccgtggtaggaacggttagccaggttgtactgtgtgcgtgtgtgtttgtgtgtgtgtgtgtgctggttttttccttaaagtagcttaatatgaaacacataattctcagttgttttggaatctaaaaataaaattaaagactcatttacttttctctgtctctcttttttttttaaggagacaggctcttgctttgttg

SEQ ID NO: 38300 - DNA, 2483 bp, Homo sapiens
aatccctagtccctatcctggtttttgctctgctggagaataacaaaacattttgggaactcaggagtttaatttactgccaccaaccgacaaaataatagcatctttgtgtgttctctcccctccgtccctcccacctccttccgacagaagcacgacgctggccctctgtgaatgtagcgcagacagcacgggccagcccggagcggtcgcaggaggctccagacccgcggccccagggacgcccgggaaatcaccggccccagaacgtcccccattccttttgggaaataaaaagacgcagccggtgagatgccttcttagaccttccagctcatttagctgattctggccccagaaagtgtgtttgtgtttgtgtgtagttaagtgaggcagagaaaatccaagaaagccgcacaagccaccccaaagcgtccacggaaactccagctcggttaattgctcccatatgtcctcctcggctgtggtaaaaaagcagcgaggagggaaggccgggtcgctttattgattttgaagaggctgtaaaaaagactatggcccatctcattttggtcccagaggggcctaggcgcagccccgggggacccggtgcccagagggatggtagggtgcttcaggcccggacctggcgccgagaggcgggacaaggggacctcgcgcccaagccccgcggaaagttcgcgctccgcgctccagccggtccctggatccgccgcagcccggggcggggaggggcgcgggaggcgcggccggggcgggcgcgcgagaggaaggtgccttcgggaacacgcgcaagggcggggattcgcgctgccaatgaggccccggtgtgggccgagcaaggcggggggacgggccggagcggaggctttgctgtggcagctgctggagcggcggccgcctcgggagccggaggagaggcagccgcggagcgccgagctggcctcgccccgaggcccggccctgggtgtggggaaccgcgctgaggagctggaaactttcccggcaggtaactcccgcagcccggactccgccgcgggcctgcgagcgccccgggcatggccagctgccagtgtgcggagaggtcgagagggacccggggtggagagggtgatgggagaagggaaaggcgtgtgggaaagtttctggagcgccccctcctccgccgggcacacccgggagctttccgggaataggcacagacatgttgggcgccccgggccttggtctctcggcggctttggggagtccgcaccttccttgcgcggttcccccgcgccggaccgagccggcctcccctggaaccggtgtggtgggaaccgggaacgcttggggcacgctcgagttctgggaccacccccgcccggcgcgcccgctcgccccctttcccgccttctctgtagccctcgggcttggcaagggcctgggctacgcctggtacctggcgcgggggaggcggggggaggcgcgcctggcaccgcggggtcctgggcgccccccggagtgttggggtgcgcgggtcgcgaagttgccgagagaacttaagccggaggcatggtattgccccagtctgggctgaaagtctattgctttgcttccaagaacactgcgattagcatatccacactcctttattgggggtgggggtgagttaggattagacgttgggggtttttctttaggggtggggcgctgagaagagcggtaattgtcaagattgtgagcccccttgttcttggatgcagagtggtcattttcgggggacgatatcagggcactggcttcctggaggactttggggtgcgggcgcgcagcgctgtgggtgtgcggggctcccggctttggcgcggcggctttccggaacgcctggctgggaaggaagctctaggcattgtgtggtgtgtttgcagacagaaaggtccctggaccggtgttctcaaaacttactggacttattgtgtaaagctccgggaggaaatgtggcgttggccaggtagaaacgcggcgctgcggccaaggggcggaggacgccaggctcggcaacggccttctcccagccccctcctgccagctccagatccgcgtgcctccagtgttgggaccgttctcagtggcgttgttccctgctggagttaacttgggaggtgaggagggaactttcatcttgaacttgaccccagaagcagcgtcgtccgtacaggttacaaggtaaatggaagctgagtcttaacgtgggttggaccgcaaactctggctggcgcggaaaggaagttcctggttcagaatctttgaggaaagggctcaagattgctgagatcgctcgctctggaaatgccagacacaccagactgcagaagttaatgcgtgtttggaggggtgggggtgggagaggaaaggagaaacctggttagttggcacagagggctggtatttctctgtagtggaaatgaagggagtctgcg

SEQ ID NO: 38301 - DNA, 818 bp, Homo sapiens
aaaataactactgtttggagaaagaactgatctgatttcttctttttaaaccagtgatactaaaggtgtatttaagcctgttttgagtttgttgaaacatcactccaaagtggaaacatggaaggcttcgagctggacagagctgagtataaatttaaatttttgccatttccagactagccatttatggggctgatctttgccttgtttgttttgagggttaaaggagataatgggtgtaagatacctatgccttgtctagttaagtgttcagcaaatactaattctcccccacctgttacagtgagctggggattccctgtgtttgcataaggttgtcctgtagctctttctgtatttacatatgtgatctagtcttgaaggtggctggctgggggggcgctcagttttgtgtattgaaaattgctagaaactgagagttggttattatattgccattgaacttcctgtgtaatggatggttaccatgtgtttgtgttattctctggtaaaaggcactttttataccagtggagtgtaaattccaatgtgaaaacgttaatctttgaaaaccctgagctaggctcctgttaacagccacttgaggttatctggtgctagaggctaaccagatcccattaggcaatcctttccctccctgtagcacattacccgagggcgggactcttggaaacttcaaactgaggctccccatggctgtcattgcttaagatctcccctgggtttttacagaatgggataatgagaaaccttccagacagaggggcagtcttatacctgtctccattcattttgcc

SEQ ID NO: 38302 - DNA, 1445 bp, Homo sapiens
ggatgttcgcacaatgacaaaatcacctaatgacgcctgtctcagaatgtatcctcatcattaagtgacacatgactgtaatccaaactcatacgtggtgtgtttaaaggttatggatgtaggcaaatgtcatctgacaatagtctatttattactacctagtatatactgatgtatttcatttgattacatcatctagcatttgaacagctataaagtttgtttgtgaaaactcagacttgtaaaggggggtgggggaaacagactttggattattcctattatactttggaagtattttggcttccctctatcaatgtgttttacacttaacattacccaaaaaaaacaaaacagaactttgagaggttatgattcacatgtgaggaaagcctttctaaaatgctgataccttgagttttaaaaattcttggattttttttttttaaggtttgtggagtgtttacaaaaggcggataatttggggcccagttgatcatatgccagtgtaaggattcttctcaattacatgtaaacatattcagaatctatcaaaaatgtgcctagggctgtgaaatggtatctgtttctctgatttcctggtaatatttgtattacttgagatcacctatgctgactcatttagtagatctttgaggtttatgtgcgggtaaaattaggagggcacccttaaaggctctgaatgttagaaacggtgctatgaatttgtgagtgtccaaaatcttttattgttgcagaattttctggtttaggacaacattgtttacaatccattaattagctggaactcaggaacctttttggtatgaagtaatttcctgtgccaaggaatttgacctgtttatcagtatttggggaagttcctggaatgtccgtccttccttctttgccctccctcactgctgtatctctttgtcacatttcttctcttccttcaaatcatagttcccacactgcctgtcatactgggttatcctgattggaattactcttcccaaaaagtatgcacagtgttttactttttctttattatcaggtacgtcatttgtccttttcccctgaattagtgggtatattgaccaaaaaaaaaaacaaaacaaaacaaaacaaaaaaactttgcttggctacactgtagtcatgctcctgaactttctcctaggtctgtgtgtgtgtgtgcgcacacattttcttgtaaaatccaggtttagctaagaagcatgctactaagtttagcaagaacgcctccccacccccacccaaatctgattagattcctcatcctccaccatcttccaggtgacatctggtcaccctgacctgtctttaacaagaattgccttcctacccctgatgttgcctcttagtaatttttcatgcaccgatacctaccctgttccttggctataaattcccacttccccat

SEQ ID NO: 38303 - DNA, 569 bp, Homo sapiens
agccattcagaactcagttctgtcgttccagtagctctcaagctctccctctccccatgcatcctccccaccctcaaacaaaaggccctagtggagaataagtagtatgatccattcatcagaagaaagctcagagcagatgatgaatgcctgcatctaacagtaccaccctcaggatgccaaggctcttggctcggtgatattcacagactcagtcagtgtctgttccgtagtttctcggcagcctgaaacatggtgagaacccaccagatgcttatggcatctgtttcaggcattccacagctgtgacaactccatgctgcctcccagaaagttctggctacactgagttactatctccatgtcagtgtttgctgtgaatcagcccaagccgaaatgaccagagatgcttagctggtgacctcatgctgctgtggattggcagaaggactgtgtttgcaagttccaagccacactcaagtgtgtgagcctgcttgtgggcttctggttagaaccttgctctgaatagaagagaacagaggcccttctgctccagcacttgccattca

SEQ ID NO: 38304 - DNA, 1868 bp, Homo sapiens
gtgctttctggagagctcgcaaatcccagctgtgcaagtgcgcacaggtgattttccaaacaaactccggctcccagccctctgccgcactcagctccctttgcaagttccagggcattcagtgggaagtaccgaggccaccgtcagctgaacagtttgttttgaaaaagctctcaggcctacccaggacctgccttggggtagggggggcggtgtgggcgttccctcgggcctcggctgtcacgcgaacagtaaattcccgggcacaccaggtcagttggccagcgtaaacacatgaatcccatctcattcaaagcaaacccgaaaggtgtccagcgctcccaaaataaagtccgccacttacaccccccatgcacgaaagaccaggaatgtgcccccctctatgagcggccgggcctctgtggactgagcgaccccaggcaagagggaggcctgggaggcagggagctcacccgcaaggggcttccttccacccgacgccgacacgcccgccctagccccgggccaagggtgcacgaaccacgcctcgccgcactcaaggtcccggttgggccctgctgcgcggttagaaccgggaaatggagggctcagacgccccgcgcgagcaggcccagccgcgcttccccacctgccgccaccgccgctgagccggcccgtgggcgcggccgctctcacctgcaggagcgggggcgcgcgggatccgccttcaaggtgcccacgggcggtgcgggtcacgtgccgcgcaggtgaggctggcggggcgggcgccggcggagacccagagcagagggaacaggccccgcccccgaacgcccgcggggacccagagcggagggaacaggccccgccccccgaacgcccgctgtgacccagagcggagggagtaggccccgccccgcgaaagcctgtggagacccagggcggagggaacaggccccgcccccgggaccggcccctgaggcggcgcatgcgcgctcttccgcccggactgcgagttcctccccagcttctggctcctagggtcaaggcgatttcaggcttggaaagggacttccgtcgcaaatctttctgtttttgctaaagctgcggtcgcaaggcctagtgatcgcctgaaacgtcgttttaaaggggcgttgcatggaatgttcggccatccctgctgaaagtttttacctctttctccagttctccaccctgcactgtgtactccgaggccggtctcccagattggccttctctatttcggccaccctgggcggtccgtgacttggcgtcttctgccctcgcctcctcattcgggttcccctaggggtctctcccgggcaggctgcctgccccgggccccagccctgccgttgggtgggtatcctgagctcactggaaccccgggcgccttttcttcagcctttcccagtgcgtcccactggctcacggtagactggtttccacgtgtcattgactacaaagtggccctgccagtgctttttgagataaaaattatccagaaaaaaaaaagttcctgagcaaattaccacttgttaactaaatgcacaacatagtgtgggactatgttcagatgaaaatcaaagatacagagagcttttatttttaatccatgaggaaacattaaaaatatatcagcctgtggagaccgaagttacatttgaagagtaatgacctaaaatgctcacatttaaagatgaaattgagaccgtgggaaactatttgcaatgaaaaagattaaggggaaagggaagattaaaaattaggattttgtgaagttcttgttaattttttaaaattagcggagtgcatcatgattgagactttgaacaccaaattccatt

SEQ ID NO: 38305 - DNA, 1012 bp, Homo sapiens
ttgctaggtaatccttaccatggtctattgcttcttgaggctctacctcacctatatccagagcgagccaggatgacaggagggaaactggacctagcaatggaacctactgacccagctatccaggagatctgagctgtaatatgctgtattacactaggataaatgaatatccacaaagttccatttcaacatcatgtctaaggaatgattaacaagcagatttgaacatacagatacttattaggaaatagaaaagcttccagaaagggttgatgtagacttctattagctgcttagatggaggaatatctcctggtacttgggcagtaactccgcaaagaaccagatcggcccagtccagaaaaactccaaactttcaggaagattactatgaatacttcaggcacagcttagaaaagcttaaaaaagaaagcctgcgtttcagaaactgtgttatctataagaatacaggaccaacaagggaaacaccattaccacaatgtcttttctcctctcagtttttaaccctgaaaactttccttttgggatcacaaacaaataatagagagtactgagttcttttccaccctcagtaatttgtgtcctagagtgaaaggaggataagaaaaaggaaaagagaaagagtaattcaagcaagagaatctaacaagcaagataaactatccaaagaggtcagagtctgaaaactggcactactggtgggactgatgaataatccattactcacacacaaatctcttgttcagtgtcaggtgcaatactttgtggagcaggtcaacataaaagtaatggtacttctactaagttatctaaactataattataaaagttttagattcatggggccccaaaataaagtctggtataattacaaatcaaggccttctgaaaaatgcttagatggtcgtcaaagagagattaggtggctgcaaagaagagctaaatggttttgagaacaaaaaacttgaggtttcctgtgtaaaatata

SEQ ID NO: 38306 - DNA, 3432 bp, Homo sapiens
tccttgttagaagagatgtaaatatgctgactgaaaatgactacaggagacagaattccactttcccattcaatatacagtgcctcttatttatatactagtcagtgtatcattaagcttggtcatgtgaccaaaccaacttttgtgaggcgaaaaactatgttagacaagcaaattaaaacagtgctagtttttgtttatctgttcataatggctgacaaagagtttatagctagcgattataaaataacttttaaaatcaattctgcctcttaaatactcaataattgtttgacttaatatctgctactaaattttaaagtatccattatcttaaggtattttccatagtcatttcttttcaaaatgtaaataaataatagaaaaagaaaaccccagaacattttattagaaacggggagccagataatctaaaataaccatacataaatattaaccaagctaattttcaaaaaatccataagggagagtggagcaaataagaaagggaatatactgactacagataacagttgaaacctttaaattaaaaaaaaaagtacacaaaaaccagataaataacaaatgacgcacaagttttttaccattttttgcatataatcttccacctgttaccaaaacatacaatacgcagacttcgtatactgattttgagagcaaaacacaaaaataagccacacaacttatcagtaacctgtaagttacacaatcctataaaacaggagaaaaattaagcaaaaaatttactcttgggaaaatttctccgtaaagtttacatgacgtcactgggccccctgaacattccctaaactttgagacttatccagacacacttcctaatacttctttcctttcctcaaaaataaaaaagagagagacttgggaataaaattgcccaagatggcgaaacgcttgttgtttagagggcaggaaaaaaaatggaggatattgtaatatacacaaagggataaatttcaacaactcggccaaggactgcagctgcttccctctttataaggaagcaacagacaaaagataaatacagagggagaaagaaaagaagagaaaatctcccaaacaacagagccagctctgactcttcaaacacttccttccccttctcaaatcccaattctggggttcgtgaaactacttaaaggggagggagccgcgaaagagaacgggggctggggggaggggtagcgacaagaagattaaaagagggaagcagaggagttgggagctggcggtcgttcccggggaagaactgctaaaacatgagaccaaggcacagaccttactgtatgagaagcaatgctcctcaaaccttctgcgtgctgacatagaccttcccaggtatccagatcttttcccaatcccacctgccccacccccacccccgctcatcttcagtaaactcagagcctccagctacacacgggagagctagaggcccaagccggggagtgggggtggcagacgcagctcgtcagtccgacagggaagagggggcggaggcaaaaaagggcagcaggaggcggacgggggtggggggtgatccagaaactaccccggcagggagtgggggagcagcggatattccggggtaggaacggccatcgcaacgctgacagaggttgttttttaagaagcaaaactgttggcggcgacctgagcgctggaagccgaaggggaagaggaaggagacgcgaagccagggcggccggcacaaaggcggcggactcgcggcggcagcgcctgcccggccgggagcacaacccacggccctactccagcgaagtcccgcaccggcttctaggaataaagtttacgttctcctgaggccgcaccccccacctcccacccaggacggcacatctccgtgtcctcctcccccaaactccactcgggaccccgagaaccaccccagccttccggccaccacaacaaagagccgcaccgaccggcgaggataaacagcggcggagggcgagagggcggcggggcgagcgcctccacgcagcaactccggagtcccccgcttgcccgagcgcagtttctccgctgctgtttccaccggctttgtaacactgggaatttacatcctcacccgcacccctcacgcccgaggattttaaactcacctttactctcgaactgagagttgcggtagatgggatttttgccttttccccagatggttgaaggttaagatttttggaaaccccaccacctccttatttctattattatttctgcaagaaaagtataaagagagttgtagtggaggtgagatttgtgatcgggaaagccttcgactccctccttctccgtcttccgcctctctctctctgattagttcctatccagcagcagattgaagcaggagatgattcttctcaaggtttgttcagcagcttcacttctaggcgaaggcttcatgaaccaagtgacgtcaaccaacaaggcttctctctctctcctctctctaacaatgaaagttgctgttaacaagggaaaaaaagagagagaattgtttataccatttcagttccaataataaatgacctatcagctcctaaaggagccaagggagggggttgcttcttctttccaagaatactgtagctttgagtttgcaccgttccttgtcccaggaaaaagttaagaaacttaaaatgttttgttttgcttttaaagaagacaggacagaaaacgggatttaaaacttagtttttaaaaaaacaaaagctacagagtagggagcataggtcaaccatctccacctaaattttttttgttcctaaactcagaattctacaacccaactaaattaatatgccaagattttgcggatgttaaaactcaaaaaaagcagtatgcaagacggtcccggggtaaaattctactgcctttccacggacaagttaaactggctgtaatgtttatgcactaagttaaaataaaatttaaataaaagacgttaaaatagtcgttttaaagttatatgcacacactgtaaaaggtaatctcgatagctttttttcaagtttctgagagattagaaaaaaagcatagcaaattgtaggcactgaacactttttaaaaatcaagttatgagtaagactggtagccctttgctcctttaaactacaaatgcagtcatatgctatggtctacccccagaatctcttccaactttgtttttacccttccactcccccaaccccaattcccaaatcctgcaaccaatcaagttaaactaaagatacaataggccccattccctcccgcaccccatcctatagattcctaaaaacaatttttttaaaagccttaatcttgataacactttattagccaagaagatacgtatttttttttttagaagttcgttgaggtaccgttttt

SEQ ID NO: 38307 - DNA, 843 bp, Homo sapiens
atgtggataaatgtatcttaaaagatgctattgttttatgtttcctcttcagccactggctgtgattttaattgtgctggaggatcttcattagtattaacacatggggagatttcacaaagctgcttcattaggaaaaaaaaaaagcttggcagactcggtctttttgcatgcactgagaatgtcagccttacctcggtcatttgtaacataataagtgcaagtacaatgattgcaatgcaggagcactgggggaagggcagaaatactgcctgtctaatagggatatctgaaaagaaggctgctcattacagagtaaaatgtatgctaaaaattagtgaagatgatgtctcaggagactgatgctaaataaattaatgtgctgatatgtttttaattattatttttgtagtagtttatttcattctcaggattcacattgagcagcaaagctgtgctagcacttattgattttttttccctgccacattcccggaatacagattttaatcatttcactacaccacactcagtaatttcattaaaaactggaatcttccatccccagaaaagcatttaatttcaatgacatacaatttctcttttagcagcaaactgtctctacagtaaaaactggcctaaggttcaaatgcataatttaatcctgagttttccatgctctgcattcctttcaagctataatttgagtaactacctaataactgtaataaggacaataatttccttataatatattattaactcatatttaattaactcggaggccaagctctgtacatgtatgactgggtcaacagttctataatctcaaaatttactaat

SEQ ID NO: 38308 - DNA, 2673 bp, Homo sapiens
aaggatgatagtgactgatactccattcccttccgatgtaatgacaaacacgtagaaacactgtgtttcatttattggaattatttggatccaaaggattgcttttaataccttaacaaaataggtcattaaaaaaaatcaagtgcctttcagtattcttccaagtttcaataactgatcttttccattaaaaaacttttgattcattattccaaatcaacatatcatctaaatatttacacatagttagatgtagcttttccctaacctactcccttttatttattagtactcatttacatcttagtttgccacatttacagttctttgaaagtttcatctaatattcaccagaccattcacctcacaattttcctccctctttctaaataggtgaatttgtttactgcaaaatcgatggctacgctattaaaggttactatcacgattttaaaagacatgatcaccatcatttaccaagattcttaccacaaggaaatgatcacaaggttggacaaacaggctccaactcttaagggaaagggcttgcagttagatcacacagggcgggcagggaagcaagcggggaggggtaggtcggaaaaggcagtgcttgattcaattcaacattcactgcgccacttaccaagagccagaaaaagaaaaaaaaaaaaaaaaaaagccaaccagctgggcgttatttcgagcacggggccctgcaggtgggcctgtgggcggggacccggcgcccgggagggaaggggctggctcagagactatagacgggcggggaccgccccggcccgggcctccagcgcccggcgcccgcacactcgccagcccagctgccggcacgccggccagccagccgctgccgcttaccagtggcgcctcgctgactccccgggggcagctcttcaacggttcccgcagtcagagcaccaccccgcggtggggtacctccagcccgcccgcagctctcggtccccgccgcgccgccactctcgcgagaagccaggaagtccgcgaagtggggggaggaggagcagggaggggcacttaacggtggtggctggttctgcgccggatccgggagaggggcgggcgccattgtgcttcgctgccgactgcatttcctcagtcacgggcctagaactccaaggagaaaggcggcggtgcgtgttgctgcgagtgggacgcgcactggtcggtgccggctcaggagccggggtaatgagctgcggagctagttcttctccgtcttgggcgctagttcgggaccaggccgcgagtgggggaggggaggaaacgaagaggcctggggacgcggaggccgcttcctctcaggatgaggtggagaagcttggtccggggccaccggggccaaggggccacagcgcaggcctcccttgccaggggcctttggtcgggtggtggagtttgtggcgggtgcaggggacagattgtgtgtcttcctcagggacgtgtggcgggtgacgggaagaagcctgagccctcctttggcgcggggcggcctcctcttgggccgtggggcggggggtcttcggagccctgcgggccgcgggtgtcgcgcgtgagctcgccggtgagcgcggggcaaaggcgggcagggctccggctcggccagcccggcctcgagtcgaagtgacttcggtagccccttagattcggccaagattgtcttattggtaacgtcagtttttgaatatcgtgacgccctgagagttatttttgtgttgtggtgaattgtgggttctgcaactcgaagtaggtgattgtattaaaaatggacctgttggcctaagaagtaaaaatatagaaggcgccgggagtaggaaactccctcattttggtgaaactgcgtattgaagatgtgtgtccaccccctcaccccaaaatgctgcacttaatactttttctcaagtaccaaagtaaatatattgggaaagtctatctgggtaataaattcgtcacgactaatgttgtttgttactattagttaaatgtgtgaaaactgaaatttggcgaggttttctcccccattttgtaggattgattagctatttttctgattacatgttattttaaatctccacctttctgtccagaaccaagatgtaggattaaagatgaattttcgatttaaaaatccaatagtatacagttattaagaaggcacacatgtagtgtaactagatcttttacttgaggtagcaaaaagtttgtttgagaaatgaggtcagtataatatttttatttaacagctctacagcattttgggagacaggactggtgcatgaggcagtagcaccagactcagaagacctgggtttgagtcttgatttttgccatagttatttaagttcacgagattgtctcagaaacatggcagttaatttctagagaggattaaatttgctgaggtggtgtgtgaagcagtcactaggggacataatactagtcttggtttttttccaagtttagtgctgggtcaggtgtcttgaattaagaattcctacttattcaagtacaaatgatttcttttttctgccacctggaagagggctattttcccagataaagcacgaggatgcccaggttatgttctacatgaaggtgtcaggtaacgaacttggacacaaaagtcatcca

SEQ ID NO: 38309 - DNA, 1890 bp, Homo sapiens
aagttctgagctgctgctgcctccaacactgaggtccactgaaatattcctgtcagtagacttcgagcaggcagttattataaaaacgcagtgaaatctggggcaaggggtggggggggggaatctcttgcattttatttaaatctcttgcactttatttaagcccacacaagtactcatttagttcttgtttattttgctctttaattcctggaattattcagtcagtggtgtttttggaagtctgtgttctccagagtctccccatccacatatttttgacatgcttgtatggaaattttttaaaaataaagaccacggtcaatagaattgtgcattttcctcacgagtcgttttgtaaatgaatgatcacgtgtgtgatttttcagatgtcacttgcacaacagcagactagaactttaaaactccttgatttcagtgaaatccaagctttgcctattcccgttcctcttccatccaggggttatttggctgaactgttttcctgtttaaacaacttgaacaccaaccaactagacaaacagcgctgcttgcaaaagagggcctacttcctccggcccccacccccatcccagcaaccccactccggccgcgcaccagcaggggaaatcgccaccaacgtccccgcttctcatttcagcccgaaattgccctgaaacggcgcccgtcgtgcgactccaagtccctcagttctccggccaactggcctaatttgggggttccctccccgcggagtggggtctgcggtgaggatgtggactccgaggaagacagagccctcccttattctcggccacctcccctccccgagggcaggcgggtgagaggtgacccggagccaggacccacgggggacgggcgtgcagggaagggcgggatggccggccgggtgttgcgtctgcgggccgccctcgggtgcgcggggacgaagagcgtgcgttgggaagggggcgaaggcggtcgcgcacggtcccggcgagggactacgtaagggcttacccgcgacggcagcagcggcgaggcccagcaacggcagcaggagcgcgggcagcgcggcccggagcatgacggcgggtgcgggtgggcggcagcggctgcgcggccggagaggagcggggcggggcgggagcgggggcggtgcttctcgcgtgcgagtttaatcccccccccgggcggaacgtgaacggcactgggggctcccaccaggagaacccgggtgtcccgtcccgcaggagcggctggcgcgcggccttctggaacttctaatttttgttttttaaacttttcatttgaattgaaataatttaggactttcgaaaatgttgcaaaaacagcacaagagatttccgtaacccttcagccagcttctctaaatattgacattgtatataacgccagtgcagtgatcaaacacagggcactcgcactgggataatgcgattagctaatctacagcacttaccacatttcattaattgcccctctaagggtccttttctgttccaagattcaatccaggatcatacattgcatgtcgtgtctccttagtctccctttaatctaggacggttctctgtcattctttttctttcacgatcaaaccacatttaaaaagtactggccagtcgttttgtagaatgtccctcagtttcattttgtctgacatttccttctaattggattcaggttgcgcttttttgggaaagagttccccagaagtgatgtacgtgctcgagaaggacaagatgtcgatgtctcatcactgatgttaacttggatcagttggttaaggtggcgtttgccagccttcttctttggatctactggccagaatcctccttttcaaagacccctttcagtggactatgt

SEQ ID NO: 38310 - DNA, 6902 bp, Homo sapiens
atggtttaggaaggtaaataatacaattaggaaagggaaaatgtgttccctgcttgggttgtgccgaaagctgagaaaaagcttaaaatgcaacgtaaagaaaaggcaggggggaatttgagacaatataaagtataataatgttatgaaagaatatctatccactctgtttgcaccttgggactgctggctaatttgtaccaaggggcaagacaccgggaagacatagccttgcttcctaaggagggtgcctggtgtcctcttttggaaagtaccacatccaccctgctgtggagggtggcggccctgcctgtcccatgagctgtcaatccatgagatgccagcatcctgtaaagtccccagatgaaaactgtgtctccttagccaagccaaatggattacttacctctgtttctatgtatgtagaatctgaaatgggaaatacaaatggaaaatcaggagtttggtaatgggaggtgaggctggcaggatgtatggagagagcacataaggttggagggaatgaggtgcttccagagtcaatgttaggaggactcggcagctacatagaggcagaagcccaaggcagaagaaagctacatggggtgggagatgagaggaccaatatgcaatcagcaaagaaaggccttcagccacacaaactgaagagtgctagagtcagatctacaaactcactctgccggggggaaggagcacggcccaggcctagagctgccgtggatcccaaatgcctgtccagtttggatctctgggaggcctggctcttagctttccccaggatcccgtctcttttaaagcaatgtgtattcttacagcaaattcccattacttgtgggtggttgagaggatcttacattctttaacatccaaaggttctgtcataccatccacattttcagacaggttggtcagattcattagatggaatcctaccatccggattgctcagaaccccagcctagggggctgtgactccatgtgggagtctgaacctcctcaaggggcctcagctaagcagcaagggggtggagagagcagctcagagctcagggacacagagcttctgcactccgcccctctgctggtcctgacttcggagacttagaaatgggctgtcctcagcggtgctctgacttcaggaagccagtgaaccggtgtctgagtcactgcagttagcttgagtctctcccagacccagccattcatccacatcaaataaagacagtccaggccccagctgggcctgccccggggcacctcacaacactcctgggagaggaaatcctgagtcaacctggctgggaaccaactggaaaccagggactttagtcatggctgtctgctcttgggcgggccttgctgtgctacctgcttcatctgaagtaccggtgacaagtcttccacctccaggtgtctttctgtgaaaacgtttcattgcgagtagctaaaagaaggcaaggtaaatggctgctttgtctctgggtctcactctgaggtagctccaaagccttgcacagtgggttgtttgcagaattctgtggctgacttgtggttgtacataacagggggagcaagcaacctggaagtagatacagttgttcctttttttgtgaccttcagaaagattcccttaaagaagactttcctgtcatccttgttcacaatgcccacaggatgctaagtgctaaagaaatgttttgtggcctaggccttacattctaggctggagtttccttttttgtttattttggtaaaatttacataacataaaatgtagcattttaaccatttttaagtatatgatttggtggcattaagagcattcacactgttgtgccatcctcaccactgaccatctccagaactttttcatcagcccaaactgaaactcttcacccattaaacaataactgtccatttcccctccaccaacccccagcacccagcattctactttctgtctccatgagtctgactactccaggtgcatcacataagtggaaacatatttgtccttttgtgggaatggcctatttcatgttagcataatgtctttagggttcatccatgtagtggtatgtgtcagcatttccttccttttaaaggctgaataatattccgctgtatggatataccacattttgatggcttaatcatctgtcaatggatgtgctgtttccagcttttggcccttgtgaagagtactgcgatgaacattggcatagggatatccatttgagtccggcacttactttttaaagccatcatgatgcccataatgggaggaagctgagtgtagtgggaagagtttggttttggacgtagggagtcctgggttcaaaattgcagtcctgccaggtcctcctgtctatctgtggggagagtgtttatctctgaacactttacttttgagactatgaaaaagggataatatccacctttcagtaatatggcgaagatttcattacaccattttgggatgagtccaggttttgtggggcctaaagattataccttttgggaggccttctttaagaaaagaaatgcaggccagatgtggtggctcacacctgtaatcccagcactttgggaggccaaggcaggtggatcatttgaggtcaggaattcgagactagcctggccaacatggtgaatccccatctctacaaaaaatacaaaaattagtcaggcatggtggcacgtgcctattgtcccagctacttgggaggctgaggcaggagaactactcgaacccaggagcagaggttgaagtgagccaagattgcaccactgcactccagcctgggcaacagagcgagatctctcaaaaaaaaaaaaaagaaatgcaaaactggaaataaatcatgtgtgaaagtgtatatttatttcaaatcaggggggaaaacccatgacaacagattactgaaagcttgaaaattccagtctctttgtttcttaacatcacctcaggcacttcaccagaaatgctttctaaaaaacgcttcccgatggtaatctggcttccatcccacctggagccacccgcagctcccagatactcccaggcacctgtgcacactggagcctaggttgaagctctctcagtttcctgtaaaccctcctttggtttcacttgggatgcatgtttattgttgctcattttagtgagaacttaccaagtgcccggcatcattcaatattgtattagggtagccctattttgttctcacaaggccccaataaaatggggactattctattttcatttaccagataaggaaactgaggcatggaaaagttacacaactttccctcactgctcagaaaacagggccctggagacagatcgctaccctcccacctgagttcagaatcaccctgcaaaccgcctcctggtagataagagatgtacaaagaatcatcaaaaagatgccaacaagaagtgaaattccacgaggaacttgaaaaatatgttcgcctgtctatctcagggctctggttccagctctagctctgtgtctagtgatttccttttgggtttgtttgttgcttatcctgtagatcattggctgccaaaaatgagacaaagatgtggtcctggattgtaccatctttctctgctttaaagtcagtacaaatcacttaaaaacaaaatgaaacaaaacatgttgcctggcccttcaggggaagctgagcctgctggtcaggagccagggcctggcattgagtccaggagagcacgactgtgggcatttcctgtggtcgggagatgactcaggatgaactccggcctctgagccacaggcagccccggcacttcacagttaccacccacaccccaccctactctggagcctggcagtcacactgccagctacagggagcctgtcctgtgagttaggcctgctccagaggcccatgcagtcagggttcagaaattatattgaagtctaaaagaattgaactctttctgtcttttagtttgtggaataaatccaaagacgagattttccagaaaaataccattggatgtgaatttattctgaattgactctgagaactagactcgttaggcccctttttcctatctgtgaaacaaatagcaagacgtcacatgaacaaacactgattgccgagtggttcactcattcacagcttgcagagctgctgagccttcttttttcatttactcatttattgcttcagcagccgcctgtggagaccccacaatggaccaggcactgttctgagagcacagtgttgattaaaaccgacagggtctctgcctcatggagcttacattccagtgggagagacagacaagaaacacacgaacaaataaagatgtcagatggtaacaaatgctgagaaaaataaaggatggcaaggggtcagagagtggccaaggtggggtggccagcaaagcctctctgctcaggtggtgtttaggcatagccttggggaaaggagggagggcatcgcagggctctctggaggacaagcagtcctgcctgtgggaagagcaagtgcaaggtcctggtacgggatggtttgtggacaagcaaggtggcgagcgaggctgaagcagagtgagtaggtgaactcaaggagtccagaggagatgagccagacaggcaaagggaagagggcagctcatgaaggaggggtgggttcgggggggcgatggtcagggctccagatttgtattctgagtgagaagggaagcttttatggagttttggttggacatgatgtagcttataaggtggcaagtatgcacagactataagacgataaggatggaagctggggggccttattgcaggctgtttcagcagagattatgacagcttggtctatggtgggagtaaaggaggaagtgagaagtgtttggattctggatatatttccaagatagacatgatttacaaacagattcctcatagggagggagagaaatcaagggatcaacgatgactctagcagttattgaggccctgaatcaataaccccaccatcaccaccagggttctccagctgtttcagagagagaataccatctgctcatcagcagagtcatcgggagctctaatctgctctaacaacttggagggtcatgaggagtcataactctgcaaaaagcattccatggtagaaccagaaaggtctgaactatgcaggccagtgctgtatggagactgtttgtatgctgtgttaacattccttcagtccagtggaggtctgattagccagcatcttctgttctggaattccccatgactttttggttgcaaaagaaaacctggaaaatccctgtggtcctctagttctctctagctgtgctgatagactaattggggttagtttcagtaacaaaagtctcccctaacagaataaaaaaatactcctcttaagaaggcagaagagatgggtatattttcttttaaaaactccttggaaagtggaaggacttcaaacttcttttgaccttaaagatgcaatttattcagctgcaacaatagggaaagttctaatcctttaaaaagctgggagaaatggtggccagtaattattatctttttattgttgtttttttagacaaggcctcactctatcactgggctagagtgcagtggcataatcctagcctcactacagccttaaactttggggctcaagcgatcctcccacctcagtctcctaagtagctgggcacatgccaccatgccaaactaattaaaaaaattttttataaagatggaggtcttactttgttgcccaggctggcctaaaactctagatctcaagtgatcctcttgcctcagccagtgatcatgtttgaggcacatccttgggtgggtccgtggaggatttattacttttaactgccattttatggaattttctgattgtttcagatgcatactcagtgaatcctgtcagtaagttttcagggaatcaaatagagtaaaggattgggtatgaggtgaacaccctaatcgttaaaaaggctaaacaataaattattctaacaagctaatcaaaatggcattaacctggtgatgtctcaagacttggaagtggagaaagaagaaaagcctttaaagcaaattcagctggcctctaattaaagacggtgtgtcagatttttacaccacaacagacgtaacgaatctatatattgttgggcataattacttccagacaaaaagcggctccggtgagcagtcaggtgtgaggcttgtttggggaagtatgaaaaccacctgcctgggctgcaatctctgttgcgtcctgactactctggctggaactttgctgctcctgagcccagggccctttcctggcaccccctagcggttgagggtgtaacaaccgaggcatgatgaagcgagaggctcacagtagtttcaacatttattaaaggaaggaaatgaatcattttctttatatcaaggagttcgatgttttaaagtttcaatcaaaacacaaataggaaagttttttgataaaagacaattgctgttagttgcaaatattgggggaggggcaaacattccctatgcgttgatgaaattaagttatcttggacaccaatagagtaaggctcagcagcatggaaaaggcagttgtcagccctggtctcagtccagaccttggtggattgattattggacatttgtggcatggtatagattggtcttgaaattgtttaggccctattaggcaaccaaagattaggaagacaggatttaaacgttaaccaacagaaggatttatttttatgaatgttgctggaggaggagcacagcttcctaaaatgtgatctgaagtgagctgttaatccttgccctgataatgaaatgctcctgcagtttatt

SEQ ID NO: 38311 - DNA, 1370 bp, Homo sapiens
cccaaaaaatctgggattatctcatctcaagatcctttacttaattacatctacaaagacgcttcttcaaataagattccatccacaggttctgggaaggtgaacctatattttggatgcagtcgtcattcaatccactacaggggctagaagtgctcaaagggttgttgtgaggataaaattaaatagaattacatgtggtacttgcaacagtaggcatgttttttaaaatgacagccatttttatgattactcttttctacaatatgagtcctcctgatgcaaaagtttccaaaatgcaataaattcgttcatccatgcccagtttatacgactattattcattttaataattgctttatattacagtttgtagtttctaagtttctaacacttggtcctgccaggaacttcacaaggctgtgtgaattcagcctcttttttcccttttcttggtggcctaggtagtggtgagctggggggcaccttcggtccacactttcagctaacaacacttgtcagaaacacacactgacatatgatcttctcatgaagccagggtcttgatgaatgaatcccttgtctgttgcggatgtgggtagacttgccacagaaaagcagctggacagcttcagctgttgctcagctctgtggtcaccctctgtggttgctgggtgctgcatgctccttttctgctccagatctttattgaagggacagaattccatcttggggctgagcatggacccccacccaccccacggtgcattactgctccatcccttgcctgggctgtgttctgcagtcacgcctggcagtacaggactctgagctggcttcagtgaattccttctgcatttgtcacagagtgtccaaatgttagagcaggaagggtgagccaagtccaacccactcattgtctctccattcccttcttcacaccgttgttgagtagatgcactgagcatccactttagtaaggcatgatgccaggagccacttatggtggccagcaagcaccatgggcaagcagtggggcaccccacacctcctgaggagctgtccgtgtggtttccagtgagtgttgatggtttatgtgttacctagaaaaaaacctttaatacacccattttaaagacctgggtttatctgctgatagaacttgaggagtctttgattttggaagggggaaaaaattgcatcttcatttgcagtaagcccagagtgaaattaaacattttcttccgttacaaatgtagacaacaaaccactgtaatattagcagtacttggaactctcaccaacaggaattacacatatttttcacatcactttacagttgttgcagatatctcaaaatgttgtcaacg

SEQ ID NO: 38312 - DNA, 12972 bp, Homo sapiens
gcctagttaacaactttctacccactcagtgattctttatgtttaattctttctgttgaaataacgcgctgtttctctctcctgctgcgaccctgactggtgctctgaggtaaatgttactttttcccttgtataaataatgtagccaatgcttagtattatgcccactgtcatactgctaataagtgattccagtcagaattcagatctttcttttaactccagagccctggtcgtaattgctcccatccctgcttcctttggggtctcacgatcttgctcactttttgtgtctggtgtctgccatcactgggcgaccgctctggagcaggccctgctctttcccccaccctctgagtgcagggtggaaggcccagggggtgcatgctatagatggcatcattgcagccctgtcggaatcagagagatggctggctgctgctggtgcccacatccatggtgtcatgagtttaggacttggcaccccaggacctcctttgcagcccttgactgagagctctctctgctcagcttcccctggcagctttggaagaaaagtggggcaccagcgtgtggacagcgagcagcccggggagggaaccaggctggctggagcggacaggcagtggggcctgctgggaactcctcggtgtttggcttctctgttcaggaaggaagcagacactttaaatcttagtcctctatggataaagccatcccagtttaatgtgtttttgcttagccccaagctggagtgttcctcttcgagccaaacaaacagaacaatgcaaacattccctcccctccgccaccaatttccaggcctgggagtctcctgctgatctgatgtggtggcctgtgctgtgggtgaggctgccctggtggaatgtgggtgaagggtgagcctcagcccggctccctcccaggattccaggcagcgtgacctaacccttccctgcacactcctcagcagagcctggtggaggaaaaagccaggctcagtcagcaccaggcctaacctggcctgccctcacctcatgatcctcctgcctactccccctggctctgggccagggatgatccagctgacacctggaaggtggttgagggtggcctgggaggcaggcaggaccctcatgacactcacagtgcccttgtgcctgacttcatagatttagagagagaggctggagaatcagttatctacaaacaactcagaattgtgagaagggccggattgttctccgtgctcctgatgttgaaaatctttataaattgaacaagtcaaagtgtactgactgcttacagtgtgccactggcaggaaggtaccagctcaattcagatgtcttgcatagcagggcacttggggaaacagaatttgtgttgtcgacattcgacattgtagatttgtccacttattacgatagtttcctaggagatgaaggtaaagtgtcttgaggaaggggtgcctttgcctaatttgcataaaggcaccaaaggggcactagtagtctactaggaccatcccccttcctcacccacatacccttgctgttgatttctgtgtatctgttggtatttgtacataatacatacataaaagttcttgtccccttctggagaggggaattggggaagaagctgccgaggagaaaagtagggaagatggaaaagctggcataccttccactctctagcctagtggtcatggggccgatggccaaagcagataaaaaactcttcattgagtctcagtagtgaactgcctcagggcccaggggcaggttgctggcaaaggggctcttctctcctctgcccagcatccagtacttttgtggcactggagaactgcaggccttggggacaggcaggaactgtacccttggcaggaaccctcactacctaaggatgggcaatggcttatgagtgagaaacacggagccgtgggaactcagaatgacatgctacctggagattgtggtaacgccctgtttttttgtgggcatatctacgagcctcaaggacattggagacagccacctagcaagagctgggggcctgtgggggaagctgggatcctgctgctttacattcagcaaatatttagagagtgttggggaaggtggagtttgctctgtcatctagtgtggtcagggtgggcctctcatagaaagtgactaacaaagtagcccaacatggggtaggcgtgcatttcaggaggaggaaccaggtggttgcacatcaggctgttctgtgtgtcaagaactgcaggccatccagtgatggtggggcagtgagtatgggacagggatgcagaggaggccagcgaaatagtaggaaaccagaaccttgaaggtcccagacagcactgaggttttcctcttgatgaaatgagagggttttgagcaagggagtaacgtggtttgatgcgtgcagataaaggcttttaaatcagcagccattgcaggtttgttcacggcagtcttttatggcggtgctattattatccccatcataaaagcaggaaagctttgtttaaaggatttaagaaatttaccgaaggttagccagagtggaatggaagttgggatttgaacccaacctggagccctgcttttaatcaccaatggatgctccctctccatggctgaaaaaactcgtcatgctgcaagaaccttttccttcaagcctagtactaggtgtgacaacaccctccatacctgccaagacctttctgatctcccagggattgacttcactctgcaatcatctttcttagtgattggagcacccaactgctggtgatctctcaggcatgcaaatgactttggcttaaggatcttatctcaatctatagggagatcctcctgggattcagagacctagtcccatcgaggcctatacatctatttaattaaaaacaagttcaaatcttgaggtttgggaaattgcctgcctagtaatgcaaatctataaattctacttcctgctgcttccaggctgactgtaaataccctgaaaaatcagcctcactcgaaatgttttggccattccacttctggctcaataggtagtaataagtaaaaatgaaagtggtgagagaaaaactagatgaaattaaaactagcccttcacagggctcagctcagggatggtggttaaggacttctggcttgttcctgtcatgtctgacgtggctctttaattcctaaacccgagtcctcagggtctgtacagccacctcttctttccctgatgactcaccttcagctctgaagttagaagagacagatgagtcatcatcatttcagaagcaacaactgatgcaaagaatctcagttttgctattaaactagggcggttattacatattctcaaccaaaagcaagcactaagccctggcaggggctatccatggagtactcacaggacaagggtgcaggatatttgagatttgtggtgttctaggaaatccagttgcataggagccacatattctgtgaatttgaagtcagggtcttgggcagcctgaattctctaaaaggtctcgctaccacttaaggactgatacatttcctgaaagatacattgccttcctggtaatagccgctgtagtgatacaatagtaacaattacagtacaccccaaggtactacaatccccaaaccatctgagtttgcctgacagtccctggtattcatttgatgaagtcaagctttgagataagcacactttccagagctggtagtgatactgcctggattctacttggactagtgtgcccagctagtctgttgagcagtcccagggaaggctgtctgtggaaaggtaaacgagatgcagatgtgagcccctcatttcattgcagcatacatctgccaacccagtgaacactgtcatcatcttttatcacaaagacccaccctcccactcacctcttccaacactaacctagggctctcttttagacctattcagagattcctgggctactccacgatggctaatagcccattgcttgctctcaagttagcttttaagtcttcatcctgcccactgatgaacttttattccaattgcttagcagtggcattctcagggctcaatggtcatagactcatgctttctgccattctggtgacacagcacacaaacacacatgtgcacacaccccacaaaccatacatacacatcacacacagaggtttccaataaaccaaatgtgtgaatcttttccagagtgagggcaactagaccataccaaaagatagaattgtttcattatcttcttattttacttggattcaactcttatttcagtagaattgttttatttttccagggagggttactgtgaaaggaacttgattctctctgtgtcattagaaatgtatctctttcacaccaagctccatggttttgcctctagaaatgagctcccgagtcagaaagaaagctcatttctttttggaatttgattctttcaggcagcagatgctgagtgcctactgtgtgcaagatcccagctaggttgttcaggatataagaatagatagactaaactctctgccttctgataaacaaaacttaaatgtccttgctggcaacatgaaagacaagttacatatgtctatatttaactcctaaatagataactttgtggatccaatctcagtgaaatcctttgccatagatcttttgacaatttggggctcatttctgtgggaatttacagtgtcattgcaatgaaggaaactcttttccatattttgtaaacttttgcagagtgctgccctagggcagaagtgattacagcgagctcctattaattaattatgcctatctgagtgcagacgcagagcagccagtgggcttggagctgcgtctggcagcctgtggagggctgggtgccacaacagggctattgttctgctcaccattgcctttggctccctcttggcattggttcctaattgcctcccaactgggtaggtctgaacctgttttctgagcctccttggcaggtatgtaaccaaatgtccccaggcctcaccagcctgcgggagccaattagatgccactttcactgagagttagctagctacttgctccacctgtgtgactcctgaccttcacacctcccctttctcaaagtttgtctgcttcttttgggggagtccacagaatgtatcaagtaggcagagaataagtttgcagctcttggatgttcgtggcttgtcaaccatttgaaactgcccctctttcggtatcctgtgtctcaattcccctgctcagggccaagtctctggctcagcccacctggcacaggtggctgagctgctggctggggcacccatgagctttcaggtgcccaagctatgcagaactccctggggacctcagggatgttgttcagtgggctgcgactatggcacagctcaaaagagagcactgcaacatctctcatgaaactctttcctgtgaggcttctttcattcagggcttgtcttccagggtcacgaagctagcccttggcctctgccccacctgcaaagcgccacagagctgtgttccctgcattccttcttgtgctgtggtcctgccgcattcctcgcagaactggggaaaagaccctcaccctaccctgtgaaatttccttatagtttgagtctcaaagctgctctgcttgcacctgaggatctaaaattttctgtgctgacagctcctcagtttctggctctggctttgccctccttaggggctcacaccctactgggcctccctccttcgtcctgcaactcccccaattctcccttagtgcccatctactgttcattaaactcctccttgctgctccagctaaaaatcaagaggatgcagatcaactgtgcaaataaatacttggagactatggatgggtttggtttcaactggccctgttgcaagaaaagcactgagcttctaacatgcatattcctttttctggctttagatggaaaacagcttacagtttcttgacagcaaggtccttaattcctttccttaatttccccaccctgtttcctaaaaggataaaatgagataatgcggtgaaagttatacctaaattgcaaatggccatgtcagtgtagtataaggttaaaaccttgcatgcgtcaatgctcagtaggtaccaatactgaatgactagtggccatgacatttattatttttctagtaatccatttaaaatatttattaaacatctattatgtgacagtttctattctagacatgggagatatagggatgaaaaagaaagagatcctaatggggaaagatgaatgctaaataaactagttaaaaacaataaataagaaaatatcagactgtgactaatgctcttcagagaattgacttagagtaatgtgatggagggtgactacgtggttctgttagagcaggaaaccaggtcaggcctccccgaggcagtgacaagtcgagatcagattgcaggagaagtcatccaagcaaaggtcagaggaaagaggactccaggcagaatagcagcttgggcaaggagcaggggtgagcttggtgagctctgatgatggagtccaggaaaaggggaggctttttctgctttttacataatgggaagcaattagaatttgaaacaggggagtaacataatctggtttatgttcaaaaaagagaacttaggctgctgtgggaggaaggggttgaagtggctcaagagaggcagcaggaagaccaggcaggagtctgatctggcaggatggtgatggggccagggtgaccagatccaacttggagagcatagacagatttggggtctttggaggtagagctgactggactcgttgattgattggatgtagagatcgaggaaagaggaggctccaagcttcctgggcgacaactatggaaaccagaagcctcttaccagattgggatgcaggtggcctgcatcagggtggtgaccaaagtgttaggagagtggcttatcctacaggagggggaaggggcactggcacctctctttttctctctgacatgtgtgggtactgcaggaagattggagagaatctgctagagcaatcagttggtttcggatacttaaaaagcagcttttgaaagcaaaccatagccaattccacaggctagaagtcaaataactttaaaatagcccaaggcaggtatagtgaattaaagtggctaaaagttctgtttactgtctgaaatatccatggcagcggtacagagagttcaggagctgggttgggcttggggatttctgataacagtcttcacactggaatttaatttgttttacttaaaggtaagcctgagcactattttcatgaaaactgcctgctcaatctattctttaaggacctgaaaacccagaccccaaaggaatgttctgctttgccaacattcactgtcccggtgtttgctgacttcacaaacagaacttgatgaaaatatgaaaagacctgagaaagggtgaatgtatgagaggaagatcctctgggagcccaaggaatttacagatccctgaattttatcactgtagttacttttaaattaaagacaataactgttccttccaggttctcgttgacaaataagaatgccgatgtcactcaagcatatgatatgataatctttcccagaactgggagtattcagaactaaccagacatgggaactgtgttttttcaatgtctgagactttctcctaattccatcttagtcacacgtagttactcattaccttgaagggcattaagagtttatccatggctgctgtacattttgtgctgctttgctaaatcaggaaaaaatgcagacagctgagtcatagttttcaattagtttttcaatttcaccaggaacaaagtttttcaatatctttatcaattttgttgcttttcatattactctgattacatactttgcaggataatccagccttttcctgaagtatattaataatgcataatataaatggggagctgcattatcaaagtactcttaaacagaggtgaaaacttgaaatccagcaagatttagtgattcacattcatggtctatagagatgtgacagaggaaaggagaataagacaattaagaaccttgaaatcatgacagggatttattacccaagaagaactactctatatgactttgaaaatctgaaatttatttaattcaacagatattacacacccattttatatccagtcctactatatggaataagtattcatacattttatcaataaaatattttaagtactgctgacatgtaaaacactgtggatataagggcctcatcttcaaggaacctttatctagttgggtagacaacacagatgaactagttcaatggcagcacaaagtgaaatgtgagatgatttcaaatgagaggtatggccaatatgtgcttgaaggtcaaagactgttttctgcctgaaatagtcaggtctctgacctcagctaaatggtccttgaaggacaggcaagatttgggtgggagagactaagggacaagtttcttcaggcaggaggaatagcacacacaaaggtaccacctgggaaggattcaagcgtgcacatagcaaaagggacccacttggtgggatggttttgtggggacattgttaaaaaaaaagtagactaacacaaatagtgtcatttgctgggacagaaataacatcctttctgagacaataatggcttggctggcactgtgtgtatatgcaattgtggaggagcttagtcacaaataatctttcttatctatttgcatgagtcaggctggagctagaaaaattgatgaaaaatcaactcattaaagaagcagtaactcactcttcaggaagtaggaagaggaattaagatggacatacagattgtagttatttgagcaaaggagaggcaaagtcaccaaatggtaatgtatttacctgccagtcctatatattaatttcctccactgaagaggtttgatttcagagggattaactcttctttggggggattaaaaaataatctcaataatcaagagatttattcagctcagtggttcaatgggtttaaatccagaatgagaaccctagagattgtccaattcttaatttacctgggctgttaatttgccacatgtgtgatcctagatataattataaagccccagtttcttttttctttttcactttttttttttttaattttgcgatgcagtcttgctcggttgctcaggctggagtacagtggtgtgatctcggctcactgtaacctcatcctgagtagctgggattataggctcacgccaccatgcctagctaatttttttgtatttttttagtagagacagggttttaccatgttggccaggctggtctccaactcctgacctcaaatgacctgcctgcctcggcctcctaaagtgctgggattacaggtgtgagccactgctcctggctcccagtttcttcatctttaaaacatttacccaaatgtctcagaaaatgaagtgtaagatttatattctctctctttttctccatctctctctaactagggtggtgccatgaatatcaaataccctattttcaaagctgtgattggctctgccactcactacctgttgactttgtacaagatgctgaatttctagaaggctgtttcttcttctttaaagcctggataatagtatgatttgataaaggtattataaagatgaagacagataacatgtgcaaagtgcctagcacagaacttggcaattcaataaaataaagctatttttccttttgttaaacttgtatagttatttacagtttataaagcattttcatgaacttcatgataacctcttaaggtagatgcaattatcaccagttttggagataagaaaactgaggctaagaaataccacagccatgctacagcagcagacagagtcgtgcagtctatcaggcctatttcaatggcatttaccctctgctctagctgtcttttgtggtgggacatgcaaactaaaatgaaataaattgtatatttattacatacaattcatagtgagcattcaataaatgtggttcgcttccgaatctcataaggtagctagtgagggctctaggcaaaactagtaagctggtcaataatttcttaattttctacctccgtgtgtctgatatggtagcaactaccaacatgtggctatgagcacctgaaatgtggctagtccaaatggagatgtgctgcaagtataaaatactcattgaactttagagatttcatgtaaaaatatgtaaaatacctcactgataattttgaaaatcaattacataatgaaatgacaatattttggtatgttcagttaaatatttcacctgtttctttttacttcctcataatgtggctactagaaaatgttgaattgcatatgtagctcacatttgtggcttgtattatatttctattggacagagctactttatgtaaccctttgcccttctaaaggtgttccctggtctcttggccctcctccttcctcaccaggactccaagatcctcctatctgacgaatagtgttctgctcacctacttcatgccaagatgttaatttctctttctgcagacagtctgcttttagaagaggtactgaaagtggaggttaatacacctgggtgtggaagagatattaaagcaaggatcagaatttcaaaagtctacaggagtcaggatactgtaaagtagactaggtgcagcctgcaatagggagtggtgcagactgtggcaaactgaagaacacatgcctcattcaaagggaacagccaccaccaaactctagctaactgttgccatatcagaatttgggcccaatgtggccaatcttttgatttttttacgggcagccagaaatctagtttcttatgtgatgtcttctgattttcaaagatttgtgatgaaatactttcaacaagcattgtaaagggcctatcaaatctgcccagcggttccatttggcccacttggcctcagcttcctaccaaggctcacctggtgagatgtgtggtaatctggacaggtagtgcttaagacattggctttggctcttgacatttgtagagctggaagagtcctgctttgttatagacaagatactaaggcccagagcagacaaatggctcactctcaatcacactatcactcccttaggccaagaatgccagactcggctgggcgcggtgattcatgcctgtaatctcagcactttgggaggccgaagtgggcggatcacgaggttaggagttcaagaccagcctggccaacacagtgaaatcccatctctactaaaaatacaaaaattagctgggcatgggggcccgcgcctgtaatcctggctactcaggaagctgaggcaggagagtcacttgaacctggtggtggaggttgcagtgagccaagattgcaccatcgcactccagcccgagcagcagagcaagactccgtctcaaaaaaaaaaagaatgccagactcctactttctgtgacttcaaagtcactgagtcctcagtctttaaaacaacagtcagtaggcagctattgatttggcaaaagaaaaacaacaacaacaacagtcaatgtcttctgtctgtcccgaggtttgcctctgagaaaggcccttggtgagctggaacactctgccaggtgggtaagtcttagagcaaaagatgctgtgtccacactggtctctggctggctaggggaatggtacaaatggctaatgttcttcatgaatttctctcatacatcatataacttattctataaggacatatactaatcatttacagagtgagctgaaatccctatataacccaggtggagaaaatcaccacactggtgaatactcttgttatttatgagcaggtgtaccttctagacacccgagttaggcccagagggagaaagtttccttaatctgcagttgacataagatttctgtctgtgtcatgctctcaatgtgtctgtcctcttcccaattctaaagtgcagatggcctaacccagacagcagaaaaaaaaatgcaggtatgaaatttagcattctctcaacacggcatttgttcattctagcctctccttttgcaaatacatctttagagctcttaagaattaaactacttacttatgttattgataatggttccaaaacaaatatcagactttaagtgatttcaacccttcctgcacaaactctgggactttcctaggtgatgtaagagtactgagctttctaggttatgggagcattgcagagataggcagagttaattttttgataatttgtaatatcatggcttctggggtttttaagtcttagaggcaatttcttttctatgaagtgtcttcaaaagttcacaaaaattgcgtattatgaaaaaaaactgcatgcatttcaatttttttgcaccaaaataagctcatattaacttgttacaatatacctgaagatgatctagtttaagggactaggaaggataagacatatgctgggcaaggtgattcacacctgtaatcccagaactttgggaggctgaggtgagtggctcacttgagctcaggagttcaagaccagcctgggcaacattgtgaaaccttatctctacaaaaaatacaaaaattagctgggcatggtggtgtgcgcctctagttccaggtactcgggagactgaggtgggaggatcactgagcctggaaggcagaggttgtcagccaacatcacatcactgcattccagcctgggtgacagagcaagggtctgtcaaaaaaaaagaagaaggataagacataaattcaaagagagcacatatcagagcatcaagaattctgctaaaattgaagcaagaacgaacatgaaatttatggcgaagtttgagtggaagaatggtga

SEQ ID NO: 38313 - DNA, 1669 bp, Homo sapiens
tgcagatgggagtcaagtgtcttgaaggaaggtgactttttttccattcacaaatgatgctatatgggcttaccaagttcttcccaaaccttgagctgctcacacaggcagtggcacccaatttgaaccttgcattctcttcatgctacttcccctttgggtgagaaggaaagggatggtcatgttcttgcacaggaagaaagcgatggtgacagccttcctagggccagtggggcctataccacctagcttataagaaaggctaactaacaaacctctaccttctctttgaatcatctggttagtcttgttttcacactgtttttctcttatttcttttcaactgagacttacaaacatcaggacaacattttccctttaaaagccaatttaaaaggtgccatggttagagtaaaggctggagagtaaaggctccttcttgctcccccaccagccactcttccaggttaaaatgcttaaggtgtgatgactggcccaaggccaggcctttcctgaagctttcagactgatgagaaccctcttggacttcctggaaaggaagtaaggtcatggtgagttcattccatcacattaggaaggggaattattgggtacttgcggggaagaaagctttctcaagcataaggttgcctagagtgagaaaaaccatcctgatcgtttctctccctccatgctttgtttctttttggcaccatgaagcctgggtgccctggatgcctgggcaaatgtgttttattcctcttggctccatgcccatccaagctgtccctgccccaggccaaggcagctggaggtgactcattgtctgagtctagttcctgtagattctgggctgatttcgtttctttaggaaacttccagcactgccctagacttgccttaaatcaaaccactctttgagatcagggactgctgctttctaccattactcctaacacttagcacaatgtggggcatgtggtaggcactcagaaaatctgttgaatcaatagaattaatggtgtattttacatggatttgtgtctgtcatgtcaggtttctccagacgaacagaatcaataagattagatagatacataaagatagagatagagagatatttactctaagggattggcttacacgattatgggggctagcaaatccaaaatctgcagggtgggctggcagcctggaaactcagggagaattggctactacagtagagtcagaattctttcttctctgggaaacctcactttttgcttttaaggccttcaattgattgaactgttgaatatagcccacttgttatcaagagtaatttcctttacttaaagtcaactaattgtaaataataatgacatctacaaagtaccttcacagaaatacctagattagtgtttgattaaataacagggtactagaacctggctaaatcgacacgtaaaactaacatcacatcgttcgtcaaatgatgttcatggaaacagccaccactaccatcacaaccatagcaaaacaacaacaacaaaaaaaccaccaccaaacaaataatgaaagtccagaaaaacagctaacttaacatctgtaccccagttccagctaggtgctgccagcaccaagatatttaaaacacattcactgtcctcaaggagataactcttta

SEQ ID NO: 38314 - DNA, 3158 bp, Homo sapiens
tgtatgtatgggtgagctttgtgttattaaacaaaataatcattttaatattacaatttgacatatctatcaacctcctatggggctccccaaagaggtaggatatttcaaaggagagaagcagtcagggcatagagtagataatggttcagaatggctaagtacaaagctgaatgccagtagtgtgaaggacagtcaagggccttcttttgggaactccaacctaaaatagcagtctgggctggcctgcctggattggcaggcccatgcactgtggccaggttggggtgccatgcctgtgagcaggctggctggatccccagatgaccttggcctgtagttagctcttataactacatcttgggtgtggctgatttccaaagtagcagcaatggcagctgacagctttggaagtgtttattttctgtaaagaaaaaatgcccataagaaatacacctcccaagtggttgttcctcctggtttgattaagagcttctgtggctgagaatatgcctatggtttttgtaaagccattaaaaaattaatcgcttttttcttaagtcaaaatgccttgaatctcttaggtaatttagaagaatcagtgtaagttctaaccctgggaaatatgtcaaagaaatgcctgcttgcacgctttagttcatgagagtatcttttccccttctgcatatcacaataaaagtaaattccaatacaaggattcaaaggcagagaaggaacctaaccctaacaatcagattagaaataaatgccctctttgaggatctgaagttggaatacaagattccactaagtttgaggctctctgattaaaaattcttgctgtcacctacagctcacaaggccaaaacatctggtgctaaatttgctttagtgtatggtaaatggggaaaacattgagagattgcagaaataggattttgtttgtaaattgaactttagctattgtacttcatccagggaacactagagggagtatgtcagatagaggaaaaagattacaatgggaataaatggggaatgaagaaaggagaactctaaagaggaaggcgtttttgcatatcactaaggcacaaaattttcctcaggcagataccaatatttgtattatgaccaagtgactttatattcaaaaccctgtattaaaaaactttatgatcttctgagcctgttcagaatctaaaataggagaggaaaactattactctctgaccagaatctgtattctgtccatttcaggcattttatgagccaatacaatacagctctacctgtgattttttaattttagagggtacattatttggatgaataatctttcacagatattggattttttttttctttacagtactagtggtcatacttccaaaagttctcatggtgaatagtaatgataccaggcattttcagacacttgtaagaataaaatatgctcttcatagataacctgaattggaagcccttttctctccattttctccataattctcaggtattagttctacactaaaacaccattttacaatccagagatactgaagttaactggcccaatgtcatgcatatgtcaaagcaaatacgaactgatatttatttccctgttttaaatttccagttcctcatttcctttgtgcctcttgaagatgccaaaaaagttagtgaagactagagtctcatcactgatttttttaaaaaaaactttaacaattaattagtacaatcagaaacaaatatcttaaaatcttaacaagagactgttcaactggttattaaaatattttactgaataaactaaggcttttatgaaatactgtctttaaaccatagcagatttttaaaatgcagctgttaaaagcatatgtgaatccaaatataagaaaaatcacaataaagcatgctaagttaataaggatctgctcttttacaaaccttggggtaggctcacctggacattaatgtcaagagagtagaaatgacattacaaactccctaaggcagcgtctgttggaaacgatcggtgatactgacaagaaacactcagctctgaaatttgggtttgcatttgttagccatgcattatcctacttacctctcagggtagaacctttaatttcagaaagtgctggcatgcattactgcacccgttatcaaaagtctttggcagaaacgccatttatccttgttgtggtaatgaacagatttaaaacattctggtgtcaccatccctgaaaaagcacattcatttgaatatttcttccaccagcataatgaaatatttcatgaaggcacatgggtgtagaatactatggagagatattgctggtgaatgacagaacgtctggttgatttacatgaaaccccaagtgctcatatgagaataggttaggtttagattgacgagcaaatgtgtaaccagacttctggctgacaaatggcagaactatgccagtatattagcttctctggagagagaccaaaagtgaaacgggaggatcaagttcactccataaaggacattcaaacctagtggatggcagtgtggctgggatattaagcacttatagatattaataccccaaaatagtattgagtttacagttgagctggccaactgtaagccaatggtcaaactcttataaagcattgccatatgctgtgcgtgtatattgacattccttcaggagtatcctggtgttttcaagataagtctattttattggcagctttggtcactaactctaaaaatggattgtttgggtaaactagaaactgaaaataacaactgaagagattagtgtaaaacatggtgccaagcatttaatggtccagattgaattagatttattttggcgcagcacagccgtgaacagaaacatccacacaggctttgtagagaaggatgaagaatttggacccttactctcttttccagactaagactgaaagttcaggacttcggatatgcattcaaggaagtaatatgatagtaataataaatacttctcaagttcccatggtgagccaggccccctgcttggcacttagtgtacattatttcatttgattcttaccaccacactgcgggtgggattcacaatgtttgctttataaatgaccctgaggttcatagacgttgg

SEQ ID NO: 38315 - DNA, 3718 bp, Homo sapiens
ctaggaggccaggaacaatatttatggtcttgaacatgtgtcaaagacatgagttacaaagtggataaaatgggattcctgcctaggcttccctgaagaaaataacaaatagttctcaagatatatgaagggcatgggaaaactatacaggtgtttgcaaatccataatctgatgtgtggagaacatgtgaccaagggtaaaagaaatcaaaatgacattacttggaaagtatcccacaccctacttgatttttttttttttaaaggacagttctttcttcttacacattccagtattttcagaacagaagtgacagcaatgtcaactctttggacatctgctccaagtctcattctggcaagggcagagctatcaaagactttgtctgtctgcctgacaatttcatctctcagaaggtagaggaacccgtgaggaaaatggctgctctcaagtgaattctgatcagtaaaaaaggaactggttggaaatgtggaaatactgagaatctcaggagagatgttttcattatcttcgccccctcacagaactcccaaagctctttatttagatcttttcttacttctccttataatattgtcacttatagacttgtgtctctaagattgtcccttgaggactgggaccacatcacatcatctttgtgtctgccaatgcttggggtagttatcttttaaacacaaaaaaatcaatcaaatgtgcttagttggaatatgagcatagtgacttgcataatttcaggataatgtgacaacattctttaagaattttttttcttgatcataaaatgttttcattgttgaaaactggaaaaattattcagggaagtataaatgagaaaatacaaactttctataatcctcccacttgataagcattttgaagtactttctccttgttatttatttttaagacagtgtatctctctgtcacacaggctacagtgtagtggcgtgaacataacagccactgcaacctcaaactcctgggctcaagcaatcctgtctgagcctcccaagtggctaggactacaagtgtgtgccatcatgccaggctaatttttaaaattttcttgtagagatgactcttgctatattgcccaggctggtctcaaactcgtggcctcaatcaatcccctggccttggttcccagtgttgagattacaggcataagccactgtgcccagcctctccttgggttttatacttatttcatagttttgatcatactgtatctacaggtctgttcctaacactttttattcacgttatatcctaagcattttccatgtcattaaaatgtcctcattttaaaatgacttcatattatcttgcatgtctttagcgtaactactgtcatttaaaaaataaagcaacatagggattttcactggctacaagttctaagaattgtggtatgtctgagaagtcaaaaaggaaccggcagggcaggggagacaggtgaagtcccaagttcttcctccggttttgggttttatcctgagtcaactgtggtacatctggaaggtgagttgatgatgtggagtgaccagggctgacgaggaagagttaaagctggaaggaatgctcaacccagagaagagcagagccatggagtcacgtttccacacttgaagtatgactgactgactctgtggcatcccggttggcagcactaaggccggtaagtgggaatttcaaagccacaatttggactcctctgcaaacaagtttgagagctgttccctaaagctacctgatgccctgtgaggcaggcagtgcctggtccctggaggtgttcaagtagggcaggtggcttcaaggatactagaggataggaaatccctgcagtctggtttatggtctgggtcctgtgtgagcactggaatagcctacatcaaatcttaagtctctcagagtcgcataaaacaaccgaattctttaattcaaagccacgttttcaattctgagcagcccagagacctgccatcgctttctcgcgccgagtcacgtggtctggcaaggcgcgcggtttcctccctagccgcccccagctgccctgaaccttcaaagtcacatttcagtcactccccagtctgaccaacaacgctcacaatgagggcgctgccagcacaggcgacggcctgcgctccagtcttacgaggaaccccaaattcaagacccctgtgacccaggcctgtgtgccccgacaggctaaacctccgcccaggggcttcccgatgtcggctgcagcgggtctgggttttcggcctgcagagctcgcgtctgacggctgaggaacaaaacaccctccctctagcggctcaagcgcacacaccctcttgccttccgcagccaccgagcgagtcacgggagacactctggagccattttgcggggctggaattccttcgcccggcggagctcggcgcgcacccgtcagctgtgccgaggaccctgcgcccggggggccccgcggccacgtgacccccatctggctctcggcctggactgagggggctgagctcatcgcgttgctattcgaggggcagagactgcctggccttcctcaaatcctgagctcccggctctcctccctcccccacctacttgacatctcaggctttttgtggaaggggcagggcgattgagaggtcggtgacctttgtcccaatggcgctggctcttttcctttttggctaccctaatggaatgaggatataatcagtcatatcttaacattcattgagccccggctcaggctgggaggcactgcctttctcctagtgaattttaaatcagtatttgtgggatttaagctccagcggataaacctagagccactggccatgaagggtgtggcagtggggtgaaaaacgggactcccgcctccactccctggctttcctcattccagccactatagaggggaaaatacgtagaccacagagcaacggccacaccctctttcctctcctccaaccccagaattccacttcagtctcagagctttcagctaggtggggtttatccccaaacatgccacaacccctctagttatatgggagcggtaactgtgaaccaccatcgctggcttgatcctcccttttccgtggattggtgctcctgagtatgtttaccggtttcagtacataacacagccagatagagggccgcggacttcagcggcgagaagctacaacaaaaatagggtgaacaaaaacgaaggtgcccaggagcctgaattgcatttctttcttacctttggtcatagaaaggagcacttaggtgtttggctggaacgcaaagtgagaccagagcttacattcttagcagcctgggtttgtctcgagaggccatgcttctctcctccctgacattttgctctcagaagcaccagttagcatcagaggaatgttgtttccttctctgaaacagccatcaagtaccagcgatttcttggctccggcaagttaagtgctctgacccctcccttatctaactcaccccgcacaccatccacatggcaggggacgcagccagaaatggagcggactgcatcttttccttgcccactctttttatcaccatgacagagccactggacaccaggaaataaatactgaaccaccacactaaaacgtttactccactttgggcagaaggagcctattttgcatattaagtgcctcctataaa

SEQ ID NO: 38316 - DNA, 1705 bp, Homo sapiens
ccaaagaccagaaggcagaaaacatttcttttcgacactgccaaaatacttgcaaatacacttacgctaggacatacacacaaaaaagaatgactctgacgacaacaagacctaaacataatcaataatcctgtaaatacctaaagggaagccaccaagcatcactgccatcggtcgtgatcttaagagagccacggtctgcatggaaggctacagttcgcttgcatcctttttgggataataacttaattgatttgtctcagtggctaaggatgcagacaagagatttattatggaggaaaaatatctgcaatcctgtttttgttttctcaacaagcatcttgccactgacctctaaatcaatttaaccttttctaaacagacttgcacattttttagataatttaaagctacgttttgttattgctgctgctgaaaggctctgtgagatgtatcacaacatggcttcagtaaccttcttttaaaaacaaagatgaaaaacaaaaggcctcaactataagctcccagctccattccttttcccagcaggggattgtgatctaaccactgaagtggctttcgagttcaatctgttaaaaaatgtatgaaacggtattaaaataggaaagagcatgtgtatgactcaggcatatccaagtatcttctgcaactaggatgtcacaggatttccctgtgctactgaaaaccttgagaaagtgacagtagaagttcctgtttctttctctttttttttctttaaatgaggggggcgcgcgcgaacacacagacacacacagagacacagacacacacacacagacacacgtcttccgggtttcctacgaatcagacaggttctctgaggttcctagcgaagactgcacaccagcgtgacgacttattaccgcactccgctacacacaaaggttttgggaaaaacccaaacttgttgcagagctgggtgaagcccccggcccggcgcgcttctgccctcgccggctctccgctcctgcccctgccccttcctccacttcccaccctgcccggcccgggcggcggcggcgagggcatctcccctgctcaggtcgccggccgagcagtccccgcggccgccttcctgggaaacaaggtcaccgcccagccggtccctccgaggaggcgcggagcccctgagcgcggccccctttgtaacgcggggctcgccgacctcggcgcggcatcccggccgccgcctcacctgcttgcgatagggcgtccggcagttgctgctgcccccggggttgccactgctgctggggaagatcatcgctgcgggcggcggcggcgggtgcgggcgcgggcgcgggcgcggggcagcctcgccgcgagggggagggcgcaaggaggtggccggccgggcccggggccgcggcagctctgggaactccctctcgccgcgcggcggcggccggcgggggctgcagctccgcgctgacttcccctccgccttcgacctccgcactcgcctaaaagtacggcgcggcagcgggcgagactcgagcagctcgggcagccgccgccctgcgtgccatggacgggagttcgcgcgcggagctggcggcgtcgccgactctcccggcggcagcggaggagcagcgccgccgcgtccccacctaccgcggcctcaaccaccgccctgagagcgcgccggccgggggcggggagg

SEQ ID NO: 38317 - DNA, 640 bp, Homo sapiens
ttaatgggggcattggcaatgcttaactcaaataaatgacattttgacaataaactattagaactgtgtgaaaaccgatttaactccttgcagcaataatagcttggcaactgtgtaagaactcagattaggaactgcaaatcaattgtccaaaagaagtcttttcttaaatccagatataaggtataaggaatgtaagatgtttgggcggggaaaagggagtaaaggtcacgcaggccacctggtggcaatgtgtcagagaaggagccagagctttgggaaaagtgaggctcactgccaacactgcaggaaatctttgtgacacactggtgtgtcatgaaacaatgattgggtatcactaataacaagcatttcacttaatggtttggaattcggatatactacatagcctgcccaactacccagaacagagcagaattagatctgggaaatcaccctagttgcccaatcctcagggaattctcatcctgttggatccagcaagctgagttacgagctactcttctcttctgaggttcctggcttctagctaactggtcacatctccgggatgagcacctactctcactggttttgatacgaatattaaaaaaaaaaaaaatctttagactgagtgagg

SEQ ID NO: 38318 - DNA, 2146 bp, Homo sapiens
acacacattctaagaaagaaaaggctgaatcagagattctttgtaccaggccggaaatgcccaactaccagcaagcagagcatgattacaacctcccaaagaaagttcggacactgcatccatacctgattcttttgtgatctagaagggcacccagagttgtgatagatgttaatggctgaagaaggctgctgcgtccaacttccaccctcccaaattctggcggctgcttccaaagcagtgaaatttccagtcttcatggcccaaataatttttttaaatgagttcgggaggcatcaaattcttattgtaaaaataagataggcccactaacaaagtacccagggtccctagaaagccaggcgcaatttgtatggctacatgtcatcaactgttgttacccaagagtgtgccgaggtcactttttaaaaagcaacattggaaatcgatctgtggcaaacatataagctagttttgtttttgtttcttttttaaccaaatacgaagtcacttctttctctgcactgaaatctgcccattgtccctcctttgcaaaacctctagagattagaagggacatcaatgaacgcgagtgaactttggccacttttctacccaaaacaccagcgtaaaagtagaaatcagtaaccaggtgaagtgccacaccgcacaaagatcagaggcgaggggcgggcgctcagggccggaggcggggaggaaaatatcccggccccgccgcccctccagccccagtcatcgcgtgcgcgggaggtggaggggcgtccctggggggcgggaggctccgcgccacggcgaggggagcgaagagttacagcttacagggcgaggcccttggagaaggggtcgaaaagccgggccaccagcggatccagacgcgcacaccaggcgacggccgccggccagccagggctcggcgaggggcgccgctcgaccccacgaccctccccgctggccgggccaggaaggggctggtggctctttcctgtctagtctctccccccgcggctttctgtaacccgatccccgcactccgctcccagggaagccgccgccccgcgcgccgcccggctctgcccaggccagcgctatagttagcaaccttccagcaactccgcccggcggtggcgggggttcgccgcgcgcccccctccccaggcctgaccctgcgcgcgtccccgggccccctcctccggccgtcacctctccccggcgcccctttaccttggcttgcagatactgggggtaatagtaggtggcgtactgagggtacatctgctgtttccacactttgcccatgaagctggaagggagcctgccgtgcagggtcgcggacactttggggtttccaagtctcgggctctcctgcctctccctttccggcggcggcggcagcggcggcggcggcggcggctgctgctgctgccgctgctccacctcccagccgggaccagacgtcctcctcctcctcctcctcttcctcctcctcctcctcctcctcctcctcttcctcctcctcctcctcctcccaggcagaaagaaagacactgcagagcgcagagggcaccccggacagggcgctcccaaggagtttcctcccggagcccgactgctccggggctgccaagggctggcgcgctggccgcggtccgctcgggcgagccggctgcgcggggctgagaggtgatcaatacaagtggaaagtgcggcagcggcggctgcgcttggtgccaggcggcatctggggtgggtgcgcccgatgtggagagaggagaggggctggcgttccgaggccgtgggggaagggcgggcgggggcggggcctgggcgccgccgagcccgggacccgctggaggtgagggctgagttttaaccactcctcacctcccaggctcgcggttggacgggcggaagccctgtgagtccagatcgctttgtgtcgggggtggggaaatgggagtgggagtgggggtggagggggaatgcggggggacccagcttaagaactgcagggcgggcacctcttttgctttcccgagtttttatcttcgtaagggggaggggaaataagggaaaagaggaaatctgattaatcgttcacttcccaccgcccagtaattttttttca

SEQ ID NO: 38319 - DNA, 655 bp, Homo sapiens
gagactccgtctcaaaaaaaaaaaaaaaaaaaaaaaagaagaggaaaccaggagaggccggctcccaaagatgtggtccagtaggaattcagaatcgccagtattcttagctcctgcttatcttggattgagcctttgttagatttttttgtttgtttgtttttaaagctaagcagtcttgtgaaaagcagcttctcagtaagctatataggcacttcctggttacccatgatatgagaataacctttaaactatttccatttctgatccgggctggaaacaggaaatgcattgggtacagctttaaacaacaacaacaaaaagggaccaaaagataaaccaaattgtcccagggttcagaagaggtttatgctaagcgttagaaggttcagatttagtgaatcctcccccactttctgccattccagaaattccttttagaggagggggaaaaaaaaagtgaagagttgtactaaattgcagagcactgccatcttcagggccaatgaggaaaatttcccagggtcagccagataaatcatcttcctaaacacttcattgaaatataatcagatggttaaaaatttgacagcagacagactggaacagatttttctactgtttccaatgtttgaaaagtcagtagacacagctt

SEQ ID NO: 38320 - DNA, 563 bp, Homo sapiens
tgagacataagacataagacatgggactcctttccctgagaaatttttgatctagaaaggatgtcagagaagtagacccatggctacagtgtggagtgataagagcaaacacaaggaaggagcaacctagactggtgtttcaatggaggcttttgagaagataccattgttgagtggcattttgaatgatgaatagaataagataggaggatgaagaagcagagtagaatagtgaaaggcattctaggcagaaagctcagaggcataaaatagcacgctgcattgagcaattcaacactgtatatccaaagtgcaaggggatgagtcagatgaggtaacctgggccagagcatgaagaacgttgtatactggtgtgttaggcaagaactttttggtttcaagtcacagaaacacgatacaaatagcttaaataacaaaatgtggaatgcagtgactcagatactagagagtttaggaggtaaatgagttttccagtatggctggttacagtacttggctgatcatcaggaatctttcttcaactcaggcctaacttgcagtgg

SEQ ID NO: 38321 - DNA, 1515 bp, Homo sapiens
ttataggaaaaatcactacactagccttatccttctcatttcacctagtctgataaaaacttcatcataaacaatagtccatacactccactttaggtactactgtaggcttaagtaacaggaggaacttttgatagcaagtaatattttcttcatcaataactaagactagggtctttgtgcagggaatgaatctggtttgaaaatcagtaccaacctaaaccacttccaggtttatcatcctttccatgctctctgcagtagacacgagctgttcctagaaggctgatttctatttgccccatcccagcttccttctcctacctgttggtccatattgataggttctatgatatcctagttatgacaatcctctttcctctgtattgaggaaatgccagccctaaacaagagaactttgttttatcagtttttccagaatatgaatgtttgattcccaccaagttgccactgattactttacatggtatgggctgcatttatgagcagcccacacaggataagtatccagaaaagaaacaagttcctgagtcgctgtcaggatttaattctgtaatcacttttaagaagttgtgttggatttgtagagaaggcaaaactctgttttcctatgctttgaaactggcttcaatgacaataaagaagaaaccaaagaaaatgcttttgaaattagagaaataaaaacttctgaaatctttacgagtaggcaagctgtgaaagcagtggcagggtgcttcctgctgagtcatgaaatggaatgattcatagtcaagcaattcaaggccacagacaacagaactcaagcaagggagtagcaggaatcaagcccagattgtaaatccaggattggaaacataattgaaatcaggagtaaagcagaaatatcacaggaacacaggctgtttgagtctggtggacatgccaaaattaggaaaatggtagaacagaattaggtcattatttgaggatcgggaacacagaccagagatagatggatgctaagtgaagccccttgattcaggcttcctgggaaagaaggcctaagagaccttaagtagatctcttggaaatctttgtcagccctacctacaaaattactcccatttacccagtctatccactcgcctgtctgggagccaccctgaaagaatgatgaatgtctctgagactaattctacacaccaaactggtccaaccacattgactgaagcaatagtttgagaaaacaagtccacaaatcaaaccttcttgttctgtctatagatataacctgaatctaaactttgagtttaaattgtctcagtagtaaaattactgatgcatatagcagtatatacaggcttttttctgttgcttctgattttcatcagaaaccctagaacagagaagattaagaacacacattatgaatttaagaagccacccaaacagctgatctagaaattcaaatagcacagataaaaggcagtggtgagaaaagaaattaagtgcttt

SEQ ID NO: 38322 - DNA, 2134 bp, Homo sapiens
gataatggggaagggctatgcttgtgtcggggcagaaagtatatggaaaatctctggacattcctttccattttgctgtgaatctaaaactgccctcaaaaaaagtttaaataatttttttaaagcagtactgtattgtgatgtttaactcaattacttattacaagaaaactattcaactggtcaaaacgttatatataagaagtttctgtttgttaaaaacattgtttcaaatatatttaggctttgacttttaaaagtatacagcaacattcaagataactagacagaatgcactgcaacttggcaggtttttaaatccttggacttactggcctaaggaaagatgtgtaaacatccatgattcagaaatacagggagaaattggggcagccagacctcatcctcttgccctaaagggaaaagatatctttcttgcggtatctaagatatgaatcttagataatattcatgcatggctaggaattggaataatgggaaagtcttaattcatgggaaattttctaataaagttccacctccatttccagccattcctctttaacaaatacatttagtgaaaaatactaccagttggggagaaaccaaatgggtatgtgtatatgtagtgtttctcagagtgtggactttaaccacgtttaattacataaatttacgaggatctgttgaaaatgcaggttcctgggcttcactccagttgctctgaaatgaaagctgtaggagtcggttggtgaaactacattttgtttctcaggtgattcttgtgtactctaactcatatatagggtgatgttatttatttactggttatttatttaccggttatttatcgtttggcaaaaaaatccagcaaagactcacaagtgacctttacacttgacataggattctcttccgctgctgacgctttttttttctaagaggcggggacttggctgggcagggctgggggagggcgctaggcggggcgggcaggggcggggcagaagagccctgggctgggtggggcagggcggaagggccctggccttgttgggtggaggtgaagagttaatggctccgcgcgcaggcactgccctctgaactggaacaaaatgcaacttccggttggagtcactcggccaggcgccggcgacctgaggggagagggaacgcagctgaaagcgtgaactgtgtgagtaagaaactttgtgaattggtgtgtccgaatccgtcaagcacgacgtcggagaatttgtatgcgtgagcgagagggacgcgctgacagtaggggcgccgcagggagagaagccgaggagcagcggagacaaccaatttgcagtttggggagggattttgtgcgggagaaaccacgcgagtccttcccccggagcggactccttgtgggttggtttccgggcccgcgatgtcagcatagcatcgtcggcctctgccccaacggcttcaagggagggactcgtcccggctgctttgcccgggaaatgggggtggaagggcctgcggtgtcgaggtgagcagtggaccctccaggaacattcccgacttcccttcgggagagagactgcctcctagaatcaagtagtatcgtggttactctttcgaaaacttaattggttctttctgttgttttcccaaggtggttgcacaattcccctctgccttcctgtggggtgtcatcatagcctggtcaatgagaagttgggtaacttcccagagggtcacggagggagtgggtggccaaggcaggaagaacagaagccaaccccgcccacagtgggaacccaggcgttaggtagagtcctcacgccggtgtaaactgactagcaacgagttacaggcaaaaaagctgtgcttttctagaagtagaaagggggaggataatcaaagaagagctgtgcctttattgttatgctataacgagcaaaagtaaagcagccttgctatgtaaagtggtgtttatctcacctcacaggagatgcttttgacaagttataataagggagagatggtagtaaaggaagtgaagaagcgacgtgaaattgaaggaaaagaaaatgacctgccttcttaccgcggttggaatacacacccaaacgagaggtagcagagaagc

SEQ ID NO: 38323 - DNA, 1770 bp, Homo sapiens
acatttccaagtcgcttcagtcatttcttcctcctccaccctaccatgtgcttacaaaagtatgctgtaggagaaactcaatttctttttccaggcaaggttccattaaacatgtccccaataacctgattacatcagacaatgagccttccttcttatatgatttcttcagcagaatgttttttagttagaattgccagatttagccaataaaaatacaggatgcccagttaaattttttgaatttcaggtagataacaattttttactctaagaatgccccatgcaatatttggcaaccctatttttaacatcacatagactatataaatatgaagctgaatcttagcagattctctcctagtttggggctggggaagtggttaggtgtggagctaatatttactctttttccgcccgtaattttctttcttccgttctccttccgcaaggaacgtcttggggcttctcgaacatctctcagcatttactgtacgcccccctcccctcgcttttgctgataaaatggttggtgttgtgtttaaagtgtttataaagtctcctccgtgataacgcgagcgtttaagagagagaattctaggcacacctcttcctcccctccagagtgccccggcgtctttctagcctccgcctccaggcgggtgaggaggtgacacctgagaattcctccctctcacccctgaccctgccggaaagcgaaactgagatgcgggcattgggccctgggaagcgtggggaaggggaaaggagaaagccaggtgggtttttaggtcccttccagtgccacactgcggggcgttgaggggccgctcgaggcaggcccttccatgaggcctggactggaggccttctctagccgccggcgctggcctgggccgcctgccgccacgcaggggccgcgcgcctgggccccagggcccctttgccggcgggaggccggggggaccgactgctcttggcgcccggggtcgggggaggccgggaaacctcggctcccgggcgacaggcacccaggcccttctcagccccccggccgcggccgcgccgggcctcgcttcagccgggcgattcttcccctcatttgttgcattgtttgcattaatatgaatatcttgttctgtttgttttgtctcctgagagccaataaagctgtgagttttttcattacaccaaatgcagctctacgggcgatcaatcaatgggtagtcttcggataatctgtgagagtgagaaatctaataaagctagcgactaaaaaaggaaaacaaaatctatttttctcttaggttaactacgtcaggattaatgtgttccacttctgctgcctgaggtgggtttaactcttgttctttcccccccacccaccccaacaaattgatttaaatgtcaagatgggaggggaagagggctgaggaaagaaagagaaaagaaaagggatgtttaggagcttcttaaattttctgatggttggccgattctttcaagaagaggaaagacaatactttctaacgtcccagaaaatcagagaaatggaggattctaacaaaatgtagtttggcaaagaggcccttcctcagttttccgaacagacaggaaatgtaaattgataatgacgtaaataagtgatgataataaatcaagttattattagtgccccctgccccatcacttgtttgcttttgctagatgctaaacttaactcctcaaatgcattttttggaaggcccctcaaccatcctgagcaatgca

SEQ ID NO: 38324 - DNA, 784 bp, Homo sapiens
ccaacaagggaaacacagagatgaaatatcttctttcttatctggaaagtgagaaactataggtggctaacataatccaattttgatagtcgaataaatggtcagcttttggggttagaaagtcataatcctccttgttaatatgtctatctaactggagtaactacctacctattagaatttatcttggaaattttgtccttatgctcagttgtagacgtgtttcagcttaagaaatacagccaaaaatgagactagataaatataccatgtttcatgtaaatgctgctatcatggtacctgaaactatttccatttcttcattgaagaccactggagggcagtgttttctcctttgggaacagcacctggtttcacatggagactgcatagatgtgttaaaaaggcatctaggttacaggaaatgagttgtacttctcattcaggctgtgcttggaatttaccccctcctgtttacgtgtcattcagattgttccttatcatactgcctgtcaaattagttgtacctgaaatcagattccaaaagatcatgtacaatacatatttactgttttaaagctttatattcattaactatttgaggcattatgttaagttcattttgctaatataaatagcaaataaaaaaggatatataagcaagagtaggcagttttaaccagatgctttgcacttaaaatttcaatatttcattgattttattttcagtataattttattacatataatatgtatacatatatttgtcaccaaattagcaaat

SEQ ID NO: 38325 - DNA, 1237 bp, Homo sapiens
tatttttttagtatgtctttagtctttttaccttgtttatgccatttttgtcatacaaagtttttatgtattccaattaatgactttggtatcactcttagacattctttacaagattagtaagaaaaaattcagtattttattctaattatattatctttatcttttcatatttttcatttatatctcttaccaacttagagtttctttttttaaagtatacattagagatttaatatttcttccaagggcttagttactatccccacaccacttttgagcaatccattattttctccactacattcttggatatgctgttatctagttccggatttttgcctctatttcgttgacattttttagctgtgtgattccgaggtattgttcaggtttttctgcaataatgctgtgtgacaaacacttccccaaatctcagtggcgtacaacaaaaaatatttatttctctttcgtgggtatctgggtcagctgtgacactgcagtgttcttctggacacaaatggactttgctccaagctacaggtcagatttgagtgctacacatttctgttttttcaggctgtgataacaacagctccctggaataaattcttcttataatggatggtaagagtacaagaaggctggctgaaacttgccacactcttaaacctcaactccaacacattgttttttccacgtacactgcattggtctgaagatcacacaatcaaccctaagtgaatgcgaaaggaaaatgcattgtctccacggggaaggcatgtcagggacttagagaaaatgaagaactgtaagcaaataataatatctaccacactgagctagttatattttctaagtctcagtttcctcagtgtcaaatacaataattgtgaagactcaattatatagatgataaggcagattagctcctacccctatcattctttcttttaaaggattttctgactattctctaccattttttcctccagatgaatggattttagattccatcacatatgttcatctttttaataagtgaggaaaatatcttctcagtcatactacttttagactgatgagcaagttgttccagagccttaccaagaggaggttcaggaatgacttggaacctgtaataatcaacatattttttgtttattcaaaaaattcaaaactatgctgcaccaatttgcaaatgatattgaataaattggggtggttagtatcctgg

SEQ ID NO: 38326 - DNA, 2219 bp, Homo sapiens
gcttgttatttggaacatatttgagaaagtgacaggaacgtggcaaacaagctgccttaaacagagactgtacctagacctagagtgtaatatcaacttgtcaagtatatcttctgcaactttgctttttgaaagcctagcacaaagtagatcatgagtaaaatgtgattgccgataattacatggagaaatgtgaataaatgactctttaaaccctgtaaactaaactcggcttaaaataggtggtttgaacatttgggaaaccttagttttccctgaaatccaatccttgcaaagcaataatgacaagaggtggataaagcggacttacagaaaagggcgtcttaccggtcccctctaatcacaccatcccccctcttttaaaaaaattttcttctcagataaccaagttaaatctagctcaaatgaaccttttagtttttgaggagggcaataatagtagtgaacaccaaaacgaaaggggatctgggcttcaaaatactaacagttctatttcctagccagtcgtctcccgggctggatgtgccgccgtcccagatctcagcggcggccgcagagcgcagaggtagggagagaaaaaggaggcgtcggcggggcgcgagcgaccagggcgctaagtgccgcctcacagtcctgccagagacaggagacgccgggccgcccgcgccgtctgtcccaagagctcctcctggacatccgcttgactctccgtcgtctccaattggccgtcggggaacggaagccgaagcaaactagtgaacccggaagtgcttcgcggcggaggcccgggcaactcttttgaatggaatcgggctgattcatcgccggtttgcagacagagccgcgtcgggtgtgcgccgctgctgctgttgcctctgtcttcgcgtcaccacagaggcaagacaagggtccatatcgcggcatccggctcccgcccgtcttcaggtaagacccagaaggcaggcctgggaggtctggggaggcagccgtgctaggccgccgccagccccgtgctttcctgagtcacgttgcccagctgagttgccacaggaggcctgggccgcgagggaggagcccggcctccttcattctcttcgcctgctctcagggctctctggcagggtcaggtctggatgtcgcctcctttctccattcttttctgtttggccgaattcacatcatgggaacctcttccatctatatagagagaatccttgtttatggcctgtttgtctgtgctctatccatagttgttaaccggtctgctttgaagtttttcaaagcagaccgggaaaacaagggagagagagtagaattaactttcccattgaatacgtttgttttatctcttgtccttcctgtaagccttaaccctttttctgttagtgttaggttttcagctccctccaaaaagtaaacaaaagtcctgcagatacactgcttttggaccttgaatatcttaaaaacaaagtgtgctactatggctgttaacttactttcaatatcatactaattgagtaattgttggtaaattgattacatttctcgttttaagtaaagtagaaatctgctaccgtatgttacatcttgcaacttaattttcctggggatgtagctctgtgtctgtcaaaagaaaaagaatgtaaacttttgagtctataaacctagtgactgaaggaaaaattctcgagaaaataaatggtaatataagttgataaaatattatggaaaggcaggggaaagggtttaaaaatgagcataaaatagagttatagtgtgaaagtgattttgttccactggtcacaagtgtttttttagtgcttctgacttaatgtgtttgagaaaagcagcaagacatgcactgatactgtagaaataacaaaaacatgaacacagttttagtggagatgattaatataatggtggccttcctgtcacgtaaggctacctaccagctgactcatttgaagtttagaggttaagatatatagtggttctgaattaactacagttaaggtgtgtttagtgaagtgctatttagtgaaaaaggctaaatgttgtcttgaatttgtccctaaatcttgccaagggaagaaagttttcaagtgatgatcttttattgatgcttcacctgttgactttgggagtttttggttttttgtttttttttcagcctaaagtgcttggtaaataataca

SEQ ID NO: 38327 - DNA, 857 bp, Homo sapiens
tatggccatagcaatctgggtggtaattctgtgcaatgtgtatataactcagtgggactgagaagcatgacaagtccctgagggtcaccacactttcctggataaagctctgcatctggacgcctaataaagcataagcctgcaagtatgatttcctccaaagagaggtgcatagtgggcactgtgtggttgctgctgagtttttctgcttgttatagtgacctctccttaggtaactgtgcaggctggggacagaacctgtgttttctgtctttaaagcacataacttcaaatgtgaggtcactggataccttggccaactttcagccatggttaccctttaacttgctgggagttacaacttgccaggagtgcgctatgttttgtctgctctgcttttgatttttcacttgtccccttactttttccaactgtgtgtgttatatattctctacaaaaagatatctttatagggagcatttacatattttgagaaataggttaactaatattgctattaataacgtatcacttagagccctagttttaaatagctgcatatcaaatagctgagtagctgactcatccataaaaccccacaacttataacacttactcttccaacccagccagtagtactcatttcaatgtgttgccgtgcctaggaagggaaagagacaatgacagcatttcaaagagaagtcagatgaaatctatagccataatttgtggtaatataaatagagctgtacttataataactgagagctatctccattcatatatttctatttatgttagtatttttcaagtcattacattagatcatttgactctcttgcctaaagttatatcct

SEQ ID NO: 38328 - DNA, 832 bp, Homo sapiens
ttcaggccaaaaaccatttggacaatctgatgaaactgatgtacctctctctaggtgggaaaagcctctccactgacatacatacaacatctgaaaattccatgggcatagattaggaatttgggctccagcaatattcttctttttaaaagtgctctggtagagcgaaggggtatgtgatggggggaacaactttttgacaataattagtggatcacccagtactaaatagctttatctattaacagtcataaattaaacatcaggttcagaaatcagcaatataaaagcaacctttccccatttgaaaacattgagtaatggaatttgggaagtcagccaggaaactcacgtgcatcagtcatcttccctgcccattttcagatcaaaggtttatggtcctggactctgcatggcctgggttactctccatgaccccaggtgtactctgcaccctgtgcatgctcagcaaggcagttcacccgtggcgcagacaggaatttttgaattttcttataaacatacttcccttcagtggcagccttgagccaagattatgccagtctgagatgtcaaagaatcatttaaaaaaaaaaaaaacaaaaaactgccaggtgcagtgactcatgcctgtaatagcagcattttgggaggccaacacaggtggatcatttgaggccaggagttcgagaccagcttggccagcatggtgataccctgtgtctactaaaaatacaaaaattagtcaggcatggtggggcgcatctgtaatcccagctactcgggaggctgaggcaggagaactaattgaaccgggcagacagaggttgca

SEQ ID NO: 38329 - DNA, 850 bp, Homo sapiens
gccttgcaaacagtaagcatttaataaatgtttgttgggtaatattaattcccttaatttgtgtaaatgtttcttttggtacattaaggatacttaaaataaggtatttatcatcaactggaaatcatattggagggaaaaatgctacaaagagcaactgcaaccgtggaatgattaattcagtgaatcacccgaggaagcgggcatactgccagtgctggcctcaggctccatgccaccctctgctctgatggggatgccaaccctcccaggttcgctgacaaatccctcaggagaggaatgggtgggatgagatgaagcagatctgagggctgcagcacccgtacacccgcacagtcgtagcatgcaggtcctaatgtgcagatgtcactagcttccagtttatttatatcctgtgtgacaatctgaggctttgatgttgcagctttataggccaggggtcgtaacagttcagagaagacacagcaagactttatatctattgtgtcatccaggagcagagagagcagggatggggtatgtcatgagctgggtgtgatgagccccagagccattcaacagatgttgggtggggttactacagtagaacatgccctttccaatcccctagattcaggccacagaatttttggcagagaggagataaaaggagggatttctatgcaaggtcattttgaagtctatccatagtgctggcagcgtgaaccactattctatacacacaaagccatctagataacttactcatccattcatccatccacccatccatccatcctctgcttatctattagtttattctacaaatattggttgggcatatgctatg

SEQ ID NO: 38330 - DNA, 682 bp, Homo sapiens
catctgtgagccgctgcaccaggcctagtccacagtttttgaaaacccatcatctctaccacattcaggctcccttctgctcatgatggctccctgtgaattggatccataagctcatttcccagatatcaactctgatgccacacttgctagagcccaggacatccctgcaaggcccaggcttaccctggtctgtgtgaggttcactcggctgcgttagaataaccctgcaacccagtttccacatattagctgccagtccaagagaagagcggctaaattggagcaagcagagcaacacaaatgttccttgtttttagccttgccatttgataagcagggcacattggaagacggttttgaaacatctagataagcgagttctgtgagacaagagtgccaactccaggttttgacctttagcaagttcatagttggctgccaagttacaacctattttgtcaaactcttatgagacatgctcatgattcgtcttccttgtctacttgctcactgacagggcactgctgcggcagcagatgaaggtctttggctgcttgcatggttttcttagttcggcctgggacatgttcatttgacttatcagttcaaagcattgtgcagccaagtaaagcacttaatcatatgttacccatcagcttatacagaaacttgagtttca

SEQ ID NO: 38331 - DNA, 3264 bp, Homo sapiens
tttcagatatccttactgctgtctttgggctctttaaacactgccttttttcctttttcgatcacacccaaaaacttttctcaaaaattacatgtaaatttaaaaatttacaaattaaatttaaaattgaaattttaaaaatcccgactctccctaatttcaggaagcatgcatttattatacataacaagacgtgaaagccgcaagagtttcagcctaaacactgaagaccccgcgaagtgaatccagctgctgctctacaagcagcaacaacaactgggaagccttctcagctacacttcggggcactggtccaaccccacgcaaaatccctcgtttcccttagcgtggtaagacggagcctgacctgagctccaactgtcctatctttttcaaatgtttcaaacttactgcctttgttcagcagaaccacgggcacggtgatgatggtgacaagcgcagcagcacccagcagtcccagaagaaccttccacggtgtctgcaagccgagcagatcaagtccaattagagggaagcgtgtggccccagtttccgtaggagggtcggggctgctccagaggcagcaggatttgcaggtgggagtgcgttagaagagggagaccgcgggctgggggtgggggtggcgtctggagtgcgccagttggagttctctaaggcgggtgcccttgaacttgtgccttcagagcacattagcgttggtttctctacccctgcccgggttcgggcgtgcgttctgtgagtggctctccgggacattcaaagctcgacgccagggtcctagcagaagccagggtccgaaagctaagcgagagctctgggacgtcccttcacctgtcagagggtggccttggggcttccgcctaaggggagtccctggtccggtttcgccagcttttgggccatttggggagtttggcgaagaggtccccacagctcgccccggggacgtacgtggcgcggcactcaccttcatcgtcggcgtctcctcggaagtgagcgttcagagaaggagcgcaggcagaagtcaccgcgggcggcggagacgcgcgtcctgcaccgctgctccgggcggtggagtcactcgccgctggcaagtttcggccccgagttaaacattagtgagcgccgagcccgctgggtataaaggcgccgcgggcaggctgcagggcaggcggcgcgggagcaggcgcgcgtggcgcggggcactggcatcccggccggggggagcccgcgagggccccctgagggcggtgtagggcgctgggcggcagccggggcgcagagtgcggggcccggaggagccgtgggggaggggaaagggcgcgcggcctcggatgcgcagaccctgggccggcgactcggggaccctgctccctcttagctaaaaatgacgtcggcgttcagctcctccaacctcacgtggacaggcgagggaaccgagacccagagagggcaggggactttggcaaactcacacagcccaccgcaggcaactggaactgaaacccaggactccgtctcttgccagtgaaagttatgttaggaagcagtgaggggtctaaagcagtatgaaaggcaaagagaaaaggtgattgttccctcttgaatggcccttggaagctgagtatctggattcaccctccctagggaatttcccgattgtcttgcaggcttacacactcatcaagatgacaaaaataatgacagtaacacttatgtggaacttgactttttcccaggtgctgctctaagcatttactgtgtttgttttacaggaaggaagactgtacacagagaataaataacttggccaagccattcagctaggaagttgtagatcctaaattaagagttcaaggtcttaatggctactctatgcggcctctcatagtcttttcaagggttttggagaagaataaaagatcaggtatggcttctccctcccccagctctctattgttccctaaaggattattcattcgttcattcattcctacatcctcccatttattccagtcatccacagatgtttgagtggttacaatgtgccagcctcccttctaggtactggagataaagtgggacaagagaggtgaggtctggacccttggcactttcacgataaaatacacaggtaaacatttgcctttagggccccctgtgattacttccactcttgcagataagaggataaggcctcttcagcttgttcacagcagctgaaaagcaaagcctctctgtcagtagaggtaaaagattaagaatgcagagtccgatggggcattaccacatgattatgaattaatgcaattttccatcttttatttccaatccaggcattgcttttgaactcagtcatcttttcccccttgcccactagttgcttgtgatacatcagtatcctcactcacccccaactccagaggctgaaactaactctcctcctccctcttccaactgctgaggaagatgagtcaatggtgttactggaccctgtgaactgatgctgtgaagagaggccatttaacacggactacggggaatggtgccacagggggctcagtgctgcccttcactctcagcattttgctcactcagcattggtaagccacatcagcctcggtgaaggaagtctggagagttaagcctgtgcttcatctccatgccagcaccatggcactcattgtacattcagcaagccccaaggaagctggcaggaggctggctgacatctacgggacaggtcaatttgttctctggagggcactccatgagacgcaaatatcttcacaccctgtgcccatttcaagagactctctcacatgcctcccccaccttgacctctgtgtcaccagtctttcaatcttgttttttccaaatccttaaggtagcagctggccaacacattagccaccactgatgagtcagtgtagatcttacattgggccatctcttttttcttgcaaaatagaaaagcagatgttctgctcaaagttctgtttgtcagtaagatttccctttctgctgtgtttcaggacatccctgggagggactctgatgcagcagccatctacttattgctagtgccagcttactttgcataacattgactcctttccctcatctgttgcctagttgtaggaaactccttgtgaagctataggtgtgcactgagggagagacattgagtcaatgggagcaggcatcatagagtctaagttttctgctagtctgagtttcttg

SEQ ID NO: 38332 - DNA, 2829 bp, Homo sapiens
aatttggcatattttgggatgccatgtctttcattccttcatttcccctgtctgaaacttcactagacgtttccagcattaaaagctgaggtggtggctgtggaaagaaatgacaagttagtaactgtgtcataaaggatttgcaaaccaggaaacaaccaatctaaacattgttccccacactccattaaaccagcctcctaatcctgggaaaagttctatccaataaaatggtttagccttatttatttggtgaagaatatttgtcttgtcttttaaatggtgcagattaggctctatttgtccccaaggatttacatagaagcactgttcttctccagtgtttgtcaatgcatccaggacgtggggattctgaaatatagctgtgactaaatgtcagcttctgactggagtgctttcagtgctttcatagaaatgttgagctctcattctataactatggaaagatttagaattgcttttttaatctcataaactccaatgcttgggaaaaaagctctcaatattgaaaagaacttggagttgtgatataaaagtgagttttgaatagtacatctagtatgtttgtatggtaccactttataaaacaaaagagcccaagtttgtaatttggctagcatttacagtagggtacctggagacagaggtgttaaatatctgagtccacattgcctgggctatctaggtgggaattgtttatataccttgttaccacacaagaaaaaaggccagtatttttcacaaataaggtcagagtggaatatgtgacaccacaggttggggtttattgcactttgtcttctagcatattgacatctgctcatctccatcctccatgaattctgtcagtccataggaatgcaaaaggttgtgaaatatctgatataggaggccgttagttcagtttgggcagatataaggcttaaatttattaagccaagtcagtctagaattttgatcaatctatttgtaatctttggtgtctgctagcctaatgagttttcccaagttacacaaggctgactctggaagtttatataacatctggtgatttggcaagtgtttgtaccataagagtcagtgtcagaactgcttatgaccttcgtgaaaggcttaagggtgccatgggtggaatcaaaccacaggctttgactgcaatgcctcattgatatgttacttaagaaaagtccagcattatctctgcttatactggagagggaaaaattcctttctaatgactttactagagcaaggacagtcttcgagctcttacagagattcctctgtgtccaactgactcactgaatggaaaaataatgtgttgttgttgtctaggtggtgaatgccataccttgacatacattcattctccaaacttgatccactggacacttgcattggcagggacaaaaataagttcagggtttttctttgcataatctagatgttgacataatcaatagtcagattgattaattatcagagccagggtttggaagactggtacaaagggatgctgagtctatgcctgacccgttggaaaaatagtgagggctaatcagagcggacacagtttgaagaaaggtcatagtggaggagcagagggagaatagttagagggagacaatcttcagtcagcttttaaagtaggctaccaacaaatggggatgggaagcatttgtcaccaaaaaagagatttttgtatgtttgcttgtttgtttgttttcaggaagagtattagggagacctaaaagggggagaaaataggtggaagtaaaatttcttcgtccctggtcttgggaaaagctctctactttgaaaaaatgccatctgcttctggggccagggaattagccctggtaatccttattttaaggtcacctgtaggggtgatctttcaattgacttggaaatgctgatcaggatctagtttggtgttgcttgtgtgaacccaggagggtttttcttttaatggcagcatagatattcagctgtacttcataagggccttcccagtgaaatgacagtgtgtgcttttctctaaaaatgttgatggactcacagtctcctggttgaaaaggatagcaaggcttgtcagttggcagaggccacatcctttttacctgatgatgatatgctccaagtatatcagtgagttcctgtacatagctagacacagcatcacattgtttacttaaatccacatagagtctattcaacctaggaattggaaggtttagagatgccagtaggcatagggtagccaaacattatctcaaaaggggttaatccatatcttctatttggagtattttgcatttttataagggccagaggtaatgcttctggcaatttaagtccaatttctctaaaaacatttcctaaagtccatttaatgtctagatttgccttcaggattggggatagtatggggtatgaaattttagtgaatacctcagagtttttgcaagcaagtggtttatctctgctgtaaaatgagttccttagtctgattcagtccataaaacgatgccaaagcaaggaataatctgttactcatttcttcaccattgttgtggtgttagcatgtctggtccaatagcattcagtccacccactacgcatacagacaataaccagagagaaaagcctaaagctggaagtgaatctataaagtctatctggagttctgcaagggaagtgtgcaccttggagaacttgctcagtaatgttggtttcctccagagatttggtgagagttacaagtaatgcactagaaaatagtgctcccagggcaactgtagatcc

SEQ ID NO: 38333 - DNA, 5484 bp, Homo sapiens
tggtgaaatacacataacacttaccgtcttaaccatttttcagtgtaaagttttttttaaccagagtaatctaaagcttataatgtaattttactgaattaaacatagaacttaaaattattcatctaggactcccctttttcttggcaagatggcagagtatgacttaactactcacatcatatctcttttaaactggcattttgtttctgctgcttgaattgctcttcataaaggagatataagagggaaaacaataaatacatgggaagttgggtcttcctagtgacaccgcatagtagcttttgctacagtgtatgcaaataatacctttattctggtgagattcctcatgctttgagagaagaaatgacaatagttgtagtccctcaaatagaaaaagaaccaattggaaggatgtttggagaaccagaaattacaaggcaaatgcagtccaatgggaatggtcagatactgtttggcttctcggctgaaaaatataattttgggtggaagtatttacataggttctgcaggctgtttctcagggtttctttctttcttttttttttttttttaatttattctctacactaacctccctgacccaagcatttttcaaacttttttctcctactcatcctccatgaaattttaataccacagatatactatattgtatttatgtttatgcactatctggaatatatatatatatatatattctgtgcttcacttgtagggagagtgatgcttttgccctcaataaccaattttcattccttgggggcaatattgcccttattcagaatgcatgctctggagacacacgcacttccagcatgaacgtgtcagtgactcaggatcagctgagtatcactgctcttttagagtgctgcttccagcacatgatagaaataccgagttcattctgggaaagctcatctctgaaatctttttttttttttttttttttgagacggagtctcactctgttgcctaggctggagtgcagtggtgtgatcttggctgactgcaatctccacctctcaggttcaagtgattctttgcctcagcttcccgagtagctgggattacaggcatctgccaccacacccagctagtttttgtatatttagtacagatagggtttcaccatgttgaccaggctggtctcgaattcttgaccttaagtgatctgcctgccctggcctcccaaagtgctgggattacaggcatgagccaccatacccagtctcatctctgaaatcttaatgctgagagactgaatatgcaaacagtcagtgaccagactgtacctgacaattggactctgccccacaacctctgctgcaatcagcccagaatagtcaggattgtaaactttgcttctaactcaggaccagaaaaagatttctatcctccccacaccaatctcgtcagatgtcctgcttttaattagcctacctcctgtttcttatgccaacaggctttgatcagagcacacctgaagcctttcctgttttctctataaatctttccccctgcccttcctgccttcgaatctctgctaagtgatggtgactgactcccttgctacagtaaaccttgaaaaaataatcctgtttgttctcatttgggtggttttcatttatttccacaatgcgaaatggggatgcagccatggacgatcttacacatttaagacaccattgataataattgttccactccggtgttttggcaacaaacatgtctcattcatcggtctctgttgttttcaaccacccctacagctgtgttaccattatttatctcacctttttcagccacactattttaataattcagatgatgtgtctctgctatttgactacagtagccataatagtcaaagatgctcggaaatgcaggaagatggtaaaagacctagccaatgtctttcaaaagaaatcctacacataaaaaccctgttactgagctggttgaaagcttttactttgatggggaccagaaaaaacacccatgctccaatgtctactttttgaggatttcattagaaatatttgtatatttatatttaagactctctgatatatccaccggagtattagcattagtatgttggcagatacactaaaagtgatctcaggagaagctgaaggatgactcatacttattgagaagttactaaaccaggaaatgtcctgggaatatcaatttgaacaaataaggaacatctccaggattacagtttacaaaccagtttacagttgttaatccacctgagctttctagccaaacaacacaagactaagtctgagataattaggctttactgcccccaaccccaaccccatgtaagcattttccagaggaagctgagggaggagattagaattcctggaggctaatccactgggctatggatctgatgttcagagtgtagtggtcctcctggctccatgctgtaagtgccctgtttccctcctaggccttgtcacctctttttcaatgtctcttctatgccaagaatccccttctgtagtatttccttccaaacagtccccctccaaaggcccaacctcttcctccctttctctgctatcaaatttcatctattctaacctatttcatttttttaagattccatatataagtgacagcatgcaatatatagagatagagactaaaacagtggtgaccaggtttggggatggggagaaaatagggagatgcaggtcaaaggacataaagtagcaaatgtagggtgaacaagttgaaagatttaatatacaacctgaggccgctagttaatactggtgtattgcattcaggatttttgctgaaggattaaatatagctgcttttgccatgatggggactggtaactatgtaagatgaaaggatatgttaatttgttctgctagagtaaccatttcactatatgtatgtatctcataatatattgtataccttttatatacataaaatttattaagaaagaaaaccttcgtctattctgatatacagacttgatggaggttgataggattgacatatgcattttatcaggacttttgaggctgagaagcccttcccgattctcaaaagttttcccaaacgtgtgccctgctcccatctccttcactgccttgagcatattttattaaaacaatctgttaagcttctgtctctctgacctcgctttgagtgtggcagccatgctctattgtttgtatttctagaaactacaccagctctgggatagagtaaactcagccatgtgccaaagctggcaacatggagacagctgcttcttgcagccattcaccaggccacctgcaaggccgtagggagaagacaaaggagcgaagactttacggttagacaagcctgggtctgcaatccaattatatgcccttggctgttttttaaaaacctttattatgtgcccttggctgttttttaaaaaccttcttcccagagttgcagagatttaatgagataagaactgagtcatctcagttactcccaagccttcaaatgtatctctatgctgatggtttctgcttgtatttctctagctgggatctctcttctggagtctgagcctccggaaggtccccacctggatgactcataggcctattaaatctaaattagccagagagggttaataattaccaacactactcccctacccactagtcaccaaattaggtccttctgcatcatgctctccctccatgagagtatcgccaccacatggcccaagccggaaacccaggagtcctccttgatacctgctcactccttatcccacacacagacctctctaatctcccgtttcattgtccacatctctctatggtctctcttccacctttgctcaggccttcctttcttccagaccaggtcatcgcccagcccatctaactggcctctccttttgtcatttctttccatggcagcgtttattactttcctgcttaaaactagtggcttcccctgctgcaggatcaaatccaaatcccttatcctgttctggtctctgcttagccttccttctcatggctcctccccaacatcccgccacctacacactaagctacatgcattcatttctaagaattgaaatgcaatctctgttttgctctctcttttgcttttgaaacttcaaacataacgtttcctccacctggagttcattccctttgtttttcatttggctaaggtcctagtcaatgatcgcaactccagtgccatctcatccaagaagctttgcccacccactgccctagcaaggtgcatggcttctgtgctctcaaacagacttgtgcctcactgctttttaacaaagcactcatcactctgtaatgcaattatctaatgtaataattgctaagattcatggaccccgtgctaggtgctggacattcaggtaagctctttacttgtaatagttcatttagtcctcataacagccccatgcagtaggtacctttatcatccctgctttgtagatgaggaaattgaggtgcagaggggtacatactcttctcagtattacacagcaagtatttgaacccatgaggcctgactccagagccctataattatctactattatccagtaatattcaaggattttgtctctgttgttcactgatatactcctagggcctacactaatatctggcacaataataattgcttattaagtgtttactgactcactgagtgaataaatgctgattcattgtgtcatttccttcctgatgggcagggattaggctttattccatttatttctagcagctagcttggaccctggacatatgaaaattgttaagtttgtttctctgcatagggtctttgctactctgtgagatccatgattctgttttgcctttgtggtcttctgagaccctgtattcaccctgccacaccacagcacacttcgctgcgtgtcaatttttagtgcatagaaaaaaatctggtcagctgctgcttgacagctggaaaaatagagctgtacctgagccagttttgtacctcagaaaagcaagggggagagtctcctgcctcacgcggtgtgtgggtggagggctgaatcatcaagttctttgagttccttgggaaaagataactcaaaggaatattacacaacatggagaaataggaggaaaataagcagagacacaaaaatgactcaagtgttgaaaaatatgatccacgcaactaaaaatacattgcaactgagtttgaagaggaaaagactgggtgtcaacattccagtggcccaaatggctgtgcatgaatgggctttggttcgaaggatggtgagcagatggtcaccggcctcacagagaagaaggttgtgcaacagggcctggaggccctctgaagatctgagacaaggggaagaggacaactttaccagggacaagacagcctgagcttcagcaaaacactataaaa

SEQ ID NO: 38334 - DNA, 664 bp, Homo sapiens
ttttaagatgtaattctagctggcctaataactaaaatctcattaataagacttaaacaaataaaattacaatataaacagctgctttgcttagaaaaaaaaatcacaagaacttaataaagaaaaaaagactttgatttcaacagatagaaataaaccaactacaaggaaaagtcattataataaaattgagcaacattcaaggacacatccttgcatatccatgtcattcttttgctaattcattaacttaatttgttaactcaacagacactaattaagagaccttaatttaggagacctaaagtaagagtccaagccattgccaagtgcagagaatagggagataacaatgtcagggtcatagtccagtggaaaaatactcatgaaaacaggtcatagcaatagaatgtcattgaagtatgagttaaaagtctggatactttttttctctcacatccctgtatccagtctccatccttctcacctttgtgcttttcctcggggaggctgatttatatgactgtatcagtgggttcttgtattagtcagagttctctagagaaatagaaccaataggatatgcagttgacccctgaatgcggggattaggggcactgactctctgtaccgtcaaaaatccatgtataacttttgactcccc

SEQ ID NO: 38335 - DNA, 685 bp, Homo sapiens
aagctgggatagttggtcaccctacctaccttgggccacccataataggatgcattaacccaggacaggactgcagggcaggggcccaccagggaacctacaggatgcccgtgaaagtgcccatgaaagaaagactcatctgcaaacatttgccaggcctggaaagcccgaagccagtacaagaaggacatttcctggccctttaccatgtctctcttctagctctggccttagcccagaaactggctggcaagctgcggggagggcatcagaagggaggagggaaagcactaggtgaggaatagagaataagccatccacagcggagcagccaaggaacagggacaggaaaaggtttagtgctaaatcagtttcagtttctggttatgtaagatgttctgattactgaattccactcacttgttactaaagggattgtaggacgttcttgtcctcacatacacacccaagagtatctagaaaagtcctgggatgcacgtgaatgttcaactggggcaagggaaggttaactccactgaacacttgaaggggagtgctgtgatttcacaatgggccatgcttgttcaatatacttcttatactggaaatttcaaaaatcctgttccaacgagagtgacaaatggcaggtcaaggaaataacttgtttattcctctactttgtgag

SEQ ID NO: 38336 - DNA, 939 bp, Homo sapiens
aaatgcccgggacaaacagatgggaagaggccccgttagtcacagcttacccgacactgattctgaaggacactgaggagtctacagagaagaaatgcagtagcaaatggaaagttgctacctgtgtggatgctgctcatggtatagaggagaaaatgtgcagcaaattgtgacacttgagcaattcttgcacaaacttcaaaaatcaaatgaaagaagagaaggttcactttcttgttaaaaaaaaaataaccttgctactggtgcttgaagacagttctgagccataaaatcaattgtgattttatgatctcccagaagccaacaatcatactaccttacatctggggtaaagagcaaataacaggtgatacatgggaacaggaaactcttaacagctctcttcctaggtttattctgaaaggatgacatttacaggaaatgatagtgcaatagttaacatggaaatgaaacattaacactgaatgttgcaggactaggttaaaggttagctagataatcttagcacttccagaccaacgaggcactataaaattcaccttcaaattctgaagagtttcccagagggttgtaaatactgttgataatgtggttatatcaacaaaatgtcagtaacaaatgaaaaggatgtttttctaatcttggagtctggattgaactttataacttttctctcataaagttggcccaaggccaaggtaaacttggaatcatagcgatcaattattatcctattttagaaatattcttattcatgccatctataaaagcatgatagaaaatttcatctcatgtaattcttccccaccactaaccctcaagttatatcaaattttaaagttgtgggaatatcaaaagtgccaaatatactccaaatgagcaaagttgcccttataaccaccaaagttttaagggtct

SEQ ID NO: 38337 - DNA, 2123 bp, Homo sapiens
taatacattttgaaaatgataccaactgcacatagtaagtgttcaataaaagttacctgttaatacacattacgattctagagttaactcctttttacttcagtgaaaacattagaaaagtagttcttttgtgtttaaatttttaaaattgtcttaaagtgcctagatgttgtcttctcaaaggaagaaactagatttgcccaaagaggtcaagcacatttggaaaggggcaaacgcacaaggaagcctgctttgcaaaatctgcctaaaaggctagctccatctgaacagacacctacccggtttctgtcttcaattgtcaacagttcctcctccatgcacttatccaagacgtctctaactagaagcttgtccaccagagtgggctgaaggaggttcagcagttggagatattcatcatgagcgttctcaaacgatggagagggcaagtccgtgagctcagggttcatgtagcgggcggccagagggctgccggttctccggagggcctccacgaattcccgagtccaaccaaggtgccagactcccttctccaaggtgctcagcagcagttcaactgcctgcatgttcccggaggtggcgactgtcctctgaatctgctccttcacctctgcaggcagaaaggtcaggtagtccagcacaggctccacctggatgtacattttcaccctggccctgaagcacgagatgagatagcggaaattctcgtctgtggaatacccattcgacatctttctttctcagagaagggagagggttctcccaagcagatggtgctgttgtctgcgggacaggtgaaatgtgcgtgccgctgtccgctgcccacttagagaagcagggtctaccgctctgtgcctgacaatgacgaggttgtccacagggctctcaggccggcgcgcggggctgcactcgcacctgggcaggtgggcaggcgggcaggtgggcagcggggcggcgcgcggggccgcggcaggcaggtgcggccggcaggcgcggcactttggactctgcggtgtgcgcctggggtcccggaccggggcgatcctgctgcacactcgggtaggagctttgagtccagctttctgtcaggcagttcttacagagtttgcctgactttggtttctgtttcgattctcttctcaggactttgtaaacgtaatctgcctggcggggagggagtttcctcagggagacgccaccttttggtcggggcgggtgaagagaggaggcctttggttaaggacaccgcgggaaacagaaaaggaaagcgaattctctctgacaccaagaccaacgctctagcaaagctcctccggcggatattttgttttcccagcaggttctgccttaacaataaggtcctttgtaggccaaaatgtgcagggcataaaagcatgtgatttgggactttccaaaggggaagtgaacagaaactgccacagacccggacgtgaacagggagttaccctcggctggtgaatgtaggcaggcctggctgagggtggtgagactgcgagggacaggtgagagatgaagctcagaagacatctttgcagagatgtggagaagacaggaggaagtccttcctaaaataaacctgacctcctgtgggttcccaaacactaacttgtttccctgggaatttggaggtgggttcgaaaaagtgagtaacaataaacagttaactttactgcctcatatttagattgctggtatttatgcagctttgaccaggacctggtaacagatgtggatggacttgaaccaccaactcagcttagaaggaagccaagacttaaagtttcctagatcccagcttgtaagttccctatattctttaatatacaactttcctttaataaaacaaaacaaaaaaatcccccaacaacttatttttgatatagctgccattcttttcttggattcaatacagcaagttttggctggagcagctaggaacttaattagcaactaatgtaccaacttgtagtaaacatcaacatttgtctatgtcatgagagaaaaaaaacatattcacactgaaaaatggcagcttcattttggtacagaagccacataaatgtgagtccttaaggttacta

SEQ ID NO: 38338 - DNA, 1160 bp, Homo sapiens
actacacaaaagtaaatgtaactgcaaaattttgaaattcacagatgggtctttgaagtccagctcaaaagcgtggagggctggttaaaataagtcacagacttgccggtttggggtttctagaaagaaaagtaacttgaggagttgaaggcttgtagaagacctttccacagagagtgggaattccgttgcagcagccaaggcttcttcgggatttagaaggagagcgcgcgagaacctgagggagccagtaagagtcgagcagggactggagggctcccgatggggtgtagccaatcagggcagagatgggtggggctaggctgcgggaaggggcggactgcagctgagttggctccaaagtgtgggactcagccaatcggaaccgtgcagggcggggctggcctgcggaagggggcgggttcggaggagtgaactgtgcggttagtgcgcctttcagcctcacctgcagctgcgcctccttgcacctgcgcctgtgctttttctcccagcactgcggacgcgactcgagggtgacgctcgctccgctcgtcccgctcgtcatggcctacccgggatacggaggaggggtgagtcccagccgcttggtcgtgtccctcttcctcgcggggtgtggcgcccccgggggcggtgccaacgtgcgggtccgcccttggctcctgctccctgcgtccgcgcctggtactcggcggcgccggattccggggctgttgggggccagggcctgggcgagcattgatcctgggctgacttggagccgcaggttttctggtcgttgaggaccctcgaggagcgtcctggtggagccgagggagtaatgtgtgtttggaaatttatttcctggaatggaggaacaagccaccctcttcttgttccagtaatcgtttgtggtacttccctcccccgccccccactcagtgttgctagagatcctctttttgaatttcctgaccacttcttgttctttaagttccttatgaataaattaaggtgtacggtaaataactcctaatctttactgttatacgaagggcaatctgttctagactcccccgctcgcccccaggcggggggaagttactctttgttataacttttatcctgcatcacctttgggagttgcaagttataatcgtaga

SEQ ID NO: 38339 - DNA, 1665 bp, Homo sapiens
caaactttagtattttttaaagtattaattttctcttctttgtaaaaaaaaaaagagaagaacaaaaactcaattatatacctgttagttggctcaatagaatggtaatagttgtttattatggtctcttaatacagttgcataagtgcacttgaaatgtaagctatttaattaatagactgtaattactttctgaaactgcttagagccaagagtttttgggttttcatgtaagtattcaatgttatgaatgccactggcactttctagaagaacaatccatgggttctttagtagtgttcatcccttggagtttggaataaaaatttagaaagctggaggtgaaaggagcctgtgagctcatcgtgccagactacacatgacaagagcaaagctgggtggtggcagagaagccacagtcagtcccagcaggcccatgacacaaaggttgcctttggagattcagttgcacattctttcctctacacagtattatcaggttgtgtaacaaaagtcaaacattaactattgttgcttcttacgatcacatgtatttcaggtggaatgctaaatgctcaggtagatgagaatactaaatattgtatgagctatccttggcatatggtatcaaatgctagtggaagtgttgggcatgtgaggcttttactccttcaatgtttcagtaattgtggaaaaattaaagaattcataccaggtcttgcctctgcacagccccaaccccctcttctctagctaagtcacttggcaggcaggctgagccgggatctagaactgggaatttgaccatgcatgggagggttgagagcgtgtaaagccttctatttggggacacaggatcaaatcacatctgctgctagtttgaccctgaccttgtagatcaagtagaataattggccttctgccttattcctcaatcatggttctcttcccgcatttaccctactctggctttcttgtctgaatcccagccttggaacttgatcctctagaatattctttcacaggggactttagtctgcctctttctaaagtctgggactctgttacctgtatacagatttgcatggggctcccttcccacctgcctgccgcaattcctgacactctgctatgctgccagttgagtcacccccttaacttctattggatctcccaatttcaaatgctgtcctggctagctggctcttgtttacccccatgtttcctgaatgttatatcctactatgttatatttctaccagcaccaacagctgcacttgataaccctagagactgactttcccacggaacataaaatttcaggttctggccactattatctgctcagttcttctgcatgtaactgcattgccttttcaaaacaacagcatctatttgtgaattaaccagaaaaactataattgccttggaactaaggggattatgtttatgtcagttgtagattagttttaaaaatttaaaattagctcacagagacattttgcaatttaatttcgcagtttgccatgtagctgtaaaattaaaccaaacagtttattatttcagtcctggaaacattataaacaatctttcagacagctgactcacttgaagaaaatggggtttttccatatacaactttgagaaccacataatttgggtttg

SEQ ID NO: 38340 - DNA, 471 bp, Homo sapiens
taattatttttaaatgacctttaatggagaagtataacttgttttcttggattggaaaaaataatggtgacaccctcctgaatagctgttgctagttcctatagtagttctctaccttcattcaaaatgggcttgactatagatcaggtcacatgtactccaggctgttctctggaaaatatgcagagaatgcaactctatgacctttttgagcttgtgctaaaggcatcatagctcacagtcaggaaggtctttctaactgaacccttgtcctctggcagtgctaacttgtttacattatttatggttcacagcacacgtccatcacttacaaatgatgtaagttggttcccagaccaaaggaaaaaagatttttctgagtgcctacaaaataacaagaaatgaatgagagccagtacatatccttcaggaagatatattttatgattcattttgtaagtaaaagtgtgt

SEQ ID NO: 38341 - DNA, 1086 bp, Homo sapiens
actccatttggacttagctgtccacctagtttggttttgggtgatgttaagctgagatttgctgcccaaaaacattaatcacaaccggctattctttcttaggattgaagagggttttctggagtccttcattaagatataaataaacccaggagacattatcccatactcttttatatggagtgatattctagcatttaaccctttagtagtaaggagtagcagcgataaaacacaaaataaccactttagaactggcagaaagtttccttacagaaactctcctattccatgactcggttgagactttctgcccttttagttgtaggacaaggccgggaacatacagcgctttgactctgcaatctaatttttcatgactcagctttgaagccagccctgctgaagggggcctggctgagtcatgctgtttgtccctgggcttgccctatttgccttggcactgtgagacgattgatttgcaaactttggggcagataaggtcacattatctttagatctacaacacagcatttcaagtgacaacaaaactgttcaaacaattggactgggaggaagagaactgactctgacactaattagctgtgtgatcttccacaacctaggaaacctctccaacctcactttcctacccagataaggagattaaacctgatttttctatgatcattgatttggatattagaggacacctgtatctagaaagtaaaatcagaaacaaatgagagtttgatataattgcttgctcataaatcttcccacgctgagtagcattttaaacgttatattttagttgcttagtgagagtgagacattttaaatctacttttagcataaacaatggaggcaacttctgtggtaaatgctaaatttcaaaattgcatccctggttgtatttttgaagctttaaaaaccccccactatttaaacaagtctgcctgactaatagctgtaaactgtaattggttatgatatatttagggaaatttttatttatcagaatctacagatacttcaggtaggtgagcagatggttagtagcaagagaagatacagatttccaat

SEQ ID NO: 38342 - DNA, 533 bp, Homo sapiens
ataggcccattttcaatgtgacatcactgctttaccctcaagggctggagtctctaatcccactctccttgaatctgggctgatcttgcatcttgctttgactaatagaatgtgcaggaagtgacactgtgcaacttttgagatgagacctcaaaaggccttccttatagcttctattttgccctttggaacgttgagagcaccagactctgaaaaaccttaggacaatgaaccacgtggggagaaaggcccaggctccctggccatcccagccatcccaggtgagccctcaaatctattagtggagccatcttagacagcccatctcccctcaaaatctgatgactgcaaccctgggagtgatgccaggtgagtccagccagggttacccagctgatcagagcccaaattgcagaatcatgagcaaataaatggtttttgttttaagccactaaatttgagaaagtttgaaatgcctgattaactgatgcagtaaataactgatataatgataacggtttctttcctttttt

SEQ ID NO: 38343 - DNA, 1308 bp, Homo sapiens
agttgttaaattttgaaatattaagaacatgttttgaaaaaaattgtgaattattacctagtgtttcatttgtatcacagagaaattaacaagtaatcattaaagctatgtaaaataatctttattaacagttaatatttcaataacaattgcatacttaagttgaatgaaaattccaagcacattataagttatacaaattattttctgaatgtaaattatagctaatattctatattttatatatctttacataaaaatatacaattttaaagtactagattttaccaaaataagttatactttgggcccctccaaatctaacaaattcagctagcttgaagatacaaatatagttaaagaattacaaaaatatgaacatcgctgccttatgagttttcttaatttacaaaatctgacttattcttttagatgtttctagacctaataaacgttccaaatttatatttcctagacagtttcattctattatgctagttcccaaatgtagtagttgcgggtgtacttggactttgtatgtttacaaagtatgtttacaaaggagtcatgttctaaatataaaacctgactcctatgtgttcaccatatccacacacagggcacaacaacaaatagttcagccagtcggatactggtatggcccagaccagagagagactctgtgggagggtttgatagtatgattagctatcagcaacgtaattcagtacttttaactccaaacaaaattttctttagtaggtttagctcatactataaacacagaaccatacaaaactctggggtgtaacctgggcatttctcatctggaccatagctgggcataatgtgggcgcagttctgtactcagaagccatttctctgattttctaagttagtataatttcctctcccttctggtgggcaagtggggatcactttgtggagttatcaaaatttttctttttatttagcattaggagaaaggtatgtttggaggtggcaaattttgtccagtgaatctcttttcatatcctgacttttgtcaaatggtcccacctaacatccgctgaaggttccatgcattcttccaactctgcctttaatcacattgttaactgtactaggaatagcttgtcatcctatcctctccacatgtgttagtgtaactcatttctagtaacttgttatttaactaatgaagccacagcattctgtctacctcatacacctggcaattcacttattttctatggcatcacttgaactgtacattactgtatggttttatattgctacttagttgct

SEQ ID NO: 38344 - DNA, 652 bp, Homo sapiens
actgtctcctgtcatatttattcctgaacatatgttcacctccttttgtcaaatttaattttaggacacagattcatggattccagtttttcacccataaagctctactggcacatttccataactgcgtagttgtacactatgcctagaattctcttgtgtcactcccagttgggcgctaaagactgcatacagagattccatagcctcaacaaatagggaacccaaaaaggttcagatttgtaatcatgtggctggcacatgaaaacacagtagtctcttttagtttaatcagaaatcataacattgaaatctgctttcgagttgcacctggaattcacactgaactttgtcctcgattcaagccactgaatgactcctagaatcaggtatgcataaaaatcactgtggtataggtatttttaatataattctctggttctgtgttatctctttaagaataacctctcctgcccccattctttttttttttttttcttttttggtctctgctgtctgcactgctgtttaatgacatgctgtgtttaattgtcatttaacaggtgggtgtatggtcttgtctcccagagttttataagctgctacagtgcaaaaagccaatatatggaggcagaatgatctggaatgaatc

SEQ ID NO: 38345 - DNA, 991 bp, Homo sapiens
aaatctgacacccaaaattatctccaagactcaagaggggctttgaaagccagttgctcagaattagccagacaaatcttttatagaccctgaagcactaaaatgaatgtggggaatgccataacaatttgaaacaaaacaatgctaagctgtaaactacaaaacatgcatgtataataaaattagataagcttatttttagaattttttttagaacttctatttttgtttccattgatctgctaatgacccaagcctatttattgtttgtcctttggcactggccctgcggagaagctgagtacactgtgcagcagaattgcacaatgagtcatcagaaacctgtgtttacacacacactcagaaagtgcaagcaagttagcactattgtctattaatatttaggagaagacacattctaattttagtgtttggttggaatgaggatcacagactcaaaagccttcggggaaagttgtatgcatgaatgcagtgggaggacagtaggtatataacacaaggactgcgtaaggatgcaataagtatcaaggattccagggaacattggccagagctgcctgctagcagctgctgctacttagctttggttgatttttgctgtttctgaatatagacttagtgcaaccagatcttccaagttttcaggagaagctgggcaccctgactttttaatgggaaatttatagattttaaaagttgactcaaattcttctaatatattacagttcaagcagaacagatgtgttatggcctacaaaccgccattttgcaattttgctttggattcatatcatgatcctcttcaatgtcacttcaactccacaaccacagaaaaaaaaacttaacctataagatgtttaaaattaccattatactttctataatacatttccatgtgtctgaaaaaatatttgtctaaaaataataggaaagtctttgaaacgatatgtgaaaaccacaaggccagggg

SEQ ID NO: 38346 - DNA, 760 bp, Homo sapiens
gaaaatcttaactttttgtgacaagagcataggatgtattctggttaagcagtgggagtatggctggagaagcagacaggagctattgcactgagttaaggaaatttatattacatcttgttagcaatcatgaaagaatgaaagattatgcaagaaaatgatgtatctgtgttttcatttagaaatgtaactattgagtcactgtggaagatgggttaaaattaaaggcaataagaggtagaagttctcctacaatagaaaataataatctagtcagtaaattgtagtctataataactacagactataataatctaggcaagagatgattaaggcctaaaataaataataaggtttgaagagagttagaatgtttagagatatttgagatgagtcaccagatctgatgacccaagatatggggtaagggtgaaaggataattcaaggatgacttcagattttgatttgggtgactagacggatgagagtcatggaacaaggtaaggaaagtagcccaaagagcacttactggggaagagagtaggcactgtcatggaggtttttgtgtgacatactagtgggacatccagaagacaaccagtaaaacacactgaataaaaccttctttcttcatgagagaatagatctattattagggagtccttcattaaaatgtcttcctgtgaaagttcaatgtttctccagctagtgctggcacaaggtaccatctcaaaaagagtgcattggattttaaaggtg

SEQ ID NO: 38347 - DNA, 3614 bp, Homo sapiens
gacagtgctgtttaatttcttaaaggaaagtgcacattctctttctattgtcgttagactagtggctctcaaagagcaggcagggactatatatccagggagtaaatgcctaggctcacatttgcatgctcactccatccatagccttgcggcttaagagggaattaaggaagagccattcttcatgtaagaaaggacacctttgtgtctcacaatcttagatgttctgagggatagtaaacattcttgaagatattactctttaattgtttatggattattcctattttactgttaaaacatgagtttttagcagagttagggaaaattttgtcaggaaacagttgttttcctcctacagactaacattcctgcaggcaatgcagcaaattaaccaatataaatgtttccttcaaaacacagaaatcttttatctatttagggacagatcacacaatataacatgctgaactatttctattaagcccaaagatgacaaaaaaattgaaaagaataaatccattataaagaattcatatctgctgctttgtgagcaatctataatacaccgtattgtgcaaactataggagatgatgacctaacaatacagaatgtagagagggcttttgacaacagaaaatcataagagagtatcatttaatggagagtgaaaaaaaatgatcctggattctttttccccctttatttgttgtatcactttgtaaaacctctctatgccttgctctcttcatcagaaaaatgagacctatggttttatttttacaaagtgctttaggatttaggagaacccagaatgtattatatgatgaaagccaccatggtgcatgtcacatgactatggcagaaaaggaaccaaaagcaaaacatgaatcagcaatgaacactcattttgtttgtttaaaaccccaggatgtgcaaatatatgtcagagctgaagttgaccctcttcctttacaatcacatattactctatcagattctggttttgaaacctgagtttggtagaaagaatatggatgcaggaaggagtaaaggacaggagtaagagggtttctctcaagcaaaccccaagtcactaggggtgtcaccaacagcttcactaacaatcccctaaaggaccagagacagagggcattattagccttgcttcttcgccttcctcaagcattcctttattcccccaaaggattatacattgacagggcaaatcaacaaagcagaagctgtctcctccaactgtccaaagttatatgggtttttagaaccataggagagtcagaattgggaataatacggaccattacattgaggggtaggtcaagatgatatattagaagctaggagttctaggctccaatgcttattccaatattaatttactgcattactttcaacaaaccaaactctctggacctctattttctcaactgacactgagggcaaggaaggtagagaattagtttaaatgatctccttttaagacctagaattctgttattctttgagtacatggttaatgacccagtggaacccaagaaccatgtcttgtggataaaaatatcaaggtaattttctaatccaactctggtatcaggatgacagaaatgaggacacaaagcctcaaagaagtaccataatcacacagctagtggcaaaatcagaatttgactttggggtttgaacataaatttggatataccccagaagatttcctgtaaattttctgacttgagaagtctaaaaccaaattcactaaaaaaaaaaaaattgagactcatgcacaatggctatatatttatgtgtgtgtatgtgtatatatatatatgtataaaaatgtacaaaatataatcaatgtataccgtatttatcaaatgaatgctattcccatctgagcctgttttcctttctgtattctctatttttggttagtgtcaccccagaggcatagtttccagaaatagaaggcctgttatcagtccctctcattcatcccactctgaaccactctgcattcacacagactcaccaatacaactgatttcatctctgacttctttcgccattctacattctttctttatccccaacatgtttgtatcatttaggtcttcatctattgcttcacctgttctctcctaactggcctaactggtttcctttcttctgaatcccttttccatactatccccacaaaaaaaaaaaaaaaacttttctaaaataaaaatgtaaacatatctttgacctgcttgaaatctgtcaacattcattagtttacccacaggaggaagtctaagcttcctagtgggaaaaattaaaccccttctgtccaaggcctgcatttccagctccattccctccattcccacttaacatcccatgtttctgtaagaacaaatgtttgcagttattcctcaagtactgcataccactgtgccttggcatatgctagtatctcagtctggaagtccctaatcctttcccattgtttacttgaaaaatcttattcgtcttttaaaacccaaataattcattcctctactgggcttcatccaactctacattccccttgggattaatcatatcctgttctaggcagcttctgtactttggacagggttccactgctgcgttcttcacactgtgctgtaactgtttatttgtatgccttcctccctcacaagactctgaaaccttgagggcaggaactgcatcttcatcatctctgcatccctagcgcagagcctggaatatagatatgtgtgtacgtctttgaataagtaaataaacaagcaaacattcattcactcaacacctgttttattcaatgtctcacagagttcaaggaaagagaacacccctacctccaacccccccccccaaaaaaccctccacaagtaacaaacaagaaaaatatctgatagggatatgagctacctggatacttaaattggtataatagaatggagaatgactgggtgtctatagtggttcacattagcagaaaagtcatcttccaacccatgaatgacaaagactgtctcacattgggacccaaacaaatagtatttaaagacaccatggggctaaaggaaagcacctagggagagcatgtagattaaaaaagaagggtcaagccctgggagcccctataacataaagttcaaactgaagaagaaccagtaaaggataccaagaagaaaaccaggagactgtgatcacccaaactaagagaagaaactatttgaagaaggagacagtggtcaactttgttggaccctggtagaagctcaaataagataaaatattcaatttgccacatgcaggacagtgagtggtgagctggataaaggctttaggagttgagataggaatgaaagcctgatttgaattgaattccatctcttcataagaaatcatgaaagtatattacatggtaataaaacacattttccccctctctgtccagttaaagcaaagttttaaataggtaaaacttataagagatgtagtaggccaggcgcagtggctcacgcctgtaatcccagcactttgggaggctgaggcgggcagatcacgaggtcaggagattgag

SEQ ID NO: 38348 - DNA, 939 bp, Homo sapiens
aaattaatttgatgtcatcaggataactgaatcttggccacctcacatattgttattttgatagaatagttagaaaattaaagggggaaaacaccaaagaaaacatacttgttatatagacacctgcacactacgctgtgtttattgttcctactatcaataagaatgatgtctgtgatagctgaccctaaccagtgccttaattaactagtattaaatgtaattaagactgttccaattaaattttaatttttaaaaattaagtacaaactcagtcattcaataaaatgttgtagtcctttggtgtgtttctaggcgcagaatatagcaatttactattgacaagcactaacggaggaggtcatttcacaagtataatgtggacaaaggtgaaccgggcaactgatgaaatctgtggccaaggcgaaatagcaatctctaagccaaatggtaataaagttactgaaatgaagcaatgtagtttctaaactgaactgtcataaaagaggatatgggcttccaactggcatgtcagtagtaattaaaatattgtttctgtcttttaaaaagtttcaaatgcttataatagtcttatcgatttttattcaaacagctaaaagtgaggttaggagaatcctgctagatgggggcaggagtggacggtgctgaggtttggagggaggaaaggcaaaatctgtaaggggagaaaaagaaaaacaaggtagacacaggagtctagaattgcttccacaaacaaaatactatactaccccaagtaaggaagttaaaggaattcagaagttacatatgatattaatgcttaagaagtaatggttgcatatagactattgttcattgttcacaacgatatagaaagtttctgtgagataagatgacaaaagtaaagttctcaaaatagattcttcctgaagagtctaa

SEQ ID NO: 38349 - DNA, 2558 bp, Homo sapiens
ctgcaatatacaaacaagtgatagcaaaagaaaaaaaagcatggtgacattaaacatatattttttaaaaaaaggaattctatatcatgagcaactgcttgccaggcagtcttcaatggttttatcatgctatttcatttgtctttcctatttagatgcaaaggaagtaaattccaaaactgacataccataaacactggtgctactgatcatttcttgctggcagcacaaaaagctgaattggatttctcacaagcaggaattccaaaggttgcttttcattaaagccacttttcctctcagctatcaaatgtcactgccttgaaacgtgggccctttcgtcaggtattcatttaacctacatgcatataattaagggggaaagcaacatcaacaaaaaggggatctcagatcacaggagaagaaagaaaggaaaaaaagcacatgaccaggaatgcaagtccatgtcaatttcactcactcccattgaaactaacaagagctccggggaggacggtaataggatcagtggattgtatataccattaaattatacatctttctctcccgttccttgccaacaatacgcccaccacgctgtaccccctcctagatgatgtgcttacatttttctgcaaccgatcttctgacattttctcgttcccccagccacgagattgtaatttaacctcaactttttgtgtgtgtgcaagattcttatttacacttcttatttacttagaagttagttcccgaagaaagtctagccccaccctatggctccgctttcttatttttttatttttgaagtaaaaagatagtaataagtaagcccaatatagcgaaaagcgagattcttgcaatcgcgaactcttaatcccatactattgttacaatgattaagcagcaaaaatatgcattataatgtttcagggctactttgaacagagaaattagacagcaggttggcgtacagaatagaaacgagtggaaattgaatttaatgtttacggcacaactgaagatctcttttaattacaggtcttggatgtatttatattctttaaaaataaaacaaaaacaaatttaaacagatggtagaaaactacgaagctcctcttacctgaacgcgcggagagagaacccgataggttagcgtagcatcgatccgatgtgtttgctgatgaatggaagctagggttaagtgaaggtgcctatgatttgaaatcattccaagtttttgaagggaagacggactgcagcctctgccatgttggaatttcaaacccaaaacagctgcttggaaggagccagcatgccagaggctgggcgcaggcgcagagcgccgcagagccaaattcaaatcactttcacactaagagccaaagatcagttttcaaaggagagagggagaaagagacggaggctgccgtgagggagagaagacgggaggcagtggcgagaggcgggcagtggagagagacgggcagcgggaggaccaggagggagagggagaggcgcacggagcccgcggagctggagggggagaaagggaggcgggaggcgagccggcgagcgagctagagacgcgccagagattcatgggcagggagggctcaatggccgcgccgcgccggccggccggccgctcgggtcatgttacacggccggggccgcggcggccgcccagcctcgccgatgcgctcacgcggcccggagggggccccgaggtcatgattacgcgcgcggggactcgcagctctccctgcacgcactctctggcggcccagcctggggaaaggggagcagcgccgtagggggaagggggctttctttcccacgcgtgaccagccggcccctgcgctccccggcctgcgttggagggcccgggacagagccgcgctgctccccggcccgcgggctcttccctgccggttcccggccctctcgacagctgcggcccgtccgcccttccccaccccctctgcgcacgggacgggatctggtctcgagagcctggacctcaccggcaccctccccggggcccccagcaccagccagaaaacgacttgatctgcttagaagaggcaacttcggggagaaaattcgcgttcgcccagttcccctcccccgcctccctgtgaataaataaaatcctaagtgtctaggtgtgcggtcccctctcgcgctccctggctcccctccctacctcccccaggcggctcgggctggagaaagcagcgcccggggggccctggtgtcggcggctggtgcgcaggcatagacgttaggcttctgccttcccaacccccctctatggagtaatctggggacccaggagtgggaagagagtaggggctttgtggtgctgggagccgaggaagaatgaaatgtgcagttgagtgtgttgctcgcatcccagggagcaatgcagtgctgattgtctgttgctgagatagccttttgttcggaacataaggtttaagaaacacacacacgttttctggggtctcttgttagatgtaaatgtgcggcatccagacgcttactatgcagtg

SEQ ID NO: 38350 - DNA, 1294 bp, Homo sapiens
ggccaattagatcatcataaagtgaacctgatttgctcttaagtttatcagatttaaccaaagatttaaaacaaagttattaagaaatgtttagattagcatagtatgttgcagccaaaattcataagaaaagtgaaaaataaaatatctaggtgtttcaaaatatctaaattttttgcattttgttttaatatttgttgacatttgacataatctgtacatactactccactaagagcaaaataagaagtatcacatgggtaaaattagacatttcattttatggaaggattttatagctgtctaatattcctcatttaaatgagaaaacttgtcatactatacacttcttgccattgtcagatatcaaataactgcccaaagccatactagccactgtagtctggactatgataaatctatgcagttgtaataaagtgtaattaatgttaaacttgaattgaatttattttcatataatctatatcaatgatctttgggggtaagatgtatagtatttgaatacttactttgagcactgggtactcaatagggcagagaaaaggtatttattccacccttaaacagcatttctatgcttgtgccagttgtcatttttatcgcacaaaattttagtattaggaatgagatgtaacttttgtcattattttatctgtcatatgataaatttcaaatgttcttaacttcaaaccctgttggaaactctcagtaaactatagcaaaagccatttacctgggtgttttttaaagggaaaagaaagagaagttcaacagcatattcgactaaaaagtttaataacaccatgatctaataggaaaccaacaggttacactgggccaacgacatatttgaaagtacaagtaagaaaaatgagtcaggcctagataatgtgcagtagcagatctcttggacaactacacttggattaccatgcttcagtgttcatgactaaagccttcagttccaaattgtgtaatcccacaccatattttcctagccctctccatttttctggacatggaatatatcatttctgacccttccccagagccccctccaataactcctccttttcatcacaattaatgtccacaattaatgtccacatcagaagttttaagatttcaagttttaggtcagaaagaagaattatttcagctaaagaatttttaaaaagtttctttctagagagatgctccagaggcaccatctaaaatcaagcaactggaaatgcaatcttagatgcatcattagaacaaatatagctcctat

SEQ ID NO: 38351 - DNA, 555 bp, Homo sapiens
taaccactaatttctattatattactgaggaataggattgtggcaaagggatgggagtagctgttgaaaggtttttactttttacttcgaactgtgcaataaaaaatgttaaagtaacataagctcaattttttgttcataaaaagctaatttggaaaaaatccatatgttccgttaaagcatattctgtacatgtgagtaacagtgctgcggccttgacttcgctcaataaatatttgcttgattgagtaaacaaatgcatgaatgactttttaattcctacaaattataaaggaaaggaacaaaaatgaaactgtttcatggaattctgaaaaagattacagtagctgaaaacaaagaacgtggcctaggtaaagtgtcccagagatcagagaaagcctggactccttccaaagtcagaccaggaatgccaaaacacctgcagggcaagaacaggtcagagtttaggcttgaagccaagaggctctaggcaggagcagagcctcagttgggcagtggccacaggcaagaccctggggcttacaggtaaagttg

SEQ ID NO: 38352 - DNA, 698 bp, Homo sapiens
aatattagattattcattaattattgaactcctaggcactaagtattattggtaatacaaagcaaatctaacaatgtgagatcttatcctgttcccaaagaatttgtagtctatgtggaggagaggatgagacaaatgcacccaagattgttaagtactacattgcatgaaacacagcactgagagccattcagcatgcagtggccagccaaactagttttttaagacattgagcaactttcccccatagtgaactttcctggcacctgtcctctttcttgggagcccaggaaatccccatattccagcaattgaatgagtaagggctggcaaacaagggcctgtagaaccctgtccttgcagtagagccagtgttcattcttgattgtatgggtttcctgccatctcaattgctgaatattttgaatatcacccttggaagtgcatattataaagactatattataaagattatctgaataaagtcttagaaaatcaggtaaaacaaatgactcaggaagtaggggtcatgttaatttctttcggtaaaagtgattattaattgtagattaatcacatattaataacagatagctaagtgcacctaaatttgatattgtaatatttggagtatagcatgcaactgctcagtacacaatggattgctagtctagccctgactttgctgttgttggggc

SEQ ID NO: 38353 - DNA, 902 bp, Homo sapiens
cagggcccccagaagacagccaaaaaactgtgagtacccaaagtgtgaaaagggggatcgtccacccctgaacacacaccctcactgcggaacctgaaggtccagatcacaggagaaggatttgacattacctacagctgagacaaatttagagttgagtgaaatacagggtagaaaaagcagcaggaagagcctgtgggcactctcggtccctggggaagccttttctgactgtctcacaggggtccctggggagggctgccagaggaacttggaaaagaccacagagagaaggaaaattccagctgaactttgtaacaatttcaactgactcattgtttcctagacagaacctgggggagggggtgaatcaggagtgcaaacacagtacagaagccttggcaggtagggaggtgcaaaacctgaaatccctgcttgcctcctcagttgggaggctggttgcctgaggcaagttctcagccctgttcacctgctgcctggaaaaatactcagtgctgttggcggggcatggagtgagctaaactgaacttctgggctgcacaggagctgcgtgaggcctgtaactgccgattttccaccacttctctggtaacctgtatgatgcagcagaggcagccataatccccctgggaacataactccattggcctgagaacaacacttccatcccctacagcagccgcagcaagccctgcccaaggagagtctgagctcagacatgcctaaccctgtcccacctgatggtctttctctacctgccctggtagccaaagacaaaggacataatcttttgggtgctccagggcaccatccaccacctgatcctccttgtactactgcagctgatatgctcttgacagtgccaactccgggctgcaggc

SEQ ID NO: 38354 - DNA, 837 bp, Homo sapiens
caaaaggcctcaagaaagataaagaactcatgttggcaaaattatcatatagctgttccaatgccaaataaaatattctcagtaaataaatggttgactggataagaaaataagctgaaaatctaaaaattaaaaatagtaaagaggcacttcgtttttaaaaactatagccactttaactgttagatttgccatgtttcaaataaattgcaacatgacctttgacttaatggaatgcactgatagttaacagttaactattaaaagttgagttcaaaaataaacactacagtttctagtgtcaccaaaaccatttggtaagcatattgccaaaactgagttttagtgccttccttctcaatgcgacagatttgattctttaagaagtccagtgcaatgttcttattttggagagttacaagaaaagtttactatgactacatgacatggttgcatataccaccttgtaaaatgcaatgctgtaagtgagacataaaaataatctttacaaaaaactaataaataaaatattttcatacacaggattgactgcattaataattaacagaaagccctttcacaggggaatttaatggaaagtttttcttaagcaaatacgcagaagctcaatagaaatgggtagaaacctgagaataaactggtaacacatgtttaaacagtaaaataattgtatagtctattcaacaatgaagagattgatatattatgaattatggtgaaacaaagaaactattccttagtaaacaaatataagacataacagcagatttcctactgagctaaaaacaaagaggcttgaagttacagtagaaagaa

SEQ ID NO: 38355 - DNA, 2572 bp, Homo sapiens
cagggtcgctgtaagactctatgtgggaggtgaatacatttatgctacgatttttttaaaatatataaaataaaatagagtttactttgtgaaaatgcatggccacgaaggaacagaaggtgatcagcctgcagcctgagctcctagtttcaccaccgatgggcagaggcgagagagatgagagctctcaatgaaacggtgatgctatttataaggcgctgtgagatcgcaatgtcctgctgatccggtaggagccagctcaaaggggattgtcttcagagacttttacaaacttggcccagctctgggcacatggctcaccccctaggaccgcctcctcaccccctcgccggctgcccagccaggacactcccccgcgccctccagggttgcctacctgtctgcagcacagccgcgggtcccgtccggaaggggcaggagcgctcgcgcgtgcagccagggggccggcgccaggtcgtgggcgtcgcccctcccctgggcagcgccacacacctgggcggccagcggcgaatcccgggcagccgccctgctcgcggcgctctgcccatcttgcagggaagtggtcattgtcgccggccggggggctcgggcgtcatgggagactcggcgcgtggggagaaggggtttgcgcggcgggaggcgaggtgccggctaggcagcccgagcgctctgcaggtgtggtggcctcgccgcctgcgctcggggccccggcggctgagacgcgcggccgagctatctgcgaggcggcgggggaggggagggggcggaggaggagggtggggagaggggaggagcggccggtgggtgggggccgcgggcggcgaggcaaggcgcggagggggcggggagggcgcgagagcggctggccggccccgcgcgtggcccggggcgctcggggccactggcattgctcccgcgccgtcccatccgggacgcgaggccgggaccgctgcctcctcaggtgggcaccggggcgcgaggctgagcccagggtctgggcggccccggcgccgctggaggcggggacccagccgagcgggcgctcccgctgggcttgccgggaggaccgcaggcgggataggggtccgcgcagccctgaccctcatacccttgcattctttctgctctgccatctgagatcacctaagctgttgctgggccgccatgacagtccccaccgggccaggaggccaggacaccagagggtttgccccagtccttccccacgtgcctcttcttccatccactccgcagccaaagattggggggttgatagggagcaaggagtccaatcattatagaaaactactgagattttgagaattctcagtaaagcatgagtaaacctgaaggtgtctggaattagaaagactattagttttatggtaatgagagaagcttacattaatgaattccaggttgccttacgctacctattccatcctctcaacagctccataaattagatgtttatctcattttacacaaaaggaaactggggctcaaagccatcgagtaccttgcactagtaacatagcactagtagctggtggagtcaatattccaacccagaagcttccttctcaaaaacccagactgttcgaaatagtaatgacattattatgctcaccctctgagatgcagcaaccctactctgaaatgctgggtgatcctgtttctgctcttccagtaagtgtgcccgtccctatgcaccgttgaggatttccaaatgtttcacagggtctttgttctttgaccaaattaggtaatatctgtccctggcatctgctttaccaggttttcttaatttcaacaacctctgcccagggaaaggtaaacactgcctccagaagaaagcagcagctcccctcccccatctcagtgcattctctcccaccgaggcaccgaccactggagaacccaggggtcactaattcccaacctgtgaggaaacctggggcactccgtgaagacagaaaatccttgagtcacagttcagggaatccaagttctttattttcctaatgtcaaaattaaggcccagaagtgacctgggtcacagcgggtgtgatctctgggatcttttataccaggggtccccaacccctgggccctggaccacaccataccagtccatggactgtgagaaaccaggccgcacagcaggaggtgagcggctggtgaaccagcattaccgcaagagctctgtcccctgtcagatcagctgggcattagattctcataagagagcgaaccctattggtgaactatgcctgccagggatctaggttgctccttatgagaatctaacaaatgcctgatgatctgaggtgcaacagtttcatcccgaaaccatcacccccaccccatccgtggaaaaattttcttccatgaagccggtccctggtgccaaaaaggttggggacactgcagtttatacaatactttggctaagctaggacaaaatggtgattctctttctcaggaagaaaataataatactaatcatggtgataactaacatttattgacacatgtgccagacaaagcc

SEQ ID NO: 38356 - DNA, 1207 bp, Homo sapiens
ggcccaagtttggagaacagaaaagcttttgcaatgataactatgaagcaaggtctcaaagaatgagtagaatttaatatgacaaattatgtagaataggatgttctaggcagaagaagagagctgcatgtgtaaagccctaagccaagagaaaggatgaaagtttcaagataactacaagtagttcagtaagggtggagcagagctttgctggtgcaagggaaagaatggtatggagaatgataagttaaagccagacaagaaagcagggtcaagatcatgaggggtgctgaatgtcccacaaaggaatttgggcatcattttaaataataagagtaatatgtaatgcatttctagtgcttactgtaggccctgcattgttcaaaactcatctcacttagttttcacaaccaccatatgctccaggtactcttactactcccaatttttcaataataaaacatactctgagagccactgcaagtgaaatcttctctgaagatttgagcttcgtttggcattggctgccaaaagatgaagccagggagattccctgtaggtattttccttgggaaccatcacagatccactgtgaagaggaaagccagccagttctggagtgtcatcaccttttgctccaagaatatttgcaatctttcccaaaggagggagaaaagattctgtattggcttaaaagattctgtattggcttaaaaaggctgaatcattctcagaggtgagatctaggctactgaaggaatgactcagaggaggtgaattaaacagaaagttcccaaatttcctcatagtaaaccttggaacctagtctctcatgaaagggtttctgtaccaagaacctacatccttgggaaaggtgtttcctgagtttgctgtctgctagtttatacactctctctagacaatcaatctgtgctgtagttcagaaagcaaaatgagatgatgtaaaaaaaaaattctcacatttctgctcacacaatggaaaattagatgcagaagcactacatttaaccaactttgttcaacaatctttagttacacctgttttatacacacacacaaaacaagtcattggaacatcaaaatgttagcccacttggttcattaggagtttcatgatattcgtgcagtgggtactgccaagtcctgggcatatggctccaccatgtggatgagactctgcaaataa

SEQ ID NO: 38357 - DNA, 1384 bp, Homo sapiens
ggttcaaatccctgactctgacccagtgagattcaaactgaaggcaaaggaagtgaagtagaggaggagactcacaaagttccattgaggcctcagctgaaaaacaagcccagtagtacactacctatgttccttttggtgtattatactcatactgtgttgctttgttattaatggtttctgtcaatttgtaatcaagagttgactggtacagtttcctaattggttgttgactcatttttctggaaaatgatacaaaaagcagcagacatctaattttaagttcatatgtaactggaatcatatgaatttgcatccattttaactaaattacattacatacagcaatcatagctcttgaataatactacattttaggtaagtgtgcatataaaacattacaaaatgggtttgattgaaacatttaatcaaatagtgatttaaaccctaatgggactctcatttcctggattttatagttatagagactgtacctgtgaagttattgattttagatagtatttttctgattcaaaacatttatgtctcagcttaacataaaatctttcatgtgccaaacataaaaattacatttcaactagtttctaccgtgaaattgaactcctttcttaaatattctttataataaaagtaatggagtttgggaggagaacattactctttagtatattacattcagtaccttattattgggggaaagagtgtcaaagtttaagaattaatcatttttggagactctataactcattatgatatttatatattaagaaataaatactgtgagtttaaaaaaatgataaccagctatgggatggaaataagcattttatattaaaattatttgccacatgacaggaaaatgaatccttgaaggatacaagctttggctcatacaaagaagaaactataatgatttggggttgaagtctttcacaataaattgatagttatgtaagaatagtattttactttgtttatagagcaatttatcatagaaaagtgtttaattaagactgtaaaatgatttaccactgacattttaagcatttccaaacatttccacataaattaaacatgatgtaatttagtggtggattaagcaatgttccactgttgattcatgtggaaatcacagaagttcactgattactatctttccagtgtgtattaatgtagatgtcataggtattttcatgagaatcacacttcaatgtgccattttaaatattgaaatagagttttcaaaatgtcataatcttttgcagatccataaactgtttggaatttaatttataagtaagtactatagtattaggattacttcaagtaaagccatatatttaacttaaggcatatttaatta

SEQ ID NO: 38358 - DNA, 866 bp, Homo sapiens
atcaccactctcttcactacaatagcttaatttcagatgaatatgagttcagagttaagtagcacacaaacatcaacatgcttgttaacccccattaaaccatgtcattaaatttgaatacttatttttaaaaaggctacagttaccttatcagacacaccaagctgtgggatgtccacaaatttatttacagaatgagtcttcccttcctctgtgttggctggaggttggaccaatgcactggcactaggtgactcggtgcgctctttactgaaagactgtgaccttttcactacagcaagagcaaacggtgaaggaccagaacttgagtatggtcgtggggcaccaaaagttttcaaagtcttcagattttgtgtggatacctgactagcaggaattgtcacaggttttggagctatgggaggaggggaggcttcagcaggagcctgaccgatgacatcatcatcagttttttcaacaaggggttgtggaacagagtgaggcattttacttaagggagaaagagtctgctccggagaaggcagcatatccctttctgcctctttatttgtcagttcttttggagcaggattaggggcagcatggacactcttggcagctgcagatgtcacatagtgacccgatactctcttctgcatctgcaaaaaaaaagagctgggtttggcctgggcatttgaagcccgagatttaaattttgattccaaaatattgtttatttcttccaaatttggtgcaaaaggagctgtgccagtgtctcttgtcattttgggagcaggtttcagaggactaaccatggcatcatcaggtgagctcacagaactgggcacttgatgctctgttctcag

SEQ ID NO: 38359 - DNA, 1951 bp, Homo sapiens
agcattctttttttttttttttggagacggagtttcgctctgttgcccaggctggagtacagtggtgcgatctcagctcactgcaacctccgcctcccgggttcaagcagttctctgactcagcctcccgagtagctgggattacaggcagccaccaccatgcctggctaattttttgtatttttagtagagatggggtttcaccatcttggccaggctgatcttgaactcctgaccttgtgatccacctgcctcggcctcccaaagtgctgagattatacgcgtgagccactgtgcccggccagcagcagcattcttaagctgtattttcttctgtgcactttaggagtatgctccaaagagtctcccaatagttctgctcttgcattcatcagagctaaactacccactatttctgaatctgaatttgtctagttggagagaggcttacagagagtttgcaaggtagaaggcgacccactacaatgattcccaaagaaatgggttttggagtcaatacaagcggttgaaccaggaaacatgccatttattgtctctgtgaccttcggcctcctcattcatgaaaaggaaaagtactagcacctatgtcaaaaggggctgggatacttaaatgaaatattatatgtaaaatacatagcacagtgcctagcatacaatacatgcttcataaccatcagctgatattattacatgcaatttgtctgttttaaagtacatgaaagtgttctgcaaataaaataagaattatagttatacagatgttggagtaaaaagcataggtaaaaggaggtatttaagattgtactctctggtgactgtgttggtaagagtcctattggaatcagtctcagtaataattaaccttaaaactcaacagtgcccaatgttcaggaaccaatgcttagtctactgtataaacattcattgtgggtctaaaaatctccacctttgagtcaactcaggtctcttcaacatactttaaaggactttaataaaagttaaatatttaacactactttgttgaatcagtgatgaattcatggatatgtattatagtacatacatttgaaatgtctcataagcaaatttaatgtgaaaaattaaagaaccatttataactgtcttcagcttttactaccaacaaacatttactttgttcaaattatgactacattttaaaaagtggtagagattaaaatttattaagtctaaaggctttacaaaatgagaaaacacagaggtttctacttactaggggaaactgctttggttaatcattagagatgttcaattatttactttagttagagtcactgataagtctgcttgccattaatgaaaactgcacttctaacaggaatgcacatcactgaattttatggtctgtaaaaaggaaaataccacaaggagaaacagaatctactaatgaaagtggcaaggtcaggttgaaaaccatgccagattgttaatcccccagaattcacacccagatcagaatttcctgattcaaaatccaactaaatttagctgaagaaaatagaatcaaacggcattcaagagatttactgaatacttgctctgtactagttattagatcacttattaatcatagttgaattataaaaagtgggtcattgaaattgacgtatcctggattaaagagttaaatgaaagaatacatatggaaaataaaaacactcaggggatagaaacatagaggctcaacttcaataatgttaaatgtttctaatagaatctgttggttctgtttatgattttcacaggtggaaaagggtggggttagtggagagaatgtaaacaatcccttgaaattgtcttaaaactcatgttttgtttttcaagggacagactcacattattcttctccaacctggacattcacaataaacactattaaatagtataaaat

SEQ ID NO: 38360 - DNA, 733 bp, Homo sapiens
aaacagttttgtgaaacaatgggtcagcagcagctgtgacactcaagacatccctaatcacactattaagatatcccaagtcacacttttaagatatatcaagtcaaactctaaaacatcttggatcgcattaagatatcccagaatcacactcctaagatattcagaatcacacaactactttaaatcacaaacacttaaaatagaaaattagtcatagcatcaatgagtcatgcctgaattataaaactactgcgaacaaagtccctaaatgaaaccccatagtaaaaacactgatatacatgctgggcaacatggggaaatcccatctctacaaaaaatacaagaattagctgggcatggtagcacacgcctgtggtcctagctacttgggaggctggggtgggaagattgcttgagtctgggaggcagaagctgcagtgagtccagctcttaccactgcactccagcctgtgtgactgaaaccccatctaaacaaacaaacaaacaaaaacactgatataaattctactctcagaaaaactcttcagccctaaacaaaatttaaaaaggaatcagaatttggggcattccattcctaccttgctctctgcctggagaaaatatctttacttaaaagattctgggtaaacaactaggactcattccaagtgcttcttcataccatttatgttgctacctccatctacacataagggtttaggaagacaat

SEQ ID NO: 38361 - DNA, 510 bp, Homo sapiens
tgaggttcacccgtgttgtagcatatatccatacttagttactttttattccctaatagaatgccattgcatgaatagacattttatttacccattcaccaattaatgtatgtttgagttgcttccactatttggctattatgaataatgctgctatgaacactcacatacaaatctttgcatatacccttttttgtatgtgatatggtttggttccctgtccccgttccaatctcatgttgaatttgtaatccccaatgttggagatggagccagatgggaggtgactgaatcatgggggtggatttccccttagtgccattcttgcaatagtgagttcttgtgaaatctggtcatttaaaagtgtgtggcacctcttcccttttgctcttcctcctgctccagcaatgtgaagtgctggctcccccttgccttctgccatgattataagtttcctgaggcttccctagaatctgagcagatgccagaatcatgcttcctctacagcct

SEQ ID NO: 38362 - DNA, 496 bp, Homo sapiens
gtttaagaaaatgcctggcctttattactacttcttcttaattttgtgagtttcacttgctcctttaataaaattactaatgttttaataaaaaattcttcagtagagctcctcatccctaaattaactgttaattatgttttttaaatcacctaactgaaaaattagtctaacaaaccgaatagaaaagcattattttatatcaactgagcaagaaagatcaaaccagtttctttccattattttgcaatcggtgacatcatattattcacattaaaaaaagaaaaagcagattagtagatgccaggggctgaggaagaaagggaatggggagggactgctttatgagtacaggcttcctttaggaactgttctgggctaggatagtggtgatggttgcacaacactgtacatgtactaactgttactgtgtcttacacattaaaatgattaaaatggtaaattctatcttgtgtattttaccacaattttaata

SEQ ID NO: 38363 - DNA, 485 bp, Homo sapiens
tttaaaaaaaactatccaaaacaaaagttacttgaaaagaagtataagaaaaataacaaaatatatgaaaggcatgttgaaatatatgaaaataaatacatgaagcatgcttcaagcactaatttgtcaaaacattcttactgactttgaacagaaattgcttaacttcaagtgacatgttactcaactgaggaataaacaaaacctagagttagtcaaataagcaaatggtggccaaaacttgcataatagatataatccacttgaaagaaagccccaggaacaacagaagagcatttctgattacagaagtattgaattagtgatgcaattcattgcataaagaacaagataagtgaaataacagtcattgacaactgggagttcaaaagaagagtcagttctgaatctgaacaagtttaagacacaccttaaaactattttgtttacatgtttcttctcatgattttacaggatatgatgaa

SEQ ID NO: 38364 - DNA, 3729 bp, Homo sapiens
atgacaggcattcggaatatgccaaaggacaagttagacaagtgaaataagacaaatgaagtagagaggtaattttttcatgttgatatttttcaggtaatgataacttctctgagtagaataatgtaaggcaaaatgatagaactactgtgttattttagataaggtgttgacagattttccctacttaaatttgaaaaggggacggcaaaagtcctttacaaatgcttgacaaattagataaggctcttttgtactttctttttaagcaaagaacttatcagtttaacctttaaattctcaaaagtggctgggcgcactggctcatactggtaaacccaacactttgggaagccaaggtgagaggattgcttgaagcctggggtttcggatcaactaggcaacatagcaagaccttgtctctacattaaaataaaatatcaagagtaaagtctgaaggttcttactacagttatgcttgccagcaaaaagtgttcttctgtttcttcaacacagagccatctgacctcacctattttacttaaaagtccccagtgacttctgaacacccatgggtgtattttgtgaaagcaggtatgtttttctttcttttttgttttttaaagtaccttaacctaatccatttccaaatccaatttaattctatctcattttgcaatccctgaatacatttcggtatcctgacagctgtctcatcgtcaattcacataattttgcagctccacttaggaaccttgcttgtatgctcaatatctttctaccgatatatttctttactcatcctaatgtgagaatatatgtcaggatatatgaaaatatttaagcaatgaaaaacctggggaaagaaaagaaatgaaagtcaacagtgggagtaatatttgcagaaaggagaaagttaatttgagcaaaatgaaataattaatacactacatgtttcctctatgtaaaaattatactaaatatcttttagattagtcatgttgctttgagacttttccatgtttcctctagacagctgccaatgttcgcatggtctctgatgaataaacatgctgtgacttgcttctaaggaaacgcctgtcatgttccagggaaaaatgacttctacactcttaaatcaggaaaactgtacaagtctcattcattagtgacaacgtcgatttttccttaacgtttctatttctggaatgctcgtattctcattagggcatttctgcattcagattaactaagaaaataaactatgttggaggaacacttatgctggggggaaaaatcttgtactacatcaaacgagtttcctacttgagaaactcaactagcatccaggttactcctgaactatttactaagaccaaggttattttcaggttttcttcatctcttgcagaactacctgttctcattactgtttactcaaacgcttaacaaggtaactattagcatatctggcaggaagacatgcctcatttaatattaactcaccatgtgacagcccccttcctctcttctcaaacatgtgaggataaaaagaaaagtagagttgtttgcaatctgatttgcgctgggttttggaaccagcaattggccacaggcacacacacccccaatcagaggcgcgcaccccgctcgctcccggaactgtcatgcgggctgacagctggcacaccctcctgtcgccctccacccgcctgcagaaagcccactccctacagtcaccttgacattgctcacctgcctgggcctcagcccatgaccaaggaaacttttgccctccctccccaggagctcacttacaggtatcgtccaccgctcccccagagcccaaacaagggtccctttgttacaatttttgctcccggactcctcacccaattcctggcattcagctggcctgtagcaacccagggcagccccggtaggaaggcaaccaaaaacgacccgagccctccgcccgggcggcctccgagaaggccgggaggaagcagcctccccggccgcgtggaggacagtcagtgagtcaggccgccggcagggcagcgagttgccagccaggtgaaacggccgaggcctcgctgtcctcgccggcctcgccctccccggtgagaggcggcgcggcgctctgggcttacctggctggggcgtcctgcgggcgcggggttcggccgtccatcgccctgcggggcgctgcgcgggctccagctcccaggcggcgcgtcactgctggggtgggagaggccggcgggtcagggcgggacgcgcgccttcccgaggccggagcgaagctggctgagcgtcaagagcccgcccgagccgctccagccccggccggcccgcctcccgggtgcgcttccacctgcgggccccggctcccagcccgcgggcgccgccgccgtctctacaaggtctagcgggcgcccagagcacggcggaggaggcggtggcgctgcagcccccgccccgtggggtttactgggtagccatttggcgcctctcggagggagaggagccgccggggctggaaaaggaggaggagcggggccgggcgcacgggcaccgctgccacgccggcagcgcactcccaggctcctccggccgagtttgcacaaacaaaacgccctaggaaaacttttcccgaagagaagttgggagggctgatctctcttttcccacccaaggctcctacgttcttttccaaaggagacagtagctcgcctgttctccctcgcggcttcctctcctactcttcccttccccggcccgcgctcttgccgctcggctctcaagccaggacttgaatggagaagcggcaacccctgcgaggctcagcccagcgcgggcagggccgactcagcacctcccctgtcccgcgggcggggtgcgggcgctggctgggcgctgggggcctcgctggagcccgctctctcactcaccctgccccatttccctgcccggagtccgggagctcgccgccgcctctgcagcacggccgcacataagtggggaccagctcggcggcattggagcgagggaagcagcgagccggagagaggaacggggcgggggtgggccgggagcaagttggaatttccttcccccagggcttcgggtctttggggtccggctggggaagctgaaccgaaagaaagctcccagacgaggtgttcccattcccaccgctaggctgcgcttcgggaaggctggtgcgcctgaaccggacaggtgcgggggaagggaggttacctgccttgccaggatccgcggggaggattggggcctccgcggaatgcggtcagaaactcgcagagtggggcctgcagcttgccccccctagagtccgaccctcgacgtccaggatcgtttttttaaatttgtgtttttaacttgacctttaagattgccattcttttaaaagcgcacctgtgacacagatctttctaattggtggcaggtttaagcttgccctgtcttcagaggcattttttgtaaaagcctataacagctctgacatgagaactggacaacagtatgtctaatgacagtctataaactaagaattaagtaatagattgtattcacttattggaacttttacaagggtaaaggaatcagacacagctgtgtgcttgtttgtacgttttagtatccacgtgcatgccctttagatgattctttacacctgacagacaggtactaggttggtgcaaa

SEQ ID NO: 38365 - DNA, 677 bp, Homo sapiens
cccgccatcatgcctagctaatttttgtatttttgtaaaaacaaggtttcatcatgttggccaggctggtcttgaactcctgacctcaggtgatccgcccacctcggccttccaaagtgctgggattacagacgtgagccaccgcacccagccttattattaacttccaactgagatagacttttgtaatatattctgattttgaacaacctacagtagacatttgtaaaatatattgttaatttaaatttttttttaaaaaatgaaactttccaaatgtgctccatgggagttaggctgatacaactagaaactacagaatgatttggccttggatttcactcattaagagagagctgccaacttgtcctcaccaacagggcagtgagtttgcttcacttttgtttggctatcagtacagaagtcaaggctgtctgtagtctttgtacaactcaggatagttctttcatttgaggacaaggctgtcatctgattctttcctggaatctggaggtgataaaatagatatggactaacaagaaagcaagtaatgaaaagaaattgagaaatgcattttaatgatgattcttatagactaattcatagttattgttagttggcatatagacctttttggctggctaaatgatagatgtgataaactttaaattttttct

SEQ ID NO: 38366 - DNA, 800 bp, Homo sapiens
ggtttttactggataggtgtagccaggtgtgtttggagtgctgttgataccctgatgaggctggccagtcatttatttacccacccatctcctcttggagggacattgtctttacctctcttatacttaggccttgggcaagatctataactgagtcagaaaagtcatcctgaaattatagtacaccttttgtttatgagaagagcattggccctttggcagcagagagctccaggcttatgttagactcagttcacccctggagaccccctgagggtttgcaagtctgctggcagagtaatggctgttttgtaatgtctgtcaatggtgctatttgttttggccttttgtggaaaagttcactgggcagccagaacaacaaagggcagtcctaggactagagttggaagagccagctggggtgaatctctaagtgatagagaggatatagggcaaaggaaactggccagtgacacagatgagctaaatttcacaactaacttgcttatatttgaacaaatagcaaaagctagaaagcctcaacatgctgggagaaagtttccgtcccttgggtgctttacatgttatccctgtggcaatgaatcatgctaggatttcaaccaaactgctactcttaactagcaagactatcttaggtgtttcatatgtgtgattaagaaataatggacaaggccgggcgcggtggctcatgcctgtaatcccaccactttgggaggctgaggcgggtggatcacaaagtcaggagatcaagaccatcctggctaacatggtgaaacccc

SEQ ID NO: 38367 - DNA, 824 bp, Homo sapiens
ttggccatgtaaaatgaaaaacttcattaagtaaaaaataaaattaaaagataaatacaaaatttaattactatttacgttattcataatagcataatactattaattcagcaaggaaaaaaccaagacccagtgggagaaaataagtaaaatacagtgtataaaagtaattcaaatgatcaataaacgtaagaaaaactctcacagaaacctaacatatgataatttcttcactttaaagatgaggaaaaggaagatcaaaaaggtcatatcatttgcttacataaacagtgatgaaattcagattcaaccttggaactttggatctcatgccctgtcacaaacgggacttaggaaaccaactggctttcatctaggtatgacttcttctggcttacttcctttttccccagctttattcaagcacaattgacaaataaaaatgttatatatttaagatgtacagcaagacgttttcatgtctgtatacactgtgaaataattaccattttctagtatacaatctggtattattaactatagccagtatggtatacattagatctctaaaacttatttatcctgcataactaaactttttaccctttgaccgacatttctgccaacacacccctcccagcccctggcaaccaccattctactcttgactttatgagtttttggattctacatataactgagatcatgcagtatttgtctttctgtgtctggctcatttcacttagcttaatgtcctccaggtttatccatgtttgcaaaaggcaggattttctccttcttaaggaaattttttttttgtgatt

SEQ ID NO: 38368 - DNA, 1226 bp, Homo sapiens
aatttcttacatttcctcatttcttacatggaatgaaagcatttttattatattttacctaaacatgtaccaatctaaaaacaggcacaaactgcttagcctatgacccttaactataaaaaaacaaatttataagttaaatacagaaaagttacccaacagaatttaaattaatttaatggtaaggataatattttattgaaaaaataaatcaccactaaaaccctgagcatggttctacctgctaaaatgcatcttcctttatgttcaataggcctttctcactatgagtcacacagtgactcagctcttgccactttattcaaactactgtgaacctaccctttatacacttcctgtaggatttctttttgcatttgatttgtacaaactcatcatatatgtattaactctgcttgtgatagtttctcgttatttggcaacaattaatatagtgccacagatggacaacctgattggaatacaaatgaaatgaaaatcttaggtgatacttgatataaggaagccatccagatggccccagattttcatgttactttttgaagattgtcatacatacaaagacacaaagtcctcattaaaaaatcatttaaaaatcctcagtaaaccgagggcatctgtggtgggcacagctgtgtctcccagatacccctgtaaggaagcatgtggtgacaaagctatcagtagaccacctcgagctctcagttcctttagggtttgctctgctgcaaagagctgcctagcccaagaactcatccttctccagatgctcacattaaatgactgatggaggcagcagtatcaaaactgggctattacccttgaacagggacaactctgatgggtcatgtatgcaccagcttccctgtggatttggctgaggtcagcctgcactgcagttctacctctccctaacaatcctgctttcccctctctcccattagttatgataaactccatctcactatctgctcccaaagacccagtcaacaagagctcccagaaatctctctgaggaacccccagtggactgagaaagcttcttctgtagccctgattcttcttacacgtttctagtttcaaagttcagcttccagttgtacattcctgacagcactaaaaatccaacaggtccatatcaccaatctcttaggttcttgccacagaacaactgttttttgtttttgttttttttgtttgtttgt

SEQ ID NO: 38369 - DNA, 1916 bp, Homo sapiens
taaatagtagtcatactgtattttaaaatttgtatcattattgtcatattgttatttttaatttttttccaatatttctgtccacagttggttgtgtctgcacatgcagaagctgtgaatacagagggccatgatcaagaaatagtatacagtatatacacagtactccccccttatctatagggtgtatgttccaagatataaccttgcaaggtattctatttacagcctagtgtacgccccctgcccaaatgaaataacttccatagaccaggcgtggtgctcacgtccgtaatcccagcactttgagagactgagggaggtgggtcacaaggtcaggagttcgagatcagcctgaccaacatggtgaaaccccgtctgtactaaaaatacaaaaattagccgggtgtggtggcgtgggcctgtaatcccagctactcaagagactgaggcaggagaatcacttgaacctggggggtggaggttgcagtgagcagagattgtgccccactgcactccactccagcctgggtgacagagcaagactccgttaaaaaaaaaaaaaaaaagaaaggaaggaagaaagaaataactttcctaaggcagaaaatatattttaaataaaatgtttgaattttaacttaaacccccatgcaaattaataatcaaaagttaaacttggacacccaattaaacatgtgtagatgggccacataagtttatcttttcttttttctaagaccccactaaaatgctactaaagaaatttaaaagaggaataaattcatgagggagaggatagtgggagaagagatatccgaggagaagacactctatgaaaacgaaactggatacttctgtgatgactattgagagtagaagatgttgcaaccatgtagagggagctcatgatgagaaagaggtgattcactttacaaaacccctgtgtgtgcaggactcagagataccagaaagctaccgagaatgctccaacaaaaggagaaaggaaagaaaacggaagatctgggatcatggatagagggtatacaacacaaaaaggaggtaaaaggaagtcctaggatgatcatgggggagcaaagtgagaaagcaatctgtctagaatggagggcagagctgaaggctctgggatggatgtgttcaggaaaaataataaaattatagattatatgtttgagcatctggaaaagaagtaacaaaaatgatcaaattcaaaagctaaactggacatccagataaacacaaaactgaaatcaagtggtaattgtagagaaaaaaaaaaggaaaagtgtacaagaagagaaacataaacttaattttaaaagttgtggtattctccatgtatttaagaagaggaaagatagcttgagagagctaaatcttcatctactgtaagagaagataacagtgagacaccaaaaaaggcacttagactcatattacttagaaatagagatgtgaatgccaagagataaggcttaaagggttgaaataaaaaaggttttggtaggaggctactctatttcattaaaagccatttgtaatctttgatttcataaaatcaagttaataaattttattttattttactttattttatttgtgagacagggtctcactgtaaccccaggcagtggtgtgatcatagctcactgcagcctcaaactcctggcctcaagaggtcctccagcctctgcctcccaagtaagctggactataggtacatgccaccacacttggctatatttttaattttttttttttttgtagaggtgggggtcttgctatgttgtctaggctggtcttgaaccactggtctaagggatcctcctgctttggcctcccacagtgctgagattacaagtgtgatccacctcacctggcctgtgaatgtattc

SEQ ID NO: 38370 - DNA, 1133 bp, Homo sapiens
gttgttaaacctgtagagatgagggagacctgtaaaagaaaatacaaggatattgccggtttaggacagaaattattttatttaaaatgttaagtctttctcatttttaattgggtaaacttacatatagatttttttgcctaattctttagtaggttattcttgcagcttggtgttgataatctcaggcaggtaacttcttatcagatcagtcttggttccccgcacccaccccaagtaggtgagcaagtattatacatgactgtcatcaccatgcaacatggctttaaaaatttttagtggctcctgcatggaatacaaaactggtgattttagcttataaaagtaaaagtgaaattatgtttccttttttcttcaagtcttattttagtgttgacatgtgcttttttactatctataattgctgcttctacttgtcttactctcttccttccaacaccacacacattcctccccgtccttttttttttgaggaggggtatctcagctttttcctctctgctctccagctctacttttcctacctggttttgccctttggtctgcgttcctaggcctgttttgcttcttcctctctgttctgtcattatatcaactggttaaaatataaactggtctgtgtgtgtctgtgcccggtgcacccattatgctaggtttgtgtgcctagtcttaatttttttaaatgaaaaagcacattatggatcctttctctgataagaaaaaataaatataaaactgcttgtattttatgtgagtctcattaaccttgttttctaagttgttaatttttaactagaaagaagtttctattatgaattggcttatcttctgaggaagagagagattaaacaacctctctaaggcacacagctggaatgtggcagagagggaactcaagtacaagcagcctgactccagattagggctcctaaccactctgctttgctcatggagtgatttatttagatatctcaatatgacacttttaaggggcatttaggaaaaaatgctcaggtattaataatatgacagaatgttaatagccttccttttatgaatgcctcactctctgctcagaagataacatttatgtgtacactgaatatgtgaaa

SEQ ID NO: 38371 - DNA, 2211 bp, Homo sapiens
ttatatttgtaaagtgtatataacagtgtcttacactatttattgaacacattaaccttaaaattttttaagagattagatgctacctttatctatgccatttcctcattcatcagaacatatgcaaatacctgtcacatggtggacatcaaaaacacccatcaggccgggtgcagtggctcacacctgtaatcctagcactttgggaggctaaggcgagtggatcatttgagtccaggagttcaagaccagcttggcaaacattgtgaaccctgtctctactaaaaatacaaaacaattagctgggcatggtggtgcacacctgtaactccacctactcggtaggctgaggtaggagaatcacttgaacccagaaggcggaggaggtgatatcatgccactgcactccagcctgggtgacagagcaagattctgtcaaacaaacaagcaccatcaagtaaccaaccaggttgctggtggtttagtaggctttatgcctgatagccttcatctccagggctcaagatggttgcataagcctttttgctttccaccactaggcaaagagagagaagaaatggtgaggtctttattgagatcagtttgacttacggcaaatagaaaaaacatgtctgactttgccattaaataccttccaacttagcaatcctgagacaaacctgtttgcaaaatgtaactaggtacccaggttaggctggtggaatgttcattattccgttgctaaggatctaagcctattcatggtgtcctatttttagagtatacaagaatgaatcagagacctatgattaattattaatgattgtgaaataacactgttggatgacagaaagttgaaagttttaataacagctgctttgagacttttaacaaacacataaaaggaattttaaagttatgttttttctttttggaatgttgcttgttttgaaatatgtttttccctaaatgtctatggtttagtcctatcttgaaaagaaaagaacctggcaataagaatctttgaaaagattaattatatctcttcattggtgtgcaaactaaattcttaaaatttgtaaatgtctggcagcctgtcagattaatttttttcagtttggtttttagtgtctataattagtttattgatcacttactatgcccagcctctgttctctctaagttaagtagatgagaaaactcaggactagaaaggttcaatacttggttaagctcacacaggtagtaagggatggatttgatccctagaagtctgactcaagaggctattctcttaacactgagtcattttctggttcacatcatacatcattaagcaagaacattgaacgatttcattgtgcactgtttcattcttccaaaacttactataaactcatttgtttaacaaacactgaacacacactatattaatcacaaatcattttattgagtatatattagctaatgatttaaatatatcttcttatttaacccttatagcaaactcatgaaatagcttagtagcttagagaacttaaatgacctgccagtgtctcacagcaagtgactgtggaggcaggagttgaaggcagggattccaactccagtcctgatgctctcaacacatgacaagcaaggaactgtgcactcagtgctgtagagcatggaaatagcataaatcgcataactttttttcaaagaacatgggttttacttttgctgttaagatatgtacacaaataactctgacatgtatgggaggagtttaatactcctagtggtaccaataacatgatattggtcagagagaggaattactttggacaaaacaggagaaacctaatagaaaaggatatttgagcctaaaagaaagtgacgtttggaaaaggagagatttaggagataacattcaggtagtgaaaactaccaagagaaatttgaaaggggaaaaaaaatcgcttgaacccgagaggcggaagttgcagtgagccaagatcgtgctgcttcactccagcctgggcgacagagcaagactccgtctcaaaaaaaaaaaaaaaaaaaaaaagaaatcactacagttgtgtcatgcataagctggtttccattttaaaaacacagttaatacaggcattttcttcccaacgttgacatttgcatcagtttccccatgatctgatgagcatctggggattctcaatataggcttat

SEQ ID NO: 38372 - DNA, 726 bp, Homo sapiens
taattccttactgcttgggagtaatatggccagaggtcacaagatttatgaccttcccaattgctcctacagataacatcactattgaagaatgtaagattggggatttttgagatatgtttcagattgaccccacttggacccatgacccatgaatcagctggtcctgtggacccatccagagacatactcaatgcacgaggatcgttttccacaattcctatgatttcgtccccaacgaattgatagcacccatttcctagccccctgcccaccaaattgtccataaaaaccctgagcttcaagccttcggagagactgatttgagtgataattccagttctccttcatgggccagcctcatatcaattaaactctctctactgcaatgctgccatctcagtggattgattttgtctgtgcagtgggcaggaagaacccgttgggcaattacacatttctgattcttggcctacttctttgctgcctgggccatatgatctcatctcataatgaatgtccaaacaggcaatgtttgtatatgtggcatgtgaactgatgttttattttagagcagtggctctgaaactttttaatatcaggactcctctagactcttaaatgttgttgggaaacccaatgtgtttttatgtgggttatatttattggtatttatcatattagaaattataactaataaatttttaaatatgtattgttacttta

SEQ ID NO: 38373 - DNA, 1511 bp, Homo sapiens
caaagacagacaagcattgctgctatatgaatctttagatttaaatacatagtttaactttgctctacattttgactgctgtattgttttaaaggcatcctgggacctaaattctttacaattaatttttggacaccacttaggatgatagtctctaagacacttgggcacatttaacattttacagaattactatagtgacctcatgtatttgtgtagtgactaatataaatttacgcctgtaagatgctgtttaaaccacagcaacaaaaagaaataccccatgtgcctgattatacgtgcaatatgtatttgaatttaaaaaaaaagctgtgtttcaaaaacaagggaagttaatgaaaatttaaaattggccttccacacgtatttaaatgaagcatttgactatttgggtttccttggttaccatagtcgctgctgacagcttctcttggtggggagggagtaagcagtgagaataggactctaaaacaaagcgttaaaatcgtttatccattaatagacacagggaaatgtgatgctgacagcccagtaaaacccgtgcccactccccatcctgtattcctgctctcccgtgattcaggtagcctggcagaaccgcagttccacaattccttacccagcattccgtttcagctgctggaggactgcctgagccttatgcaaatgagaccagctcggaggctttgactgcagaagcgagaggagggggcagaagggagttcaaaggtcacagggctggtggaaagctggatcagttgcctgaaaaaaatgtactggggttctctgcagcagtgttttgcagcagttaaatgaagtgtgctttatttctgagagtgaagattttacagcgtgtgtgccgtagtcgttatatagtgcacgcaggtatggtgacatttcatgatgcgcctgattttatttctattaaagacactgatgggcattggctattttaattcatcgtggcaattggcagggtgttcctggttttcaggattcccttaactagtttatttttttaattttcttcttcgtatttctctacttgaaacatgggtgttttgttccaatagaataatttcatgtgagaaaaaactgggtttaggcttctaaataattccatttcgggggtaagttctttattgaagagagatctctgagctgaaacatctagaaaaatattgaggcttacaacttttagaggattttcacattttttaaagaaatgtatttaaaataagatccgagttcctagcctaagattattgtgatgtatctggtattaaataatggagttcttttgttcatatctcacacaatcgcataaggacaattttaataagtatattttcattccatttgaagggttttggttttgagggtttttgttctatattttattgccaaatatcttctcagagcaataatttcttctattggggctagatcctttaaacctttctttgatttttctaattgttataaattct

SEQ ID NO: 38374 - DNA, 1703 bp, Homo sapiens
ctcacaggatacacatttcatttacctacttgttgtctgactcctcctactcaaatgtaagctccaagattggaagagtttttcttggttttattatttcagtgcttagaacagtgctagacacataggaggcattcagtaaatatttgttgagtcaactgaattagggtttttccccagcattaattagcctgtaaaatctgagaaggcagaaactgttcagttttgctcactgctatctccagcttctaatggacatacagtaacccttcataaatatttgctgaacgagtgattcagtgaacaaatgaatagagaagaccaacatccgaaaagttattttattttcaagcctcatgtctttaactgttttatatcagcctttcttaagttgaccgtcattaatatttgctgaatgaatgagtcagtgataaacagagaagaccatcaccctaaaataacgacccctccacttttaagtcttacgtctttaatgggtttcatataatctttctgcgctctttttactgtccagtgtgggagctgacactagtttgccttaagtccttaaaaatcgcacccggaggcgcagtgtcataggtaacccaagctttcctagtaaacatgatacaaaagtaaacacaaccaacagcatggggaccagcaattcagaaacaccgagcgggcgggctgcccagacctgggcttccccagcagggcccgcggagaccggccgtgagcagaggctgcaggcccaccccgcaacccgagcagccggggcaccgcagggaaacagcggcctagcgaagccacccgagctccctccgcgcccccgggccaaaaggccgcaaaggaactccgcccgcccgcccgctcacccgctcacccgctcacccgctcaccttcaattcctgcgagtccatggctgccccgaggccgggccgcggggctctggggattgtctcgccgcagcctaaaggaagacgcagaattcagctcccctagcctcccggagcgctctagcgccccgggccccagcgggaggggcggggtcgcgccgcgattggctgtcggagggagaggcgggcctgtgtggcggggatcgtgctgtaatggagcaggggcggcggggacccggaggtgagggctgcgagggccgcccgggagggtccgggctgggaaaagggcctccgccggagagtgcagctggaaaaggaggtcacactgggaaacggctgtctgaggacagtgggtgggcgggccgaggaaatggaattcaggaataaaggaaacggagtatgaagaaggggaagtctgtttcctgtcactggttgtaaaggaagacaccattttctgcacgtttgtctggaggcggattcccgcagtgcggctctcagcaaggctctgccggcgcgggaaaaagcggtcaactttcacgtgggcaagttgttttacggccacaaggtggcgcagaaaaaaaaaatcacacgttcttaacagaaatacggtgcgcttgggcccgtctttgcaggcgttgctgcaatctttgttagaatgtgtgttcaattagcccttttttaccagccccgataataagagggacaaataaattaaacttccagaaaattagtgtcttgttttcaatgatactactgattttaaactgagaataaaatgaatcccaatgcaaatttttatgtttg

SEQ ID NO: 38375 - DNA, 1709 bp, Homo sapiens
taaatcctttagatttggctggttctacgaaataagagcaatcgttttaaatttattattattactctaaatactttatatgtaagcctttgactaaatatatatagtgctggcctcagttaagacaaaaattaggaacagtttttctttaatcctttctttatttctgcttttcagcatttgtactgctattgatcaccagtttgtctttgccactccagttttcatccagggcaattcctgtggcatttaacactctccagattttcttatttacttaatctttcaaaacctacctgtcatcttacacttcagcttgagcacccattcaagtacaaatgtgttaaagattaacctgttagggaaggagcactgggatccttcttttctgcaatgtattaagcaggttctcaagatgctttaaaatagagaaatactaaggatctctgactactaatcagatcatctagggagaaggtttgcaaacatttttataaatatttttaggctttgtgggttatatctccgttgcaactattcaactctgccatggtagtcatgggtcatacataaacaaactggtatggctgtgttccaagaacatttttacaaaaacaggctggggtttgttgacctttggtccagagcaatgattatttggagttcatggacctgtagaggtttcctgggggcatgaaattatataacaaacattatggttgtgctgtctttccggaaagacaattctaactttcatcagattcttacagtctatgtgacctcaaaaaagattaggaggaataggaatagagaatgaagttcaaagtagccagctcttaatagagcctaccttttcatgctcatttcctgctgccctccctactatgtttatcacgtaggcactctgatacatctagtcactgaccaagcacaccttgcacaatctattctgtgcctccctaccatgtggtatcactgccttgaatgcctatctgcctatgatttggggcttactcttcagtcatgaaatgtctgaaatgtcacctccttgtgatgtcttcccagacttccccggatagccactccctactgtatattcctgtatcattatgtgcccttgtctgtctctcttgtaaccattgaccctactcactctttggggaccggggtctatgtaccactgtactctgtgttttttatatcacaacacctgacacatagttggtgtttaaaatgtttttctaaaaaatgtgagtaatgatggaatcatgggtctctgagaaagacaggcacctattggtctgatgagaagccagttgggaaagctaaagagcctaaggactcaaacaagctgactacaatatgcctcaaatgcattatttcattatttcatttatccttcaaaatagccctgcggcatgaataaatgtctctttttgcatggttaacaaatgtaactaaatagacatttgcctctcaaaatatactaaactattctcctgcatccaattcacctgtaatacagataaagaacaaagagcaaacagagttaaatagtgggctggcttaatcactgaaggaagtggttttgtaggggaaagttgtgatagattgtaacattctattaatgctcaaaaaattaagttaatgtcaatgaattctaataccacctttctgcacaaaatgaaacttgtaattttcaacttgta

SEQ ID NO: 38376 - DNA, 5805 bp, Homo sapiens
ttttttgcttacagtaagttgttattttaaaaagagacgtggaaagaacggttttctctatagaactaaaaagatatagaataattcagttctacatatgtcaattcaaacttgtctgtggcagattatgcttactggcactgttcaaggcattcccctcttccttccccactttatcatggcctggcatttttcctcaccacccagaagggtttcattcctccaaacttcattccacctttagctgccaagagctgatggctttttcttttgcctaaagccatttccttccagcaaggcagaggaaagggtaagtgataccttcaatgaagaaatttcattttttagaatggcaggacaccaaaattgttatctcatattccacaaaagtattctacccacattctctggatgctctcataaatcctcatataaaatatttttatacaattttataatatctattttaatatgaccttgcctctcaagtggtaatctaactctacacagttctaaaggaagatgtcataatacttctgtaaagaataaattagctaatttgtgatgtgtaatatgaaggaccatcttcaattagtacacagatgccctccaatacaacatccacaatatgtcctcttcagagcaaatttttaaaaatccctgctcacaattagtgaaataatttagtccttcaagatgtaatgtggtaaccaaattatttaccaaaaatctgtggctggccatttgctacataaaaaaatcattaatcagtttgtcacctaattgaaagctaaattttcaaccaaatgttaatagcaaaactagttgtttgtttaatatctttaagcatagtctgcaaaaataaaggggggaggcaaatcaccatacaaagtgtgtgtgtgtgtgtgtgtgagtgtgagtgtgtgtgtggtaaaattctagtatgaaaatgacacaatcatttatgagcatgaagtttgcagtccttacttccactctaataacagtgatgggtcttcatggataagcccacattgcctctctgaaccttccttagagaatgcttcaaatatttggataatgtgccctttgtacctggggcaaacatcaatttagaccgtgtggaaacctaacttatggcctccgcctcatctgactacatttctatcaactgagctcacataagcatctatgtttattttaaaagaatattttaaattcatagtcagtgactattgactggccctcaaatttctgttagatgatacagatttaaacctaacaaggttatcattttagatttggagtcacttataaccatattagtttatgcaatccaattttttcttaaaatatattttaatacatttgtggtcactgcctttctaagaatgcattacaaattacttacctttaagtacattatcacctacactgataaaagagagaatacatctcaggatattttaattttacctcctcaatatcataccatgatattgtaaaaatactaaatgcttgacaaataaaaaatagaatcacaaaattcatgtttccagggttaatatgctttattctggaagaatccatatttttgtattttattatttatataaatatctacgaaccccctactacttgatgccaggcactattctggaagctaagtcaacaatgaagacatagtctgggttcccttggagtatttggtatgcaaattcacaaaatacctgcatgctgtaacaagcagtatgaaagaaacaaggttccaacatcaagaccaacacgggacaacctacttttaacaagatgatcaaaaatgatctttccaaaacaaaaaaacctcgagttgagatttaaagtttaagaaggagtaagcacgcatagagttcaggcattgggaacagcatttgaaaaggccttaaagagtgctattgtttcatgtgttttagccacgacctgggcaggagcaccttaatgagaagagaataggttctggtgaggttggagagaagggacagaacagagagtaaaccatatgctgaggaaaggcatttactgttgttgctaattggtctctgtgttgccatgtttatttcttcttctcctcttcttcttcctctttttttttttttttaaatgcagttgtgagccaatgtttgttaggggagacaggatggtattgctttgtatagagaatgaattgcaggggagaaaattacagaagtggagagattgatatggaggctgtggcaggattccaagtaaattatgatgatgacctgaactaatttggtggccgtgtagatacagaaaagagggtgaatgagaggcatctgagacgtatgatgaaatagaaataagtttgggagataagattgatagatctacttacaggctggaaagggctgaaatggagtaataaggaagagagcaatcaaaggtgatttcaatacttggatggtgaaggcatttattcagataatgaagatgggaggaaagaatctgagacagagttttagggaaagtcataaattattatcattatgacatctagaatgttccatttacatcaataaactttaagctcttttacaagatcatgacttgtcttagaaaagtaccatataaatccttctagcacttcacactcttttgcataactaataggaatagaaattggataaaaaatagattttattattcatgtaaaatgaaaaattctacttttttccttgccacagagaaagtgggttgattatattaaataaatagaaccctactgattgctcttctgaatttatttatttgtttatctattttgcttctgaaactcagcacagcaacaggtagtaaaaacatagaagcattaccacagaagggctcccatgattatatgcaggccctaggggaaaggaggcccaagatgcttttggcagagagccagacctgactcatctttcttctgtagaagcatcaggtactctgtgagcctagccctgcaccataggaatcaaggcatatcatatatccagtcactgtaaaaacacatcactgagtcccacaactgcacagtggcttacttaaggaaacctccttttaaacctctacaaaattttaaaaaacttgtcttaagccaaactatcagttgcctaaatagagggcacattcttctttacatcaaataccatattctgtctagagttttgttgttgataagctagtctaacaatcatgaaaatttgcgacacagggatcagataagactagctttcaaactaatcaataatttttaaaaaatctcaccataattataagaaaaaattataaacttttttaaatagtggaaaaaatctgaagaatttgcaataaaatgaacagtttaataattggatttggtttgcagtttatataaaataggtttatattgatgttaaagcaaaaattataaaatatatttaaataacaaggaaagaaagagaaagaaaatctttatcttgtctacagggaagaagaaatagaaaagaataataaatatgtttctgaaaagaactgaacttcccaacactgacttcctattcagtaactgacaagctatcacttccttgaaagcttactttgatttggcttttatcttactgacactagcttcttaaaaacccccctaagtttctcatgtaaattgctcttaacatcagagtagatataatctatgaacgctccaacttaaaaaaaaaaaactaaaataatgagtgaaatgtttactataatcacaaaaactggcattaatgtttctagtttcttgttctgatttttgtcttgaatataaggcacgaaaatatccattttttcctaaaagtaaatgagtttcccaagttgaattcgataaaaagttaaaaggattctgcatcttttctgaatttcactataaagtgcttattcgaaaaaataaataaataatctgcgctgagaaataggggcagagctgtcctgtcaattatttgtgtttgtgtgctcttaaggggtgcggggttcttttctgtccccacaggttgtatctgctaagctggttctgcacgctcagctttgcagatgggaaatacagcacatgctttttgctcgtaaaaaatgtgagctgccccttgaattgaagtccatctaacaactctgctagcgtaaacagaaataaaagacagtaaaccaccaggcattgctacccttcctttccacagtttcagaacctggcagcaaacccacagagtcaaaaccgcacaggagctgcccagctatcgaaataactacgcttccagcccttcttcctcccattgctggaaccacccggtcaagcttctcccctctcttctttccaggtggcgtaatacagggttccagaaccgagatgtgaaaatagacacaggtgggtgtggcggttgaggcgagcacgggcgaaagaccgagggcttctcctcccctccccacagaagcagcaaaagaaaaggcacttacttgcaacctagcccgccgatcatccccacccagtgcacctgcagaatctggctccaggagagggcgcgggcctctccttccccggcgctctctcagggctgcttctttttctctgggctcctgttgctcaggggacgcctgccgctagcagccactggcacccaggctagcccagcctcagccgagctggcggaattggaaagccgacagccgccgctggagcgctggcgaccgcctgcaagcagactgcgcccctcctgccagggcgcgcccgtggaggtagcagccccgcctccccgagggcagctgcgccgctttgcctcctccactcctcccagcgcgcccgggtccccaccccttgctccctccctccctccctctctccactcctgcgggcggcgcagggcggggacccagctaggggcgcggtggtggcgacgctgtagcctctgcaccatgcgctaatagaaggcggaggagggggttgcacgacctgccatccacggccacccattgggtggggcgtgtgtgtgtttgagtgtgtgtgtgtgtgtgtccagcagccagaagagcccttcccttatctcacccccgcccccatcatccctttcctcccttcctgctcagcagaatcggctaatgtttccgagaagtcactttgtgtggcttggtggggagctggagaaaaactccggagcagaggaggtggggaccaatggcaaagccctgagtctggggcagtggctggggagccagacaacaccgccaggccagcgcctccccgaccttgggctctgaagagtctaggctgggaattggtttcttccgtagggctttgctcacaaccgcgagtggggcggtgacgctcaagaccggtatctaggctatgttttctgttttctttatatatatgtatatataaaatcaattgaattgcagcgtcttccaggcaagcaaataatacattttctttcgaagatgcagtgaagaatcagaggaggtcctaggtggggaaagaaacgtggggaaaaggctgcttttccagacctgggacccgattatctgaatatgccatcagtcatatgggttctgaatttcagagctggtaggagcgactgtgaaaataaattttttaaaaattcattttgtgtggagtgtgtgcgtgcgctttcctacagcagcctgggaggaagaacaatggaaacagggttgaattatctttctcaaagagaaacaggaaatttccaccaagggaagaaatcaaaggatggccatagggcagggtgcctctcaaaaggg

SEQ ID NO: 38377 - DNA, 812 bp, Homo sapiens
tcctttattattttagataaaatacatgttttgagaacttatatccaatttaagttcctattttgaaataacatgcatatctctacatcaataagactgtgtctactcagtcccaccacataaggtgagaaaataactgtatttattttcttacatttctctattcttacttctcagtttttgttaatataagtaatgacctttgacctagttataattgttgagttatgtattttgtatcacatattatctatcatgatttatagaaaggataaaattcaaatccttacaagggcttgccaggaagcataaattcacacaaacagagagttgagaggactcagatgaatctgcctgactgaaagtggcagctgttcttcatctacagcaggttgttgctgttcataaatgtaggtggacctaacctgacaattcaagttaaattggatttcaaaataaaatcattaaatttttataatattgacaactatttcaaagttttctaaaacacaaataaaatatgtctctagttcaagaatgaaccacggaagtccatgtggtaacttctgatttgtaatatttgcattctgttttgcaactcactaacagcagtaatttgcaatccattctgtgtcgaaatggtttcagagctcgttgcaattacttttagaactaaatactctcattgctaaatatttcattttcatacttactttttcagcagatattctgaaaagatacacatgtacagtttgagaactcttgtatagctgagaacatacatttgttgactacacatacaaatgacagcc

SEQ ID NO: 38378 - DNA, 1826 bp, Homo sapiens
tataaataacttattcagccattgctataaagattggcagttgggggtgacagttactttcatgcagatcacctaaggcaagccatcagttatccaccgagatgagcgataacttgcaaatcctgggattcatcattgatgaaaagaatttctgttccccatttcactagaaatttccacagattcattaagtcttcaagggagaaaatggaaattaaaatatctcttgaagcttttcctgagattattcttttcaggtcaggatctctccttgtcatggtaaagtagggttgggggttgagagatctcacagtcctgtagggacttttgagctgaggtatcagaaggcaccaaggcaaaaggaaggttcaaagtgggcaactatgtggaagtgcatgactcggaatgtcaggcaaaacttaatggaccacaaattagaagaagccagaggcaggtattgaagtcaaagtataatgcctaactgaagaattctgttagtcacattgaacaatgaattttagtgtttgagacttgcttttaaggagtctgtgggagaaaggccacagactgagtggatattgccagacaagccagtcttccttggacaaatcagcatctctgtccttgtgttctcacactgctcaataataagtgatgagaatcattcttccagtcattcatgccacacacatttattaagcaactactatgttccaggctccatgctgagtgtgcacagagattcaagtagaagtagttggtactccagaatgtagagtccaaagacacctataaataaaaaacagacaagccaggcatagctaagatgcatgtatttttgtgaggctggccaagggttggccttagaactagcttcaacttttaaatagtcatgactaagcatcccacacatgtcatatgattaatcatgaaagtcctttgcttcacaaccttttcatagacagatattgtgtaacaagttaaccttaaggacacatgccttaaaggactattgagcaaaaaaaataactaagctctttccaggtaacactcagggaacttttgcagtgtcatatccgttctctggtacctatgtgtccgatcttcctgcccatctgtttctttcactcaaagtcccagaatcctatgccacgggcaggattttcacctctcaatatagacccatgtaccttaccccatgttccaactgacttcctgagaaataaatcattgtccttgtatttcataagagacaacaaacattgattttgttgttaacatatgtgaggcttcgttcatccaataactatatattttaatcaccaataagtatcctaaaatttcagacgctaatgccctgagggatcaacttttaatcaattattgactacagtttgaggggtgccatgtccagattaaatgcagtatgatttatcctatggtaagtaaatcctctccacttggagtcttgaagttgttttaaatgccttaaactaagtttctccaacagcagtttcaagattgtgacatttaatgctagttttatagcaaaaagaattctctagcaatgtgttgaaaggcaacatgagttcattctgagtctttgattatgtttaataagctttgctgtcagacgctgagtcatgatctttctcttctgttttacagtttgtatttacacctatttgcatttgataaaagcaatgtaagagctctgccctttggcagtgatgactcctttattttaatcagtgcaaagaaaaaaataagaaaatttggcatgagagtgtgtaaaaccccttcctttggccattttaaattttagt

SEQ ID NO: 38379 - DNA, 679 bp, Homo sapiens
ctccttctctatgtatgtgtgtatgtaattttacccattcttatgaggttgtttggcaatactataaatcaaggcctttttttctttttcatttgtcaactggactttaaggggaagcatgggaagaggagagattgtgaaagagctgatacctggtaacccaaggcagtgaaccagtactcctagatttgtgactatccagggcaagtgaaacccttactatttctttaagcagccttctggctttttgttcagaggtcaaagtctttccaaagctgtgaagttcaccgtgtagaaatagagataagaaattgattatcttccacttccaacatctccacaggataaaaagactcttaagtcctacaaacacattcaaccaagacatttaatctacacacatttaaggacagggtctgctctcatggtctctcatgtctgttaaatgtccaagttctaaataactcacctctttttcgttgttgacttcccaccacaatgcctggctcatagcaggtatgcaaataagtattagtcaaactaagttggaattttgagagagtaagaattccagatttgacttggaaattatcggagggtgtaatttctctttttcctttttctaattaaaaaatatatgtagatagggaaaggtacataaaatatagaaatatgccat

SEQ ID NO: 38380 - DNA, 773 bp, Homo sapiens
ctgatgtatttcacattagcaaaagggcctaaaacataacagtgcaaataatgaatgcaaataaggaaggactccacagattgctttccttcggccacagaactattagaacgtaaggatatgaaaataactaacggctttctacactagatcttgatccctgctagtagtagactgactgcttgggggtaaacaagggaagccttggtagttcttgctttacaaaggccagagaaaaggaggttcgggatagggtagaatgagctctttctttaggtattgctggcactccctgccttaaagtgactcatctccagatcataatggagatgggaacctttacccacctgcatcagaaaaccgttcacgctggcattttggaaggagtagggactccgtccagttctaaggtcactatttttggcttactattaccctttgaccattatgattgtgtaaagtggcttaagtataaacgcagcctggagacacagcagttactgcctgagaccggactgccttctgactggtgattcactgtggaattattatttggctgattgtgtgcactgtttatatggatggatggaagctcaacagttgcttccatacgtgtatacaaacaacaatccacaaaatcagccacataataatttaaaaggaaactgaagcccaggtagagtataacaagaatcctcttgttccactcggcgctatggcaaatttgtgagtccaggaggaagtgggagcccctcaggtgtaagttctgtcaa

SEQ ID NO: 38381 - DNA, 1050 bp, Homo sapiens
cgtatgtgccaccagtttcaagatatcaacatgatgtcattgaatgtgaagttgggaagaagtgcgcaccaccagctctgcccaagcccatgcaagctggcctggcacgcactggactctgcagaaccatcccagccccagagctccctgcagggtcagctcaggtctgtgctgtgactgcatcaaggttcagactctccctttgccttcttctttctcctctcacattagagacaggtgttgttcctaagaacatgctccagtaaacttcctgcgtgagaatctcagagtcccaaagcgaccccacctatagtgaagagaaattgaaagttaagttcatgatcattgaaaaatagagagcgaaagtcctctgttctctctcctaaattcattaactaattagatcaactatggcctccacctggttccctaatgagtcatagaatttaccttgataagttaataaatgggcaactcagtggcgctttgtgttttgttctgttggtccttatttaagtcctttatctcaaacagaccacacacaaaccaggatcaaatgtagccagatgctgacattagagatccacagtacaaagtcctttgttgccacagagggctgtagcaaaactgggaagactaaatctcatgtccaaatattattactgtcttgtttatcctattatgtcactaaattctcccatagctagcactcataagtcggtatacagaaagaatggatttctcagccataaacagcaccggcaaaattcctttttgccacatgaagcgaaaaagaaggggtgatattaatgaaatgtaatggaataatgtgctagaatagctataatttttagacctggtaaaattgtaaactagattaaaatgtgggtgacaaatgttgagtctaagctatttccccagaaaaacacaacaatttctacagtcaattttcaattatctgcccaaggagaaatagcaataatggcaattatccaaaagagtagataatgaacaaattcatttctacttgactttgaaatattattttgt

SEQ ID NO: 38382 - DNA, 1301 bp, Homo sapiens
atgcaaatcctgcaccatgttatataaggaacttaagcatttgctgattttgtatggtggaatcttggaatcaatccccatcagatactaaggatgacagtattggtaaataaatcacgtatttttccactgtactctaccaaatgtcctcgacaccagaacaatcatgcttcctgttcagaggcagaactccaggctccaagaacaccagtgggacagaatgtacaaaggtcaagactcagacaccagcacaaatggcacatattctctgtgccagatgcctcacaagctatttcatctactgcccaaaacagcccttcaagtcagtgctttaagattcacctgccagttaaagaaacaaggctccaaaggttggggtacaaagaacaagacaggtgccagtcacggtaagcagggtacaaggtggtctatttagtcacaaagaacaaaacaaaatgcagttggctcaactcctaaaggctgagcacacggtcagttggaaatatgacgagatccttgccactgtgttactgcccttgggccccctaaattctccctaactagggaactgcattggtctagactggcacctaggtgagactgaatgggcaacatgaagccaagcagctctcgctatgggcagtagtgagctaaggagcagggagtcaggcctgttttctgcaaatagcgcccaccccaccccttccctctctggcagtccctgctcagtgcgtggctgctgctcagagtgcactttctgatggcgtgtttgcatatggcctcggatgctctatatccaaagtccttcgcaagctgtgcttcagccactgagcaaactggaatggaaaccagagcattacacaattcctgggtttacagactttgaaaggcaccaagagtggtttgttggggttgagattggccacatcccagtgtgcttttctgggactttgtaacagttatttctgagagggtttcactgagccctagagagactgctagaaggtcaacacagagggctctcgaagcacagcagagacaggcaacaaacccgtcacaaccacagcattcagccccctcccctgccctcttagggtaggttgctctaagctctctaagaacacacagaattaagtaagggtttatttcccagttgcctcaacaaatatttattcagctgtgtataagacctcatgtttctcaccagactgtgatgctgtgtaatgtacctttgattccctggcacctattcctgggcctaaaagaagtggatgctctacagttgttagtcaaatgaatta

SEQ ID NO: 38383 - DNA, 2903 bp, Homo sapiens
ccatttttttcccaccccttcttgaaatgctggctcagagaattgctatgaaagaaaatatgttgtggtttcattaaaatttctaacttagagatgttgcaaacttcattatcagttactggatcatacaagctgcacacacatcaagacacctactcccattagttaagcaaactatcaaactttgttgttttgttttgttttgagacgaagtcttgctctgtcgtccaggcaggagtgcagtggcatgatcttagctccctgcaacctccgcctcctgggttcaagcgattctcctgcctcagcctccctaggaactgggaccacaggcacctgccaccacacccggctaatttttatatttttagtacagatgtggttttgccatgtcagccaggctggtctcaaacccccgacctcaaatgatcctctcacctcagcctccctaagtgctgaaattacagacgtgagccactgcgcccagcctcaaactttgaataacggatttaaaatctgaacaggaaaatctttaatctcctctttgttttcagcaggaacactagagaagagacaatctacacaaaataatatacaacttaattataatttcacttgtctttctctgaaataaggcaaaaaaaatgctcatcaaaatttcaatggtgagtagtcattatatggttaaaaagagaaagtataacgtattagtccgttttctctatttacgtaatcacaatgaacaaactgaaacttcagttcctctaaatccaactttaaaatcttgcaccctcaatattctagggcaaaaaaaattattaattagctataaatctagacaataaaaatattttaacttagatccacccaaaaggcaaagaatgactgttatctctcccaccccatctatctcatctcaagagtgttactaaatatggatgtattgctcaacttccctgctccacacaagtatagactgcaactagagtgactgttcttcatttcaaacacatgagtcaagaggaagtagtagtaattatttattggtcagcacacattcatcaggtactcaccacatatgtgcacctgtttataagggtcatttctgttctagagtttaccagagttcaccaaccctgtgaagagacaggccaggagttcagccttctcaaccatgctttgtgccttcaacctctaaaccagtgagttctgggtaatatttgatgataggaagtattcctgccttaaagatgggactttatatctgcatctgccttccaatttattcttatattttaattttacttagttgtgggtagcaaacatactgtctacttgataaagcatcatcaacgccctgtcttacgtctctgaggagctcatgagaggaatctgtactagtcactgtgcaagagtggaaaataatctgtcagtgtagctgtgtgcaaacacctcctctttctgcacagggcgttcatgtataaattcctatgcctggttctgaaagcaaaattctgacacaaacactcactggttctcttattaactaagtctataccataatcagggtgtgcataccagctgctgggaatggagaggtggtggttaactgccccactctgtcacagttactttcaaaaatgacttactgatcattattcgttttagttccacagaaagaatgagacatctcagttgaaactaatacccaaaaggaacctgaatggcacctttaaaaaatatctcatccagtcatccagaacctttgtttctctcactttagaagaggtgaaagaagaaagcttgagtcgtaaattgaagaccttcctgttaccttccttttacagaaacaaaagcagcttgtcaggcaaagattatctgaataccttgtgcttaacaaacagaccagacgaatatattcgttcagtggagtgtttgcgtaaggaagctactgaaacttactgttcttgagaatgtttcctccccatctcacctgcagggaaagagcaccgacttcctccctaaccttaagtacagaccaataagccctcctgaacaagccttcattcatgaagttgtctgttctgacccacctctccacattgccttggccaactctcctgaccctgtgctcctgggaaaattactcaacctctctgagccatgtgagatgtgaaaaacctcagttaaatgtctgaaaagggctcactggtataacctgataactgtttagagcatgcctcaaagagcactaagttgcaaagaagaactcattccatgctccatgactaaccttaaaccaggcattcacaacttgaaatgtgttcatagcatagccctgtaaacttcaggtaaaggtcacatttcagaccttttttgtaaacagtaaattataatagtaagttacacgtgaagacactgtccttacaacacatcatatcatgaccagtacagcctaagggtcctccgatcatcctctccctcctgggttccttgtaaatgttcccagtgttactggtttggtatatctctttctggtcctttttcctagccatttatacatacatccttgaaaccacaaaaaagataaagcagaagagtatagactccaggatagccattatggaggagaatctgcctctgccaatatttagtcatattaagtacataaatatcccatgatccattcatcctgttggatgtgtctcccagtgactcgacccacagatccatgagtgcatgttcacagatgttccctgcaacgctgtgtgtggaaactgggagttgcaagaagagataaggaaacccatggtgacagcaaatgtctaacaaggtagatagatggattaatcataagaacatagcgctgaatttagaaagtgagaaatactaagtgctagagcaca

SEQ ID NO: 38384 - DNA, 720 bp, Homo sapiens
aggcagttctggttacaaagacaacaaccaatgccaacaaatattgtcaatacccctttcatctccctggccttggttataaaaatatgatggtactataaagtgctaaaaatcactaatgacattggaaactctcatctattaaagcaaatgcaagatggaatatacttattgtaggaaataaagaggtttgttaacaacaacaacaacaacaacaactcatgactttgggaacagtcatgtgttaaagacgcgaattccaggatctcagtcatttcctctcagtgaaacattatcagagacaaacagaaaatcaataaaagatttaagtctcatagagtttgtgtaaatattgtagaaatgactttcacaagagtgataagcacagccttatcacatttaattcagctgagaagtccaactaaaacataaaactctaattaccccctctgatggccagcagttttataacaatgaaagtagctggatttatactgtataagccagcacttgagcactcatccatgcagccttgccacctcaacaggttgccagcacctgccttcccactcctctgatgccaagtaaaagtgaagtttgcttgtgacgctccgagattcctgaattcatccctattctcaaaggaaacttttcaatctcattcagacacttcccagctctcaaaaaagacaaggaaactaatttctaccaaagtgtgaa

SEQ ID NO: 38385 - DNA, 740 bp, Homo sapiens
tccttttcttcattatgagatatatatttttaagaaatcagaaaaatatgtcttgacaattccttggaaccttttttttaaagatgtaattgatggcaaataatgagattacctttagtatcctgttaaacactggaactcacctaagcttcagcaactgtgttgaaagttaggaatctttggtgggaaaggagaatcagaaaaacaggaattgttcactcctgttcatagagtttctcggcccttccaaagagctgggatgtgaaaaactaccttcctatatttgattatggaaatccccagggaagtggagttccccacccagaactgacctttagcatgtcttatctttggtcttgaaaagttggcatttggcagctctcgggtaacaaactgtgcctcattgtgctttggtttagaggacttgtttaagccagtgactatacattttcttttggatgaaaactataagaaaatactctctggataatacatttatttgagtaacacttggtttctaattttagaaaatgccccacttttttatgatgtgctagggcagtggatgaggaggagaatcacgtggaatttatctagtcttaaggacttcaaacataccctttggcatgtcagttcaagcaggtaaagatattttgagaaaaacaacggagtaagtaagggacattgggttgttgtaggagcattaggaaagttttaaaccgagaaagaccctggcacat

SEQ ID NO: 38386 - DNA, 2032 bp, Homo sapiens
ccaggtcaaaatgtggtctagcagccttttcagagaggttagttgagaggggtggttttacagaacgctgcagttgctatcatcatcatcatcatcatcatcatcgtcatcaagtagcaattaataatcaaatagcaattaagtgcctaattttttgtaccacctcataaatcaatataggggggcttgttccctgggggagctactttgatgagaagcagcagtataaaagaccggaaagtcaaagattggggaaaggcaggcgtggggcagaggcagaaggctcttgccaaaccatcctgcctcagttcctgatttttcaccctgcctctccaagcgcgggagtggaggatcctttccctcccacttcctcctttgctctttacccctccccctccccccccctttttttttttttgctgtcctcctggagcagggctggttctgaagcttggcggcagcccctacctgctgacccaccgcctccgggcgcacgggaagaggactgagagccctgaaaccccagcggggcaggagccagcattctgagcatgtgcgagccagccagggggctagggcggatttggggggtcgactttaggtcgtcgccctaagcgcaaagcgaaagagcggtgagagcaggggcgggcgacactccccggagcggtgcccctgcgcccagggcgcagcgactgcgccctgccctgcgggtgtgggcgagttggccgcgtgtgtgcctcgctgtttgacgcgaagacgagccaatcagggcgggcggcccgagctgccatgtgacgggcaaggcggcccctttccccagcgcggccagagggaggagagaaccggggctcgccgcgagccttcgagagcagcggccgcggaggaggcggcggcggcgggcgggagcagcggcggcggcggcacaggctcggggccagccgggcgcgcatccccgggcgccctgcgcggtggagagcttggcgggctgcgggtgccgcaggacaggagtggacaaagcaagatggcagggatcttagcctggttctggaacgagaggttttggctcccgcacaatgtcacctgggcggacctgaagaacacggaggaggccaccttcccgcaggctgaggacctctatctcgcttttcccctggccttctgtatcttcatggtgcggctcatcttcgagaggtaagaagggctgaagcccctcctcccctccccctgcgcacacacacgcgcgcacacactcgcgcgctctctggcgcacgcccccgcgcccccaacgctcgcgttcacgcctcccaacctttgtgttcggggaggggttgctgacccccctgccccgctggctttctgggagccagaaagggtctggcttgccacggatttcctcccgggcgccggggaggagccgcggagcgttagggtcgccccctgccctcctcctgggccctgctctcctcccggcaagggcaggcgaacaaaggtgagcggtggtcgggctcaggacccgccgcattccgcggggctcgcccctctccgccggcgcgccacgcaaggctgccaggcagggcttcccgccggggcccgcgccacccacctgacagccaggaacgttccggacgcgcggcccggagggaggaggaaccgcgcacacttcaatctttatgctccggcacacggattgtaggggttgtgcttcaaaagaattcgccagggacttcctggcttctggtcgctgtttggtttttatccgtgaaactatcaggcccacagtcctggcaaataggggataatagcatttcaggttatcagcggtttctttaaaagaggatgtgacaggacgggtccacatcctgcaaaatggtgatattaaactgataaccctgtcctgtgaataatcataaacttcttttttggtactcgaaggcacttaaaattttgaggaattgtcatgcaattgtatagttcctcggtttggttggatatctccattgtgtcacatacaaacttgtgttattctcatgga

SEQ ID NO: 38387 - DNA, 805 bp, Homo sapiens
ttttgacttcatgatatttttccctggctgaaggtttcaagttttatgtagtctgatcattcagggtttttttttttgtttgtttgctttgttttgttttttccttagagtactttctcttgaactagtcagtttccccagagaacagcttttctctagcctgcttgatggttataagcctgctgccactgttctgagagctgagcagtgagatgaagatttatcttaatcctgttttggtcactgtactcagtgtcccaaaagccaggtcctctgtgattcaaccttcccaggagtaaaccacccctctctgctggggctggggagagcagtcacctggtttcggggacccaatctggaggtgttcatgttccttgtacagactttggaccagtatcctgttccagctgaactttacaccctgacctccagaggtatctggtgcctacagttgtcaaacatttctggcattctctagtctaaagcctctctactcaaagtgtgaaccatagaccatcagcctctgccccatcaccagggagcttgttagaaatgcagcacttcaggctccaccccagatctgttgacttggaatctgggcatcaccaggtgattctcgtgcatgtgaaagtgtaagacatctttctttgatttccatccctggagacttttatcactggagctggttaggcttcagctatctccacttggcttaatcagttaccctggcccttctgtcttgggtgacatctcttatttgttatcatcatcattagtccttttagaattttaccctgtttaattt

SEQ ID NO: 38388 - DNA, 867 bp, Homo sapiens
cagagcaagactctgtcacacacacaaaaaagaaactgatttaataataactatggttatctgataagaaactgatttaataataactgtggttatctgacaagaaggggagaatagggattgaaagagccagaacaaagttggaaggtgaaactttggataattttaaatttttgcaccatatgaattttttctttattaataaactaagaaaataaattgaaattaaaaatgaattccattaggataatggtgtagccaaggtatattgtaggcaatgatttttctccttcccgtatttttgattaagagagacatcaaaggtgagtgtagatggtgtcattactactactaaaaaaaaaaccccaaaaaaccccaaagttggcaaataacgtttataggcacaaggtcagtacattttgtaccctacagtgatttgctgtgttttctgggtgtgtgtctgttctagtcagttctgactgctgtaacagaatactatcaactgggtggcttaaacaacaaatatttatttctcacagttctggatgctggaagtctgagatcagcatgcagatgtggctgacctcttggtgaaggtcctcttcctggttggcacatggccatcttctcttgtaacctcacatggaacagactgagagagacagagagcatgcaagcatgggcaagctctctagtgtctcttctaataacttctaatctaatccgagaggttcaccctcatgatctcattacctctcaaaggctccagcttctaataccatcacaatgggcatgtgggtttcaacatacaaattttggggagcgcagcattcagtccatagcactgaccccttgagctgcttgagc

SEQ ID NO: 38389 - DNA, 769 bp, Homo sapiens
tcctagtgtgtcagtagtgtctgcattgcgcgacaaggcaggaagatgggcacatggccatgggaggatataaaggattacatattactgaagatttaacccccaagcaagaaagtcaaagtcctgatggagaatgagaggtggaaggttttgctgtaagtatgctgagatctgggacaggaaatgcctccaggtcacttcaaggaaagcaacttgaaaaaaatatgagaaactggcaatcatcagccagaggagatccttaggtaggaaggcaaacttcctgactaaaggcagttcttttccattgttttgttaacaactttctgtatgtagttcaaaggcacctagtggactgtggattgatggatgagaccaatttccgtagcacctctctggagcaggagagaagccaaaaatgacaactcactgtttgtagatttcacaactgctagttgtgaccctgcctagcttagcatcacatcactacccagggaggtgagatagagaagagaatcaaccttgttttcctactgtgtgtcaggcataatgctgggtgcaaaactgcctcagtcaagccacttatcccctgaaatgtagatacattttattcttgttattcatgatagttacgttccaaaaagtcactggaagcgctgaattggccaatgctggatcattactcctaggagaaatacagggttaggtttccgggaccctctggtcacatttcatcaactgattaatacgtaaccttgctttatgtgtattt

SEQ ID NO: 38390 - DNA, 420 bp, Homo sapiens
acggggttttgccacgttgggcaggctggccttgaactcctgacctcaggtagttcacccgtctcggcctcccaaaatgctgggattataggcatgagccaccgcacctagccaggccttgtttttacaaaaaaaaaaaaaaaaaaagatgggaagaattttgtcttggacacctgccatctccatcaaagcccaaagtcccctgggcacatacccagcagccttacactgcccccacatggccttggagtctccctgaatactctgcctgagccagccttctctaagaatgcttagttgctaaagctttctgccccctgtaaaaccaccagtcagcaactcagttggcatgggtccaataagtaacattttctcattttttttttttttttgagacagtttcacttttgtcacccaggc

SEQ ID NO: 38391 - DNA, 572 bp, Homo sapiens
cctcaaattcactttcccttattgcgacaggggggccaaggagcccagctcggcgcccaactcccttaccttcgcaggcaggcctgagtcccgccgccttccccacaccagatccgcgcccactctagccaacagccggactctaggctcagctcccgcagccccgccaactttccgatttcaaacctagtgcacttcccgccacccgcctccaggcgcaggctggccttctgattggccgatagcgcaggctctccttgacaggattggttgaactcacccttggattctcgaggggaaaatgggggaacagggcattctgggattcgtagttcttttctgaacaacagccagagtctccgctgtgacccgaaagtattaatagcacccgaagggctcgcccacgacaagtcatttatcggcttcaaataaaggtttctggaacaaatacagatattgacctttaatcgtatcttttgcaacaaatacatcctcttctttgtattcaccttgtaaagttgacttcaattgtgagtgggcagaaacattcagatggtcctcagaataggttt

SEQ ID NO: 38392 - DNA, 690 bp, Homo sapiens
gatgggcactatcttccacccgccccgccccgccccgcccccttgcctccaggctcagtaattctgcatcaaaaacatttctacataatcattcctttctttttttttttaagcaattgttcaaataaaaaaatggtagagctcttgctatatttctagatgaaaactgcattgacttaacaaaataaaaataaatgttcctgtctgagttttggagatgtgtgtgtgtgtgtgtgtgtgtgcgtgtgtgtgtgtatcttattctcttagctttggaatgctgatgccctgctcaccctggccaagcaagaggttgcgccacaggtccacatgtggatcccagaggaagtcagaatgcaggtaggcaggtgccaggaaattcaaaggcagatcgatgtacaaaggccttcgtggagtttagcaaccagcatcctggactggagtcatcagaactacattctagcctggccctgcatctaaccactaaaactccagaaggccatttagtgttggtggcctcagtttacccagttctcaactgaggagtttagtatggggttaaaatggaaggttcattcacggtgtgatattcttcaactctgagggtctcattcagtccaacatattgtgctttgtctctccaaccagctcctctattttgtttgctctttgtgaagcactatcttcaca

SEQ ID NO: 38393 - DNA, 688 bp, Homo sapiens
cacataagttatctgtgatgcagttatgggtgtctaatatttgatcctgacttgatctcatacatgttctgccttgtgttttagtttcaccaaaagagattgcctaaatattagagactaaaacctttagcctgtgggtttccctaatcctaaacttaatgttgtcaacattgtaactaacatctgaccccgtttacaggagctaagagtactgcttggagagcaaggataaatgggtatagtctcatctctgtcaccaactaaccatgagaccttgggtgaaagcacagacttctcaggaaatggttctaagttttagagtcaatactccacaagaccacaaggtggcgataactcctttgtgtgaatcgacctttagcaccgtaagagagtatttcccaatctacagaaagtaaggttaggccttttccatcaacatgagaaaaagaaaggatttcaccaatgcttgggcttgtggaatttagttaagtattaaaatactttaaaataccaaaacagagcaacattttaccatataatgttacttgagattagaaatttcataagtcaaattttattaacccttttccattattttcttttcaaaaatcattaattttttaaacctaaaggactaacaaaattatcgtacaaaccagtggtattattatgagaccttttccccttg

SEQ ID NO: 38394 - DNA, 1713 bp, Homo sapiens
agctcactgcagtctcaaactcctgtactcaagcatttcactggcctcagcctcctgggtatccgagactataggcacatgccaccatgcctggctatttaaaaaaaatttttttttttttttttgtagagatgggatctcactgtgttaccaagactggaagctgtttttattaacattaaaatttacatttgagcctagtgaagttgcttgtatagtttgttgtatagttgcttgtagaagtttgttgtataaggacaagcatacacagacttgaaagcaagacaagacatgtgcagacctacaacattccaaatcagtgacgagtttatgagaagctagaaatgggtactgagatgactagagaaactaagcgttagagctgtttaaaaccaagtgaactgggctatatgttaacctccaacatgttgaaatgtggcctatgatccacgtgagtgtgtatattactttatcacaggtttgaagaaagagattagtgtattcagaaaaaaaatgaaaaaatgtttgcaaaacccctgaagctcttctgtggaagttgagggttctctggagtatagttggaaagtggttagtaggaaagactgccgtaaaacttgaatgatatagtggattgaaaaacatatacatctctctttagcaattgattctgtgcccgacacggcttaaatgcataacgtggattattccctgaatcatcataatgtttttgggaggtattatccctattttaaagacaaggaaactgaggttttcaggggttaaatggatttttcctgagtcacacaacctgttagcggtacagccaagtggtgacctaatgaaatggagcgagctctttgctattgtcactttaaaccattttctattttatctgggaaatgtttgaataatgtagacactgtgagaatattttgctattgagcaataggaagttggtacctattgctcaacgatgtgtgagggtgtatgcagtttttcagttaaattctattctcatttatagcacagttttagtatgcctgattccataacgtgctatctaatgtggctgctctaataataatttctcagtccttgggagtgtttttagctgatgtgacccgaaattcctattcctatatgttgtccaggcctcaattcctggggaaccgagacagtgactgggataactcttggaatgggtcagatcacctctctctgaaagaggttatctgaaagataagatgaaatggagaacacagttgtgattgcagaaatccttcttgtgtgcttgttaatgctctttgtctgttgtgccttttcagggaagtgcccaagcttgggaggacatggagaacaataggcatattggagagtgagtggggtttggagtcagagccccttagacttgaatcctactctgccagctgtgcagtcccagacaaatccccttacctttctgagcctagtttcttatatttaaaatgatgttagtgctcactttataagattgttgtaaagattagagataatgactattaagctcctagtagtgcctagagaaacagtgaatgctcaataaatgtaattgctgttaataaaacaatatttacctattaaaacatcattaatccctattcgatgaaatgtcatttgacactggggagtaatctaacaaactacatgaagatagtgataattatgttgctaact

SEQ ID NO: 38395 - DNA, 4634 bp, Homo sapiens
ctatacaatttcagctatctgtatgaatttttttaaaaagaaaaggacaaatgtccattcacatttggtattacgtgaattcagccaaagccagtggacttctgaaagcctcagtttgtattctttgctcgccttcaggtatgtgatccagtaacaatgaagacagtgagtaatgagtggccacagagaattcctttttaatagatggctatgatgcaaatgttgaaagtagattcattctttaattcattggataaatattcataagcacctagtatcatgtatatgcctcaaattttggctcctctcacatttatttccaaattttaaggcatgataagatatacttgaggaccttttcctcaaaaacttatcctcataagtgttatccgtggcttgggtcaatttacatcacacataggtctgaatgcatttttttctccaaggggagaatgattaatcttatgttttgtggtcaaacccctctgtaaaaagcagttcacttctgtcctcccgcataaatgaaggatttcaaagacttttgttgaactcaatctctcttttatacaaattgctctgagtttgtcaaatgaaaagaaacttccaattttagaaaagaaacatacatatttagacattagggaacttatatagaataagtaggcttgttgtttataaagaataattcacattgtatattatcctgtgttttctgtcaggtacctccaagtctgtcactgcatatgtttttaaatgatcattgactgaatgatggcttactaggcttaagcttcacacagatagggatcatgactcttttggtttttctgagatggggtctcattctgtcacccatgtaatcacagccaactgcagccacaaacacccagacccaagtgatcttcccatctcagcctctcaagtagctgggatgacaggggcacaccacaaagccaagctattttttaaaaaaatttttgtagagacagggtctcactatgttgcccaggcttgtctcgaacttctgggctcaaacaatcctcctgtctcaccctcccagagtgttacgattacaggcatgagccaccatacctggctaggaccatgctcttaagacaactgtgtccttgatgctttcatgagttcctggtatatttgatgtttaaaaaaattttggttgaatgagtaaatgaatgaaagaccctaagagagataatattatggaagagtgtcaatgatttagaaggactcattcatagtctggaatcaagcctatagaaaatttcaaaaatgaaggtgaaaactataaattcctctgagggagccattcctagtgtctttctagccaagatgtgccccacccttgattcttgaacctgaatatgtgggttcctatgtgcaaataagctgttctgaacttgagccagcatgaggcacactgcaaaggccatgctatgacagtgagtcagccctgagtacacgacagactcactgattacaaggtggcctgtcaggcttatcacaaagaaaacagtagcatagtgactgtgtctgtgtgagttctggctacttctgcgtggttgcctctgatcacagcactgccctagttttctcacgcctgtaatctcagcactttgggaggctgaggcaggcagatgacctgaggagattgagaccagcctgtccaaaatggtgaaaccccatctctactaaaaatacaaaatttagctgggcatagtggcgggcgcctgtaatcccagctactcaggaggctgagtcatgagaatcacttgaacccaagaggcagaggctgcagtgagccaagatcacaccactgtactccagcctgggcaaaaaaggagactccatcttaaaaaaaaaaaaaaaagaaaaaagaaaaaaacaaactcaactactggttgagactagtgtaccttactcaaagtaatgcagcctgttcatgaaattcccattacagatggaagggttaagatcaagtggatcaccagccacagccacaaagctaaggggcagaggggagttggtgggggggaaaaatagaactcttggagatgatactcaagtaaaattcatgggtcacctccctagtgacgttaagtattggtagtgtcatgctcaagcctatactcaataaagtggtaacattttggcaatgtatttggtgagtgactttcaatcctgtttctattaagattttaaaacatagtaagatagaaggaaacttgaggcagagtaatttctagaaatatgggtaaactcatgtttctattctctttgtgttagataccactccagctcagccagtaaaatcccctctatacattttgaattacaatttaagatatgagcaaaaaagtaaaaaattaaaaacaaaaacaacctacccacaacgtgttccatttgtcatgttctggttgagggaactgttagtccatacaatggtgttattcacacatgcttttcctggaatctggagttcttgtaactcaacgtcgtagtcaataaaaacatctgtcattgtgccaaaaatgagtagcacgcctggctgggctattccatggagaaatgcacacaaacttcccacaaacatcagccaaatgtcagttgatgaagaaaaccgaaacttgaaaaacaaagggttcagagatcatctatgggtgaagagcaggagaggtaggaggactacttaatttagttactagattctcatgaatagtactcaacaccaaatttcatgggaatcaccttaattgagtggcagagttcgtatactaattatattgaaataaacggcacggtacatcaattatctaaaacattagactcttacattgttagatcatgttataaatttcctgctctctgaattcattctgtttatttcaggagctgactttcgtttttagctactcatctacaacttaggggaaaataatcactgtcattgatgccattgccaagtagataaactgtgtggggcattgagaaatactataaattgttttgttgaactgatagtgactatgaagaatgccaatttctgcctagaaatgcctccatcctgagaaaatttggagtaaacacctatactttaaaatttctaaagatttgtcataagaataaatatatatatgtgattgttgtgatgactttccttacaaatatgataaccatgggcttagtgataattttccaagacatttttctgatctattggataggatttgtatgctttatgagcaatatatttctaatagttattcagcatgttatcacataggcaaagcctatgactgaaaaagtgatcactgaagttaaaaacctgccaatatgactaaagatttaacactcccctcatgatctaaacaatttatagctgcacacccactgccataaatcaacacagttttattaccaattgaaagaagccaactctaacgccatcacctttcttctcatcttgtaacctgatgagaaaaacataaggatttaaagaccaccctttccaatacaatgggaaattctccctaggtggtgattttatgagttattctttagtaagaaagaaaatccccactggctggaaaattctggccaaacctagtatcttaaacacaagctttattcttctagatttccctcttctagagatttcagtatagctcaatctcaggttcactagcgattcacagagatgaacacctgagaggtatggagagaaagtaaaaagtcctctatactcccagttataccaacaaataactctttgccctcagtcatgaccctcaatctatttgtgactgcatttcctcatgggtaagttgaagtggttggattagctaattttaaagcttcctcatgcttaaaaatattacaactacattaaataatgttgataatgatgaaaaattcaagaacatgcccacacttttcatagaatcatatttccttaatatttcccattcatttcatttcccataaggccatgtttaacctgtatttgacctcttcaacttcggggatcttgacttaacctgagtcacgcagtccatgaatacaccctggaccttgctgtcaccaggaactactgtctgacatgtttaactccttggcactctgtgactgcccatgtacctcattttctcgcttccttcctccttccacacctatttgtcaacctcacttgagccatgcagtcctttaaatccttcatttccttccattgctaaaccccattaagattttgcttccttccccatgcagccaaggtccctctgccaggcatttgaaccacactctcaccatcatcctcaattattttctctacatcatccttgtaaacttcatcctgcatccatccagctgtttgccctcttctccttaagccaggctgctgggcctgctggacacaacctcaccaccttgtgaatggataccaacacaggcagagtctagtactcagctgccctaagcttcccttctggcccagaaaagaatcctaaattttttctgagactccccacggtctggcccttggctctctgacctcacctcctccaactatattctagttctcaacaccccacttgcctggcctcttgctgacctttgtc

SEQ ID NO: 38396 - DNA, 4249 bp, Homo sapiens
ctgtgctacagtgacagaatgtatggccctttctctctcccatacctaaaatattcactatacagctctttgcagaaaatgtcaatccctgtactgtgagatcagttcagggcagcctgaggcccaggaagaaatctctgaggacctgatttacctaccctaaaaattgtgtggagcaccagccctccagccagccctaccctcatggaacttacaatgtggcagggaaggcagacattatctgggaaattaggcgtcaagcaggatggcagtgaggaaaggggaaatacaggcatctcctgggccctgatgcagaggagctgccttgtctagagagctggagaaggctctggagcaagtgcttagcatgagatgttgaagatgagagcaagttttccatgggaagaggagagggaagagcagtccaggcagggaaggacacatgcaaaggcccagatgcaagagacagggcagccgggtccaaggctgaaggagcccagtgaatctcagggaggcggatgggcaactcgggaggatgtggctggttgatccttcagggcctcatgatccttaccactgagaacttgggaccttatcctaaaggccatgggaagctaatgaagtcttttaggcaagaaaggatatgatcaaatttatacttaaaaaaagttaccctgataaggcttgggacttggagcccacacccacagaggttaggaaatgggtttgagaagaatagagatcccaccagaccaagaggcagagatggctctgtctgtgttctagggttttgcattttctctgcagagatttgttccactttccatttaatttccacccaaatgctattttttgaaacatgttgaccttttctagacttaattaaggaaaaagagctttttccacattcaggccaagatggtaagaagaatctaaatgtcctcaaagccattgaggagctgaggacagtgaggggaaccaagccaggcccgggagtggagagcacccgcccccaccatgccccacatcacactgtgaatattctgatcatgtgagggtccctccacggcttttctcttgtgaagtcttgccctctgtaaagactttcaagaccccagcgccacaaactcccccttcacagagctgctcagagagaacagaactgcccctgctcctcttcaatttggatgtcctttctaaactacagttttcttttctttcttttttttttttttaaagcccttaaaacgtctttcactgctgacatttaaaaatgtaggtaggatacttttgttattatcagctcagcaaatgatttctttatctaaaagattattagagaaggaaagaaacatttaatatatgctaagaaacaaagaaaatagaaaggcattattttccagataagctcactgtcggttgatgctgtgtgtcaacactgtgggtgacccagtctgggaatagactaaaatgaggcccttccagccctgagggctatggctgatagggaagggaaataaatacacggtgatcccattggccacgtaagtcctttcttcagaggcaccgttgaggtagaggactaaagaattgcttaggaagaaaacagaatgtaacaccaaagttaactgccacagcgattctttgtctctaaatgtacagttctttcctcttttttttttttttttttttttttttttgagaggagtctcgctctgtcgcccaggccggactgcggactgcagtggcgcaatctcggctcactgcaagctccgcttcccgggttcacgccattctcctgcctcagcctcccgagtagctgggactacaggcgcccgccaccgcgcccggctaattttttgtatttttagtagagacggggtttcaccgtgttagccaggatggtctcgatctcttgacctcatgatccacccgcctcggcctcccaaagtgctgagattacaggcgtgagccaccgcgcccggccagttctttcctcttgaccaagcaaaacacaactccagtatttgatttctgcaatgaaacttgggcattttatggcaattgtagcatcttttaaaaccacaaaatgggcattttccccctaaatagcttcttaatccatttttaggagtcatcccctaatatttgtcaccattattcttggtactaggaaacaaaaattattcaaggggcttgcaatctagagtggggtggagtgtaaacagaagctcctagacagggaaatggaggcttcaaccagagacaatcacagtgttacagagcacagcagggggaaccaaggtgaggggggtgagcagtgaggggacgaggttgcccacagaaaagaacttctattaaacaacagctcataaataagttatcacttcaaatgtttaataaaaaccactactaactcctaatattaaaaagttttaggtataaccactataatttgtctctaacatctctaaaaagctattccccctcaaaatgttgacaaatactgtcttttattcccagtctgaagtgtgaataatatttgatctctgtgctcaagccattagcaatatgtgactcccactggcttgggtgacctaaaaactgaaattagatcctagaaacaaactttctcccctctaaacatgcatccacagctcatttttttttgcatctatatttttgaaaaccgggacaatgaagaaatgagtacggtgttggagaaaagataaagtcggtgtagttctgcattaaaccagctttcaagggtagaatttgtgatcattgaatctgtgattatcagagcaaacagaattgtgctttcacaaagccaagttaaaaaagaagcccactggtatttttactttgagcagattattcaatctattcggccatttgtaccacacacccatgtacaccactctctctctctctaagagattgatacatgaaatagcattgctataaagaagacagcaaccaagagtcatctgtattgtatacaatgttgtgaaatcattaatgcatcctgtaagtttctatccaagtattgtagcgttgtttacactggacaagagaccaatgtttaataaaccagaaacactccactccacaaagtaagagttaaagggaagagggaatggatttgcagagacaagtataagttacttacctgtgaatatgaatttgaggaagccagaggaaataatggactccactgtggagagttaaaaggtttcacaaccttttccaacctcggttttcatcattctaaagcactgaacagaattcaaactttttcaagaacattatctatttgcctaaggatcaatgtccctaagggcagcccaagcacagttcagtgacatacgagaaacatactcagagcaataaccccaaacacagagtgtgcttgggaaaccctctgagggtgtcaacaggccttggaaattgctgattcaccttggaacgagaggcaaattgagcagagtgggcccagcaagagccctggaattcaggctatcccaacccttattttttacaggcctgtagttgtgaaaagttacttaaaaacataacaagacaaaaaaaaaaaatacctttaaactttccccctcaatataaaagattgctcttggaaaatccctggttgcaggatccagatgctcctggcccagctatagagttttgtggagacaaataccctaaaagaacatttgaaacagccttgctcaaaagtctgagtgcacagacaactcttgcaccctggcatggacacaccagatgaagctctgtataagcaaagatgaacgattttctaaaggttcaaatgaacaggtcttgagtcaaataagcatgtggagctcctccaatatatttgtgctgcctcttcctctcccttcttgtgaatctttccatttttcctacaatgttcttattttttctcctttgcctgagcttacttttccctaaatgcctctcactccagccttcagcaatgaataataataggcaacattggtcaagacttggttgggtgcctggcccacttcaaaaatgttatttgtatcacctcatttgggcctctcaacagccctaggagttgggtgctatcatgtcatttctattttatagttggggaaactgaagcacagagaggttaaataatcctcctaaggtgtaacaactagtagatgtgaagccacatgccagtctgtgctaaccttcttccactctgtgctctgaaatg

SEQ ID NO: 38397 - DNA, 1523 bp, Homo sapiens
gtgatccgcccgctttggcctcccaaagtgggtttgttgttcttttaaagaaaaaagaccactacttattttaaagggtgatagcagtgtcctgactctacctagacagatatgttcattcatgtgctcattccagttgaaccataataactgcaattttcaaaggaggaatacagagtctgggaaatcagaagagtatagcaacaaactggtatacgaggaaactgaaaatgaaaaatcagcaaagtggtatttgtacctgcctgagtggctacagtggtgaaggtgaagggtggcaggctagattagcaccatctcctcccctcctcgcctgcggcctcagtactttccactgtggtcccaggatacgccaggtcaactgtgatcaactctgacacagacaaactctgggaggggaggaggcatcctttcctattctcagcggtctcagttccagagaccactttagtaagctctccttgtcataccttaaaacataaattaagacccataagtaattccaaaacctcattttattatgttgtttttatctccttgctcgcccatcttaaaaaaaatggtaacaccaatctcagagactgatttctcctacttattctcttaggagggaaggagtgttaaataagccaaggcatgctaacaggaaggaaaaaatggagattatgaagaataatcacaatttgaaaactattaaaaccacgcaccaggcagtttacaaaatatttatttctttgttatattatttctgctgctgaatttggtcaagagattgtactaatcataaaatgaatgttattgatcattttaaagtctcttctaaaagtagctaaatttatactgctgattccttttgaaacatgcgacctacagcttcttggcttttatgagctattcaagagatatttagtcatcacgttgtgtcacaatgggagtgactcacagagcaaggagagaacctgaggattcctcacacatgtagtactcagagctctacggaaacccaggcacctcgacctcaagaggatcagcctggccagggtggcacaactcttccttccccgtgcacagcaggaaagctgccatcagctgagcaagtccaccaacagtttctgtgtcccacttcatctttaataaggtaactgatgacagttttgtcatttattcttttatttatcaagtcaatctaaactttctttgattttcctcactcttgcagaatgaatcggtggtctttcaagctgtggtcaatgttgctacttcttttaatgtaacacattagaacccagtgatgggagctgggtccatctcaccatagaaatgacctcggtgtgacctgggatcttgccttgaactcctccaggactctctttgaatgtcctttagcaccctagtgtcccaattcaattcatattttattttctctgtgccttcttgacactatctgtgaatcttatgattaattggaaactggagggggaagtctccaaaaagcacaggattct

SEQ ID NO: 38398 - DNA, 3758 bp, Homo sapiens
tacctcctgccctcagggaagcaggaatcaagggcaaatgtaactaaccagaggaggagcttcttcatccattgagtaagggaacttaccctcccacgacgataaataccaactcaactatatcatcagcagcataataattattataattgttatttcagtcagactctcaaaaaagcattcgttgcttaatgcaagcacatttaatgtagggtcccttggtgccattaaaaaatttttttttcagatttctgggtggaccatttgaacacatttctcacagaaacataattttttagtttatgtcaataggttccagtgttcatttttttttaagtgtggaagaaatctctaaaagccacctgggttttttttttttttttaaacaaaacaaaacaaaaaccagtttttttttacttcaatgaaaaggaaaaaatgaaaaaggaatgttgtgttaagtcaaccgggtttacaatattcaaatatacaagaggcatacatgttcagtggctttcagtattcagaaagccatgcaagagaactccaaaaagagaatactttagaaaatcattgctcaatgttttctatttgatgtattttggtaaacaacatagttgttgattcaacttgggccacaattgcaacacattggaagtaaataaagattctacaaactcctgacagtgtggttgactagctttggtatcgctttctaaaaggaaacacttcatgaagttatgtggaaataaaatcaactggtctgggaggaactatctagaaagaactctacattgcttataaaaagtatacctcacaataatattgagatattttctgttcttttttttaaactgtgtcatttatttttaagaaacagaggaaggtgaataagagaagtgaaattaaataatcctattttaacttttttactaggaaaacaaactcaggaagaaaaagaaaagcagaagtgatcaaggagagcgctcgagttgcaatattttcctttggctgctgacaggcagttactataaagcattgtgcatggtgtatgaaagacaaaactagttctcctttcttggtttcttttgaatctttgtgatatggtagagaaagtttgataaagtgttcttgtgcctgctgtcgactgataatgtgttcatctctttgcagttcttccttctctttcacacagtttagagttcagagagttttagttctggtcactctctggcaagtgaccatagttatgacctctactctacaccagaaatatcttgacaattacatgagataaatattacataaacacttcccaaaactttgtaatgttatcaaaattggaagtgtgaatattatgtattattataattgctatcatccttttgccccagcgattcagaggtctcaaagattaatccaattatcactagaactctggagctacagtggagacttccttctttccttccttttttccttctttgctgtacaacatttactaaacatcaacataatgccaagtatcatacaaggaactggtaatgtagagaagtatatgcagagcccagagttgagtgggaatacagactgcagtggtagaacagaatggtctgggtatcagtcccggaattgccactacaactgtagctggagccaattaaacagagcttctgaatgtgtttcctcctctatacagtgaagataattttgtcgtaaggtgtaaataagataaatatttatagatcctaggaaacggcctacaacatgttaggcactcaatgaaccatagcagttattatcattcctccctgacttggtcaaccaggaacttgagaatcatagatttgctaggaggatattttgaattctgtagggtcagttggccacccaccaaagggtacccccagaggagctgggggtcaacagcatggggtaaaccttgagggagggaacagatgggaggtgattggatgaagagatttgggtgaggacacagagccaaaccatatcagcctcttatcctcctgatgacaaaaagacattttaaaatatttatatagagggaaattaatgcttgcagcagcaggatatgagtaatttttataagtaacccaacttttccatgaggccattaaaaaaagaaactcatcaatgtgatactaccaaggaaccaatgactaagtttccagaaaagtagttctagtgctatgatattctggactcccaacactaggaagttctagaacagtggttctaaactgggggatattttgtcctccaggggacatttggcattatctggagacatttttggttttcacaacttggggaggggtgctactgctgactagagagtagaggccagagatgccactaaacatgctaaatgcacaggactgaccccacaacaaataattacctggcccaaaatatcaaaattactcagttagaggaatcaatgcctaaatatgagcaatacatagagcagactgcctcataaagtgaaagtgattcaccctgccatgaagataacaaagttcttactgtaacggcagacattaggtcacttcacccagtactctccaaggtagatgttgtatttctactttacaggtaggaaaatggaggctaagaaaagttaatttgtccgagggccctctgatgatagtgaaactgggatggaacctctgcctgcttgcttctgaggtctgggctcctaactactgctctactgcctcgagccaagagatttacgccctattaagcaatttgttgtgcgataaattggaagacacagcagataagcaaacaactcaagcaaccaggtcagttcctggagtttctgaattgttgggaccaaggggccgtgcagaggtaaccacagctggcgtagtgtggttgaggtagccctattagccttttagttgctgttactaatttatttctcagtggtcaatgaaccaattggccatcaatcagctttgtgtataggtcatgttcccatggctctgacccaggttgctgctcagagttggcatcgtggctaaaatattactagaggtcaaagatatgtgtgtgtttgtggttgatttagtcgagtgatctagaggaatctgaaccagcatttctgggcaataatacttgagttaaggagagtgtagcaaaactctaggttagcattggcagtccctaggattcagactgtaggcctaaatgaccctcagtccagagctgtacctaatgaggacaatacattttaatgtgagtccattcttaacagcaaaatttcctctttgcttgtcaccagggaaaaatgggtttgcatagaaaaggtggagattgagggggaagcagaatggacaaggagtaaagagggaatccaactacttagatttgagctttcgttcttctttggtagttgtagaggtgagcttaccaaagcatagatgacaggcaatgtggtatacaagttactacactccaaaagtctggggttcttacttattttgtgcatgacatccaaagtagcctaataaaatcttttcacagaaaaaaaagctttactttcctttgccaaatttttaactttttattctgaaataatttcagaattattgaaaaatttagagactaggacaacccagattcctcaaatattaacactttaccacatctgccttctcattcctctctatatacataggtgcatgtgtggttttaatgtttatttatatacatatcattattattttcttaac

SEQ ID NO: 38399 - DNA, 520 bp, Homo sapiens
ttgagttaagacaaattcattaaaaaactaaactgtttaactctctatagggcaatgaaatttcttatcaataataacatcagttttaaaatgtgtttcttttattatcttacagagaggaaattaaagcagatactctagatgcagcaaacagacttttttaggcacacaggcattccagtcagacaggtctggaatttgaatactgactgttgcctaatagctgcgggccctttcacaagtcactttatctcactgcgccttagattcattctctctaaaatgggtatttacacatacctccttcacaaactagctttggaagctgatgagattatatatctaacggaagaacaggtatggatgttccctgggtaatcaggcattggtgggttagcagccatcttttttatcattccactcatatacaacacatagctcagatttgttctaaataaacacagtagctgttaaacatatttaaataagaaaagtaggaaccaaaaaggaatactgtgaa

SEQ ID NO: 38400 - DNA, 958 bp, Homo sapiens
cctttccccggggcacaggtcgtccggggctctgctgaccccaacagtccggatcgcgtagcttccgtgggctgcagtggtaggcgcagctttaggtgtgggggctaggggagggaaaggataggtgttactttggaaagacaaaaagagataaatagacacaaaaagagaaaacttaggcttaaagaaaaaaaggtggagcgggcagcgttgtgggaaagagtgggagagattcctggattgggaaatccagaggtctgtgctctggccaaagtcactggttctctatttgcctccctgcatagtgttgggcgctgtgcggcgcggaggagacaggactggggacaggagagccggggtctggggagggagggggcgaccggaccggagcgggaggagggaggcggcgagggggcttgatgctgcactccagtcttcgcgggtgatttatgccggttccgggcggccgaggcgatggtacgagaccgcgccggggtcaagccggtccgacgcccgctggggccgcgctgcatagtcaatgagcgtccccgcacctccgacttacaaagagcggccgccggctggcgggagggaggagcgcgagtgcgggaggggctgggctccctccagtgcgcccgtgggcgcgcaggcgcgagcgtgtgtgtgtgtgtgtgtgtgtgtgtgtgtgtgtgtgtgtgtgtgtgtgtgtgtgtgtgccctttcactgtagcagccagggctccaaacattcctttctgtactgaagagttcctcaattgttgttgtctttgtgctccagtgttgccaacttactggaattcctgacgtggttgcacagcagggctcaggctgaccgtactagccagctgcgtttgtgtatggggccgaccccgccgttaatcccagaataacgcagaagaggggaaaggagggagggagaacgggaggtaggagagca

SEQ ID NO: 38401 - DNA, 910 bp, Homo sapiens
agaataatttgctcccatttgttacctgctctttattgcatgctacaagtcatgaatagtcacaaacatcaaattttaaacacagtagcactttaattctcactcaacactatcatctggaattcagtgcattctaagaattattagagccaagtacattaaaaaattgtataatctgagaaatagggtgcacttggattgaattgatcaatagtcatactatcgcaatttgaataaaatgaatatgaacatctatgatttatttctctttgggtagatgtgccattctaccccaaaaaatgtccaacattgtatgtgtatattagtatgtcaagtctatacctgtaagtgtggtggcttaaaaggtcattaataaaaatgtgtcaattcccagaaatcctgtatgactgccaaagtagatgaactgtgtcagtaatccaaaggtcataagccctgcagcttgatggtcactaagtagtcaattttttacccctttgccaaggtgttttcttagtttagaaccttcccagaaaatctctcttaggagaaagcaaggttccacccaacccttggaccctgagatgattaaggtaactgttttacttgataaaccgtgaaggaggttagaaaaggaaatgtttagctctagctgctgcctttgtacacattaaaaaggtacagggcttcctggacaagcctgactgtgctgctttgccaaagctggggtcaggcagcacttcccaagggaggctagctggtgttatgcaaagacggtattttcaacaagttcctccaaatcctcccaataatggagccaatgagcctaccacagacaaccaccaataagagctacactgcccgagtttaaatcccagttcttttcccccagctgtataaccttggcaacaca

SEQ ID NO: 38402 - DNA, 1051 bp, Homo sapiens
cccaggctagtctcgaattcctggcctcaagtgatcctccagcctcggcctcccaaactgcagggattacaggcagaagccaccatgcccggctaataacctgaatctcttgacggtgaagagaaataaggagaggggtaaaatggctaaaggatgtctgtttggaggcaaggaaggtcgcccagaggtcaggcacgctccccttggcggacacagctgggcttctcagagactcctaaatcctgcctcgcatctcaaatcggcttaacgacgcgaaagagctgggcgacgcgcgcgcactctcgcggaagcttgagtctcggcgcccgccgtagacgtcgtgacagaggcggcccgttgccttggagccagagagacgcagctaggcctgcacggctgtggagagatcctgccacgggccttgttcaccatgtcggtgctggatgcgctttgggaggatcgggatgtccgtttcgacctgtccgcgcagtgagtttccaagattcccgagggatcttcaaccctgtagagggcgccgccgtgcgcgttagggacccgcgggcggagactgcacctccgcagctcgcggccctggtgagggtgggaggcttgcgccggtcgtccgcgcctcgagagacctcaggctggttgggccactgtggccctctcgaggccggcgccgcggcaagagcgcatcggcattacacagttttggtcccatgcgacctccggttcccccatcctggcccgcgggacggatcaggaatgtgaacctgagcacgaccggggccacccggggcttagcgtcccgtatacacccacgtgagcttgggatttcagtttcatggaaggaacgtaggtcagggactcaggaaactagggttctaaaagtagatgtgtaatatcgacccacagtgtgggcccttgagcagatgtcttcatcattcaagctagaatcctcatgtctgtaaaataagggaggtgggagtaaggcagtcgtcaaaaattactaaccgcgcaaactttatgtccttggtaagctttcatctag

SEQ ID NO: 38403 - DNA, 1197 bp, Homo sapiens
aggttgatattatttccattttacagataaggcaaaataggttcaaaaaggtttaaaaaatccttctagtactagtgaagcagggactacaactcagttctttccacttgaacagcttcattacacaaacaaatcaacgctgtatcactaaattcatgtctcagacccctctctacggctatgccaaacagtctgttcacaagaaaaaacgacgcgacagtacaggctattttgtggcaagcagtacagcatcctgacctaagctgacctgggtcacaaacctgcacaagaaaaccctgcacaaatcaaaggtatcctcaagatactatattcatccactgagctgctcaaagtggaggcagctcaatggttagcatagaaaggtgtcgagtccccagctttgccccagctgaatgaccttaaggaaggaacttaactacaggaagggccttgggaccctaaggggtatcttctgcgccgggcataaaggagagctaaacaaatgagtgaatgaatggggtctcagccctgccctagtccatccgcacttcagagaacccaatatcccgaaggaagcctccgtatctcaactgaaccctatgtccccagcccgaaaacgtgctgggtgggaaaagaaaaatagccgctgccacacagtcccgacttgccagcaaggttttccctcagcgcgccgcaaattttctggaggatcctggggttatgaaagctcagaagtcagggttattcctggtcccaacacggaacgaaacaggctcggatgtctcgcccaaccctcatatctcagggtttataacctttcttcgagagacatgacctttcccatgagaccttgcccccaaaccaggaaaaaatgcccggcaggcgcagcgtgcactgcggaagtcacgcactacatatcccagggtgggtcgcggcgaggtgggtgaaatggacgtcgctcacgcattttgggggaattctgggcattgtagttcctcattgagggaggctctagcgcagtacacagcttaagctgttgaagaagatataggtcgtttaggtgattctctactatctaaggttgttctcctagtccttggaagtctactacttttataatatacacaaaaatatacttaggaaaatgaaatttaaaaatgtaaacatggaaaagacacgtacagatttttcttatta

SEQ ID NO: 38404 - DNA, 2720 bp, Homo sapiens
aagtgagtgaaaaatttaaatgatcataatttacgttgcctttaaacgacagaacaatttaagtcctctagttagctagttcctttaaaacacaccccacatccctaccagaatcactgcccatccccccccacccccccgcccaaacagcaatggttatttatttctaacataatccggggacccttgccccttaaaataattaaataatatatgccatattttctctagaaggcactagatttggcatcaaaagacttgctttggcattcaagaacagtgtgtttgaggaggaggcgtttatcttccctgagcctcaatttctttatctgtaaaacaacaaagaacatcaaagctctttgtaatttcttcctctttcctcaaataacactttgctcattactgcgtttttagaacttatatcctagcgttaagtggaagcttaactggaagctccatgaaggtaggccttcctttctgataacctagcgtaagatcaataaatgtttattaaatgaggcactttacttcacaaaggatatggcattttaacggttacaagcgttcccagtcaacgcatccacaaagcattaggccacctataaactaggaatttaaaaggcaccaaaatcctagaagtcctaggagggcgtggtgacgcaagcaggtgaacgctggccgatgctgacaacccactcctgacgcgcttccggtgcgacgctgtctctccatgccaggactgagttgtgggggagggaggcggttagcgggctttagcgccttttctggcggcggtagatttgaagcgcttcaaaggaccggacccagagaagaggaaaactctaccggtgcaggtaagtggtatgaggctcaagttgttctggcggcgtcatttcagcagtccctgcgtacgaaagcgggaagggcctgggaagaggggcggagccggcgcggctgaccgggttgggtttaccgtctttccctcgaggtatcggggctgcttgggcccagaggaagtccctgaggaccgcagcagtgcctttgccgctgttgcagaaggagaaggcttgcagtcgagccccggggcctggggacggtccttcctctgccagcccccgccctccccactcaggcgcacacctccctcactgacgcattttgccgcacaagctgtaacatggcggcagcgactgcggcctgaactctagggagccgggttgatttttaaagcttcaaaatcctaagactcagcactgttgcggggtaggtggcgggactggtggggaagggggagacagcctgacgtcctgtcaggctagggttggagagtgacgggcgaagagcctgaatcacagggattaaaattgaagactagctttcctcctctttcgaccttttcctctcacagcacagtggctgtcgtgcagttaagtggcagaggccactttgttaagcatttttctaaaactcaagtccagggtcttgagctctcgcgaagttcccccgtgtttcggaggagctgtgagctgcgcaggccttttaggaggagataattactctttaggaggaagatgatgatttcggggctcagtatgcctgaaggggaagtatgctaatttggttcttggttagtctttttttttgagacggagtctcgctctgtcgcctaggctggaatgcagtggcgcgatcttggctcactgcaacctccgcctcctgggttcaagtgattcttctgcctcagcctcccaagtagctgggactacaggcacgtgccaccatgcccggctaattttttgtgtttttagtagagacgggttttcaccgtgttagccaggatggtcgatctcctgacctcgtgatccgcccacctcggcctcccaaagtgctgggattacaggcgagagccaccgcgcacggccagctcatgtttagtcttaaggagcaaagtctagatgtgctggcaaggagtatgcacaatcgttttggaaatgctataaaagcaccattttgtgcattgattttaatttctttccacgatagccctttctgtgtgtaaccaacattttgcagtagtgaacacaaatacaaaagtatttgcttttatagtttggtactaacatagttgtccaaagaacaattagatgttttagaaattaggggggcctgatattaactttcagtagttaaaaccaggaaaaaagagtgagtgtgtgtgtgtgtcggtcacacacacgtttttgtctttgtgtattcccatttggtaacaggatggccggtaattgctactttgtaacaatgacgggtgggggggtgaacattttataaattttgaaatcgtgctataaaatccagaaaagatacatttagaatggctgcttctctcctgtttttaatatatcctgaaaatttacccgttttagcactccccttttttttatgttaacgagttgggacagaattatttctgtaacaaattacatggttctgtgtcttaaacaagagttcattgtacattgtttgactatttctttatgattcagaattattgatgctctgagatcctatagggtcttgtagtaggattctgcgcatttgaattgttggtttcctttttaaggcttttctaggcagtcagttgtcaggagtgctcctgctgtcaggagtgtataagtatgtaaacttcttaggttagaaaaatttggactttctggcccaat

SEQ ID NO: 38405 - DNA, 1303 bp, Homo sapiens
gcaactgcgcagttttaggtcagctggggctgggggtgggggtctctgatttcctatcttttctccacccctatttctgtaaacattctcccacccacttccactccccgtttccctccttcacccattcacctgagggcaagacggcctaacttcacacagagcccaaagatgcttattgaggatgctttcgacctggtggagtccatttcaaaaggcaactgaagccctcattcggcatcctcgcctctcactccatgccgggggtccagaaacaatccctgtccctggataggtcagtttagctcacctgtactttccttcgcccgtccacagcgccgtccaaaccgtaccagcatctctgacgaggtgtccatgatgctcctagatctggaaaagtgactgtggcgccaagcgccgcggacgccagccggtggagttgttactcgtaccacgcggttgcttggcaacgccgccggaagtgacgccagccgtagccgaggaacaagggaggtgctgcagttggcggtcgggctagagaagagaggcgcctgcgcttgcgagctgggcttgtgagtggggctgccgagagggcaggcgtggggcgaggccaaaggactgaacccgcaggagcgtcacgggcgccggggcggctgccgacggcgggactgggtcagtgagaagcccgtgggcccccgccctgcctgctactcccatccccacctgcgcgctccccatgggggacgacccccgattgggtccgatgcctaccctcggggtggagccggcaggtgtgtgagcgcgcgaggcctaggcgtggtgtgtgcgtccgcagatctcctcgcgggtggagtgtgaggagcaaagccctcccttaactataaaaacccgcggattcgctgacataaacgctgtttttttaatcctttggtttctgaggcatggtcaggactagatggggccaagttttttaaaaataggaatgttaaaacgtaatgatatgcttagaatatttacgttaggacctttgagatattttaaatttcttggtaaatacatgaccacagaaatctgttaggagtagctgcgcgtttggtttcaaaagatgcttttctaacacattgatgtacagataacttcattactaacaagttggctctgacgtgtacacataatgcaccaaattggagtctctcaaaatgaaagaacaaaaagatttttaataacgaatgttctaacacatagtcgtgctatttttctttaggttttctatcagatgttccacgtaataatgctggtaagt

SEQ ID NO: 38406 - DNA, 848 bp, Homo sapiens
cttctgaatagtctcagttatggctgtatgcccccctgacaaacagtattgatgagtggaggtatcctgttggggttgtggcagagcttgggctggtgatgtgtattgtccctgcagtatcagctttactgcactaactcagagcctgaattctccagccatggtgtgcaagtccagaccatgcaaaatgtccactgccagaatatattcaggtatgagagagacatacacagtgtataggcggagagccaagtggctgatgccaagataaagagacacaggtttcactttcactgaccagctttcatagctggtaataaatgcagctctgccagaaaacttatccgggttcccataaactaggctgcagtctgcaccagtatctaccagtgctaggacccgctgtgacccactgtacattagtcggggaccagcggattactagcaccacatacagcctctggttgtctggttccccacaccgagctgcatatctcagccagttccctaatcaaacaagaaaggctccatatctccgcctgtctgcaaacagtccttgagttgcggtgtccaggcgggagtgggttgaacaacattgcttcaccccccatttaagcattctccggaattgctgctctggggacagttgcctccaaagagccaagagcattccattgggttgcctgttagttttctccggagcaaccccagctgcaagtaaatcaatccacatctgcatgcaggtcacctgccaggctgctttttatcacatgggatggttatctgcggagggggcaccttccccttctttctggcacgggttccccggtccagctgatgccttctgc

SEQ ID NO: 38407 - DNA, 472 bp, Homo sapiens
tagtttcttgccttcttgtcataaaacttatgatttggcgtactcatctttctacgccttgatggactgtcatagttttacgtttggatcaacttccaatgtgttatcctttgcattttcgatgtggtgaaatatctccaagagttcctttaatgtgaagttttttgccaggatcacttcctttgagacataaggtgactcacttatgtcatgagttcacctgcactaagttccctggctgcatatctgaattctctccaatggtggtagtgtaaacattcccatggtcagctatttcctctataacctcattgtgttcatttcactttttttttgttgatttttttagacggagttttgctcttgtcacccaggccgaagtgcaatggcacaatcttggctcactgcaacctccgcctcccaggttcaagtgattctcctgcctcagtctctgagtagctgggattacagg

SEQ ID NO: 38408 - DNA, 1881 bp, Homo sapiens
actagaagcacttaataaaatcttgcgaatgaatgaatgaatgatatacaaaaatatttgatactggctttagttggaacaagaaaatgaactttgtgtaccacatagacatctgtgactagagtggccgtcaccagaaaggctgctccttccagctgctatgctctaaatacaataacctgaatcttagcacgactggacttcgcctggacttcgccttggccccggctgcccaaagtttctctcaaagcttcagcttaacccctgatgtgctcaccagcaccaaggcgccctcctgagtgctttgctgggggtgggatggcgtttgtgggaaaggccggctacttctggcatttcaacggcgcctccaatccctgacctttagttgtgccccattctctccactctttcccccttctctgtcctcacgattgagtctgggctggcgaagcctactgagggaggggagtgtacacacatgcacacgcgcgcgcgcgcacacacacacacacacacacacactcatatatggtgttattaataattcaggactcagagtttatctaagagaagacgctcgaccgggtgtgagagagcgcgcgggacagagagcgagccaaggaaggggaaggcggcggcgcgcgctgtctcctggggaagcagtcccacctgctgtggggggcgccgctggggaggggccgagccgtgctcacgcctgcacgccccgccccgctcgccgcacggcccggcgacgggggagttcccgcgagtggcctcgcgcccagaccgtgcggggggctgttcgggtggaggcgggggagccgccgggacaccaaaataggagctgcttgtggggtggagcggcactagctggcggcttccgagcgcctcttccaaagatggtcagaggggccggaggcgtccccgctcccgctcgctactagcccgcgggccagcgccgcgtcccgagccccggcgggaggtaggtgcggtgtggacccgcagcccgaggccggcctgctgggagcgagcggggccgggcgcggggagcggggccgggcgcgggcagcggggccgggcgcgggcagcgaggccgcgcgggagaggagcgcagacaatggccgcgcgggcgccgggccgggccgaacgcgttgcgctggggctgcctgcggcgtccttcccacacctgcgcggagcgccgggcagagggacgcgggcaccgggcccgcgggcggcacgcggcgccctcgagtccagccccgctcctggccccggggcggggcggtctccgggcgggaacgtgggccggggcccaggcgcggggcgcgcggaaacccctgcggcgggcgcgggggagggggcgagggctgcaagggctgcgccgagctgccttcctttctctccttccttaagcgaaagggctcgggatttcccttttccgagacctcttcttgtccatttatatttccatcatccctttcttggcatttcgatgtgatttgaaagggagacgagcttggggaaaaggttgaattggggccgagccgagacagctgaggtccggcctcgagtggggtgaccctcggacacttgccttgcctagtgtgggatctcatctccgaacgccaggccagggtagattgcggtgaatggaatagcaaatcagtactctcaaaaggactactgaaaaatccaggagcctcatttcaagctccgagctaccctgaatttaaattgaccaccatataaatgatcaaacagtccatccacattttgcatttattatttagatgctgaacttagtccagttttggagtatatccgatgatagtcaagttatttagcgttgattatttgagagaatgtgcaacattgaaaaca

SEQ ID NO: 38409 - DNA, 495 bp, Homo sapiens
gttctgagctggtttaggaagagtcactgcaaattgtgccacgttggatacacaagattgccaacatttcaacttttacctttgaaattcaaaacagaccacaagattgtatacctacaagtacctacagaggttctcgttgggaaatctgaagtaccagcactgtatccatcagccttaatagactgtagttaattattacccactccccaacctttgttcagtggcatttaaaagtcaggctgagcatgtataatctgtgaacactttcagcagagacttgtgaaatacatctttcatttgaaagttcacagacaaacttttgtttctagttctttcctggacagataaatacataaaagtggtacttgtggtttcccgaaggtgtgtttctgcagcccttctctaaccctttatagcttttccctcctcacaccttgaccatcaaggaaatgagtcgtaccttcttccctgtcgagagaacacaggccctcc

SEQ ID NO: 38410 - DNA, 1102 bp, Homo sapiens
agctataagtcgctgtgggagaccaccaaaatggaggcgaaattggcctcggggcgcctcctggagaagcggtaggagtcggtggtggtgaaatggccccgcatgaagcccactcagccttggccgggctcccctgggcgcacggctcctccagaccttcttcgtcctcgggcaggtaaaggaagccggagcccagcgcggccggcagcatcatgggcgccagaggaagatcggggtgcccaccaccaccccagccactggaaggcgcgggacagcggccctttcaggcggtcggcttggcagtcgcgggcagacggctacggattcggggtttcgccccagcaggggtgcgtccttccaacccacgccggggtggctgcggccccttatccagcaacgatcgccgctccgagggctgccctgacgcccagaccggcctcgattcggtccttggtcccaccccgggacctccaccgacccggacccagacctcgagctgcgccgtctggccccggcccggctccggcttcccctccgactctgactgaccccgctcggactcccggtccgactccgggtagtcgcccagtccctcttcctgggcgccaacttcagctcccgtttcgccccaggctcgggtccggctgccccacgaccttagaggaacagaaactcatttccaggaagcacaggcgggacggcaggtgaaaaagccgctgcggggagcagatctccgccccacccgacggtttcctggaggcattctaggggagtctgagctctggcggcgcgccccgacccggaggcggcgttgggagcacgtggctggcccggatgcccaacaaatcttaaatgtgtttgaggcgtgcctgggctctcaggggttcagcaaacacaaggaacgcttcttcagggccatcagatgtgtgcttatcctacgggactcgcaatttattgggagaatttggtgtttctctcatacacaaataacatagaaattccacatgtcctgagtgacagatattacctttcttggggttcacccagtagcagtttcaggtaacgcttttgtgaacttgatacacttaacttagttattatt

SEQ ID NO: 38411 - DNA, 1386 bp, Homo sapiens
tcacacacatttttggaaaatatctgaaaaaaaacccaaagcacttcacatgaatggagggccaaaggaagggctggggtacagacgccgtccagaaatacttaaaaataaatgtttatactaacacaaactagcagccattcccctacaacctggagtactttttaacccaatctgtttgggattgagggcgggactccagggtccctgggaggccccggcagccgcgcatgctcagagcacagggaccgctccacctcgtccgtggccctgcccacccaggccgcaagagctgccgggacggtccccatcttcttggagcgctttaggctggccggcggcgctgggaggtggagtcgttgctgttgctgtttgtgagcctgtggcgcggcttctgtgggccggaaccttaaaggtgagtaactctcggtggctaatgagaagctacaaaagggtccgctttgctggtgcgcgactgcgcgtttccgttctttactgcttctcgcggcgtccgtccgcccctcgccttcctcacgttcaggccgagcgccgcgtgggccgcagccggaggcggcggagccgagggggcgcgggcggcggcgaggctgcccccgcgaggaatgcgggatcctggggttccccgcacgtggctggtgcccaggcagttccgcggttgcttagagacgggactgtggctgccctcatccccattgcgtcttttttttttttttttttttttacctccaccgccttctagtctcaccgaaggcttgtggccatctctgtaaagtttctggggaggtgggcacggggtaaacgccggagggttctgtggagcctatgggactgactggaggccaaagaactttgggccgcagatgtacaccagcgtcactcttttggtctgttagggccttcatcgctcacatcaggtttcagtgtgaaacgggaaaacgtgggtaatatttcatttacagtcgtacattctggaaaagtatctgatgaaacgcagttccaaaattaggccaaataggttttgcagggtctaaatagttattttatttcatcgtttgctttgtagggggccctagatcacggtagtaacttaggagtgtagattgtgatagacaagacaatgcataaaattgagtaatttctctagggggatgtggatcacacagtaccccgttgcaagtgcttcctatgtgtatccatggtatcgaatgcaattgcagtgtgtcaggggatgcttccaggaagtgtacctacatcagttcataactagagtcaactaatggcaatattctcgatgatttgttcacataacttttgtacagttgggatgactgggtggcttagtagagtcctggaggcaagtactttgta

SEQ ID NO: 38412 - DNA, 1186 bp, Homo sapiens
gggaaactgatccttatttagtaaatgtttactgagctcctaaatagtaccagcgactcttctgggcactgggaattcaagtatgaacaagtctaacaaattccttgtcctcagagattgtaatgtgagaagagaaaaaaacacattaaaaagatgtctggcagtgttaagggatatgcagaaaactagacagtaaaatgatagtgtgtatgtctgtggagggtgtgccttgagctgcagtgtcaaggaaggcctctctaacgcgacaggtgatcttagggcagaatttctctagacattctctgtatccaaataactgttctatttttatcacagagtagactggactaacgccgaaagccggggcgtggtgaaccagccgccctacctgcaatgtgcggcctggtaggatactgttccagaagtagcttgggcttttcaaatccatccacttgttgcaggcgactctctagttccttaagccttactttcttcattttgttttaaagtatggactcgtagggtttgaaggcacaggatctgcggagaaatctattgaactgggatcttgtttcctccctacccccaaccttctccctttttcagcaccgctggccggacccgaagacgcgccctaaggagacgcccggacgcagggcacggggcgagcctctgacccacctcccggctaacccaagccgccccaggagacggcggcggcgcactgctggagcagcctcaggatccctcgcgccacgaccacgcacctctggaggcgacccgcacctcggccggtgccggaagcgccaggccgcacgcgcgcacgcgttcgccgcccagcggcccggcgccgagctgcagcgtttatcttgagccggggttccgctggccacctgggggcctcattgccccatcccctccgcctgcaaagcctgcgctacttgctgacccaccgccagtcctcgccgcctgtcgcgtgctcattaccctctagtttgccatgagtacctgcgggccctcaaaggatggggaaagacagagtgaaagggatgcgggagagaaagtcacagtcactttgttgtatggcccagagtgactcttcttgtttcccaagtctcggctcaaaaagtagcgatctccattcacctttacctccttctccattctcatgccttattttattgta

SEQ ID NO: 38413 - DNA, 1305 bp, Homo sapiens
gtctatgcaaataaagaaataattgcccttattaaagatttcctataaggtgagtactttatttcagtagctcttaacttagaaagttgggagcctagcttggtccacaggcgcccaggagagaggggcgggaggaaggctctgcagcccgagggggcgtgtgtaggggcggggctgcgggcggaggagcgcggacgctccgggtatcgcgagagttgggcgggccgagcaatcgcagcagtctattccctcactctccctggaggagccgctggccctggactctccaaattctgagctctcatcatggcggcggcggccgcggcggccgtcgggggccagcagccgtcacagcccgagctgcccgcgccggggctggccctagacaaggcggccaccgccgcgcacctcaaggcggccctcagccggccggacaaccgcgcaggtgctgaggagctgcaggcgctgctggagcgggtgctgagcgccgagcggccgctggccgcggctgccggcggcgaggacgcggcggcggccggaggcgggggcggtccgggggcggccgaggaggaggccctggagtggtgtaagtgccttctggcgggcggcggcggctacgacgagttctgcgcggcggtgcgggcctacgatcccgcggcgctctgcggcctggtctggacagccaacttcgtggcctaccgctgccggacgtgcggcatctcgccctgcatgtcgctgtgcgccgagtgcttccaccagggcgaccacaccggacacgacttcaacatgttccgcagccaggccgggggcgcctgcgactgcggggacagcaacgtgatgcgggagagcgggtgagtggagccctccccgcgggcgaggcgaccctgggccggggacgtcgcgggagggcctggagcggagcactgggagcccactctgagctgtcaaggggagggtgcgggggagggtgcagccacagggggatggaggtgactgagctgtcagcggtggaaagggggtggggaggagaaggaggggagaggagagcggagagcatgtttaggaaaccgggctgtgaattttggggaagccagggtgggtaaatgatagcgagaaaagagccagtgtatggggtaggaggggagtgaggggaaatgatttttggggaagctcgtgtcgagctgtcaagtgtgtacttgttgggaaaggctgtaaagcctggttcttgggaagagacttaggttgtgatttggattggctgggaggggatgttattggggaccgtattggctcgcgggatgatga

SEQ ID NO: 38414 - DNA, 696 bp, Homo sapiens
aagacatcttttgagatgttttcatattgcctgtaactttgtcctccatggttattttttttcccggtaattgtttatgatcagaagacaatgtggtttaatctctctgggcatttagactgcctgtttatagatgggcacatagaatttttaatgctagagcataatttggaggtcatttactaccaactcttcattttatagttgaggtataccttaagacctttggaacagtgactcagatttctgttttaaaccctttcttcactagctaagagcactgacctcatttgattaaaagatgaatggaataatggattaatttgataaatgagattaggtaggcttttgtgttttcttttctatggctttacatgcttttggatccttttggaacgtgaggttggcaaactattgcccaagggttggcagcttgttttggtaaataaaatgttattggaacataccacactaatttatttacttattgcctatggcggctttcactctacaaaaacagaattgagtaattacaacagactgcatggccctcaaagtagaaaatactatctggctctttaaggcaaattgaggctgggcacggtggctcacgcctgtaatcccagcactttgggaggccaacgcaggcggatcacttgaggtcagggatttgagaccaggttgaccaacggggtg

SEQ ID NO: 38415 - DNA, 595 bp, Homo sapiens
aatgctttcttctgattaaatggaatgtttttataaagaactttaccatatcaactatttgttgactctgaaatacagtttggcaggatgaatacttgatacttttctgatttataaattttcaaagtaaggaatggatgccctattaacttccaacagtgaccaataagtttggtctttggtgtattttatgatctcatggattttatatatatttgatgtgtttcactccatttcaatctttcctctttttgatacaaattgttcccttttactttagtgagaatctttccaaactgacttttgtacttttgacatgagccaagtagtctttcatcatatcctcactttctggtacaagttggcccgggttcgttttgtacattttctattttatacttggaatcagccatttctccatttagttccttttaatggcaaatggtatttagagaccacagtctgggtgctagagggcatacatagctaataggttatcattgtttataggccatttcagtggacagagttaggaaatatttttttaaaggaaaaaaagatcctgtgttcttactggtatttctgatcaacataa

SEQ ID NO: 38416 - DNA, 673 bp, Homo sapiens
ttttagaacacaagactgccttctaacagtctggtccatatgttagaagcatataaagttaatcattttgctttggtgccaacgtgttgtgtgcaaagagaagctgtaaaccacagctgtgtggagtaacaattgtgaactttactggcttgcacatgtgagtcatcagtaaactaaattaaatgttgcttaactgaacttgagagctggaggttgtaagggaagactgctaagattttattaaagtttgaatttagtagagtggttccatctttgcatttcgcaagggacttcaagttatacaaaaatcaaatcaactgttgtccagatgattaggttttttggcttctccataacaatagtgattgccaggtaatcaatgggaatcactgttcagttgacctagtttggtgtgtaaacagccaaaaaaaatccagacatcctctaaaatcaactgggcccaattagtttggccaggcagcaatcccatcagctactcagtagtcttccttgcataagatcaaaatccctgaaatgattacagtgtaattggagcatcttgataggttctctgagcgttactacttagtgctatgaccttgagcaagagtcttgaatactcggcctcagttttatgtctttgtggactggtgacatggctcacagggttgtt

SEQ ID NO: 38417 - DNA, 1232 bp, Homo sapiens
gcaaaggtggtttcagtggcagtatataatgtttaagaaatatggtttaggaatcaaagtgggttcagatataggcatggccatctactggctgtaggactctgggaattctacctaaaatatgttagtcttaacttcctcatatgtggaatgggaagaataatattatttacctcataggttattttgagaatttagtgacataacataggaagtgtttagtacagtgatttcagataggaaacactcaatagatactgtattactcaagttttgataactatttaaaattccatgtgtggagcccatatgtatatagaagcttgctcaactgctgtggtgtagggactgtaacacaatttgtaaaacttactcgtgactactctgaaggctaatcattcacaaggaaccaaacaggatgtttatcatgtgggcagaaagcacgcttgctcagctccaactgacttacattgttttgtaagtccgtgttgtaggaggaaagtatactgggttagacagacaatggttttgtccagaatatggcttctattgatcattttgatattggtcttataggggccaagggaagacttcctcactctctgaaagtttgctgaaaataaactgacaagaggcagattaatatgagaaaatgcatacagatgtattaacgggaataggggagaatcacagagtgattacccaccagacaaatggtacacagatggttatatacccttcttaagggagagggagatggagaagtgtggatattttggtgggggggtggggcggtaaatgattttaggggaatttaatggccttgaagaacatacaatggcctgggacaaagtctgttaggtctgcaaaacaaacagtggtttgggacaagtctgtccagttgtgttgacagactgcagcccttcttcctgtgataggagtttagttaatgaaaaactcagggaagggatcacaggtaattgttttctttggtgggtctaggctttaggcagataaatgaatttcagagaacagcttcatcctgggctatgggagagacagaggattaagagatgggggttgggggtatcagagagaccttgattcttcttcagttcaacatgtcaacatggggtatatgaacccagttcaacatggggtatatgtttctgtaccccaacagtttcattagaactatttttcttaccaataaataaaaagatctccttgct

SEQ ID NO: 38418 - DNA, 925 bp, Homo sapiens
tgaccttaggtaatccacccacctcggcctcccaaagtgctagggttacaggcatgagccactgtgcccagccaagactggataatttataaagaaaagaggtttattggctcacggttctgcaggctccacaagcctggcaccagcatctacttggcttctggtgaggcctcggggagcttttactcatagagcaggcgtgttacatggcaagagagggaggaatggagagagaacaagatagaggggagatcccagactcttttaaacaacccgattttgcatgaactaatagagtaagaattcactcattgccgtgaggacagcaccaagccattcatgaggaatttgccccatgacccaaacacctcccactgggcccatttccaacattagaggtcacatttcaacatgagatttggaggaaacacacatccaaaccatatcatcctcctggtaacccttggtgtctgtatgtgtttcccactggatttagtagctctatttactctgtgaagtgatcctcaagatcttagggcccccctatcagcagaaaagcctctggctacggtttttcagaaatatacccatacaaccagtttggtgttctcaaaatacccgttcacgagtgctaaacctgaaaaataagttaccttggaaactaggtaacaccaattttgatctgtaggagcagtgactatgaaataatggaactgagttcctttggcttataatagctcctgaaggtgagcccagaagagctccagcagtggatgcccctgaggaacaactgaggccctccctcacaagcacccccctgattttccgtgtccttgctcccctcttgctgtgagagccctgtaccagctgcttggtgtatgttagttgatagtcaccacagtcttctttttggtacttctctcat

SEQ ID NO: 38419 - DNA, 840 bp, Homo sapiens
gggtccttcaaggaatattttaaaatgggaaaagcgtttatttctttgccatatgactgggggcgtttctacttagatgcaagtaatattgatcaaatttgtatagtcacgattctttgaccaggatttgggcccattacaataaaaccataacaatttttacccaatgtttgaagtcaatttttaattgtaaaaataatgtatgaacaccctttcctctaaaatttttaagtatcacatataaagctaaaatttcttttccatatccctaattccatttcccagcatctgcccaatgatgccccctctctaaagtagctttagtagttttatcctttcagaacacacacacacacacacacacacacacacacacagagagagagagagagagagagagcgagtgagttagaggaagaggaatttggactttagcttgtgaaccacactttttataccatttgccaactgcttttctacttatacatgttagagataaaaccatgttgttccatagctctaacaaaattcctttcaaccccctcattgacattcatgatatttatttagccgttcctctactggtggatactaagattatttccagttgtttgctagcagtgctcaataaacaatcctaaatattaaacatgtgtgaggatttctttaggggagattctgagcagttgaccttttccaagagaaaatgatgtgctccagagactccgtaagtcatttgggcctaacaaagagaaaagatgatggagatacttgggagccagtttctttgcttatataaactctgtcactggaaacaagtcacttaatttccctgggatt

SEQ ID NO: 38420 - DNA, 1207 bp, Homo sapiens
ggtacattctactgcctctcaaggctccaggtctcagataattagtccaaggctttttctctctacccacgttgtctctatacctgtcattgtttaaatcttaaatcaccacccactgagaaatacaccctacttgttataactgtcaccctgtgattgatgaagaaaattccagcacccagttcttgggagaaagcctaaagcctcatgggaaaggtgctcccatctgtgcatgatgggacagagttaacttggctggagagaaggaaacctcaagttgaaagtaaaagtgagtggttgggttgatgcttctctgcttcacttcctatgtgagcctgtaactgtgtacagtgaatgccaaaatggaaatagtcttttatgttgtggggctttgttcccatgatggtaatcccccattttaatgctgataaatacaatggtgaggattatgccccttaatttaatttggcctgcatatggcaaagctctcacaaggcttttatgtgacattctttagcacagctagcctgtttttgtgtaaaaggaactcatatgaagaggcaggagattgataatgctggtgcaaatgttttcacaagacggcttgtaacacacccccagtgaagctgcttcgttatgggcccttcaatgaggattcagattcagagtgatgggaacctccgtgactcaggcagctcaaggagaactggcacctcacaaggggaaaacaagtgcatatttctcctgtgtgtcatccttgcagctctggggcttggagccaattgggctgacctcagaattgatgagccagagaaacagcctcccagtcagcagggccgactgtgggccagattttcatgtgggctgtgaagtacagattgtcacatatcttgacgaacattgtgtgtgaggggtcacggcagaaatacatggcagttctaagactgttgaacagaacaaatcctccagcaaatttcctaccagtgtggtcaagttagtgcactaacacgttagaggaccccacatgaaaccagagggaaaatggcagcatgatgtgggagtggtggtaggaatagtagccttctctgatcaagtgcttaagatgtggtaaacactgtatgtattgtctcatttgggtagaaaaatgatgagctttggtgacagacctgggtttgaatcctagttgaattacttacgagctatgaga

SEQ ID NO: 38421 - DNA, 959 bp, Homo sapiens
acatctccgtgtgcatcttagtaacttctcagacttgtctccttgatgaatagacaaaacaggaggaggggtgaatttgttctttttatctgaatggtgtaggtggggaagacagagagcaatagagagctctcgtgaaacagagctctagcgactgctgtgcttgggaaattagataataaacagtccctgataccaaaattctaatggcctaagatcaacacagtctggagacgcaggtgggagtggccttcctcgctctgatccagaccctcccgggagagctctttgtgtcaacaagaacagccagtgctcctggccagctcccaggactcagagtggggctatcatttttgtttgctttgcaaatatcttaatgggaagtggttcaacaccacctatgggttaatctgaggggttctgcttggcagctgttagctctgagaaccacatggccgctctcgggtgcagggagtcaggctagctgttaactacccagcgccaggttgaggcatcgtctttgcttattggatttactgactggcaggaagcaccttgttgacttttatttttagtttgttcctcctgggagagcaaggatgttattctcagatccaactgtgcttttttctccaagggagggcagttgtttaaattatttttactagcatgaagcatcctttcacctaagctcattctcagaatctgaaacttcatattaaaagtggtggtgtggtgaaggtggaaggggcattgttgccagaagaaagatttagtatattagcctgcagggagggcaaacagtggaagccacagccttgtcttcacctgggatctaaagaattggatagatagtgaatttctctgctctactgttcccttagtcctctccccctccctctcctccaccccaacatggctttcacttgtcttatcttgacccataggaatgtttccct

SEQ ID NO: 38422 - DNA, 806 bp, Homo sapiens
atctgggtttttggtttctttgtttttgttttgctttgttttgtaattttgaagaataggaacagggtgctttggacatcagttatagtcctagtagtttacctcaactgagggctctgttcaaaactggtgctctctgaaggaactctgtggatacctaccaagattgatcatagtgccccatttcccttgaaagaatcaggatgaaaaggaagaacaagggatgtactccacaaaggtcagtgcttttctccaccctcagccagctgaatcaatagcaagattctgactctattggaggagctgaggctagaggagtctagaggcggctggaggggaaagtggccacagatgtgagagtggcagatacaagccgcagaggtcacatgccaggccaccattcctgaggccacatacctcaggaaaaacctttcacagcctgttctcattcctgcgactcattaaagcacattacagaattgaacagtttttgaacatcatttcttcttagattgttgctgcaaacatagctgtgaaaagttcttgctaaacttttccggtgctttcctgagttcgttaggtcatgatgcactttttgccaatgccaagttaggttttggcgttggcccaggacatcaggagtgcagatgccaaacaacacaaggcgggtggtgtgtgagtcaagttagggtatttggcttccaagattggatgttgatggcatggctgtaaaatgtgcctagagaaaatttatttttaaattcttttcttatttgatataattgaaacaacacatactctcaaga

SEQ ID NO: 38423 - DNA, 2159 bp, Homo sapiens
tgggggagaggagtaggccgagctccggcggccactccgcagtgcgctctcgcgagccggggccgcgaggcctccaacgcggttccgcacccctaatgccccagggcggtgagcaccccgcggttccccgcccgcctcttcctccttccccgcccgcgcgcccgggagaggcgatccccgcgtccgcagtgccggggcaggacgcgccctgcgccctgggccaggaggaggcaggtggccctcctcggcaggaggtgagccgccagggagggatgggggtcacccaagcccctgcaagcgcgaccctgcccagagcaaagcacgccccgcgcctggtgaggaactttttctttccaaaggtggcaggaacaagtctgtactgacttttctcccgccttcgggatcctctctcgtatgatttgtggtttgtgggaccacaacaaccaggcttcctcgaccgcgccttttttccagtagctcctggtctgccaggcttgcgagagggcgcgctggcttggcggggctccgggcgagaaatcaccagcagcgctggggctttcggccccccacagcccagcccgggcctcctgggtggcctggggagaagggggcgggacagcacagcttcttcccctcgggtgggcatgacgggtcgccttgggtgtcctgccgagctcagctttgagggtatgcgcggcgcgggtgtttttcccaggtccactctgcaaaagttgtggcctgaggaaaacttccaggtcgccagcaggaacgtcacaggagagccccggtcgctcgtcaggcgggcggccctggagcgtgcgcgccacccaacgccgcgctgggcggccgcccggccccgccccaggtcacagccctgccctcggccccaccgcggcgggcgggggacacgcggcgggccgggcgctgtcggtcccacgccccaccggggatctcgcttgggtccgctgtgtgcgcgggcgggtgcgtgtgcggcgagggtgcagggtgtgcaagtaaatacaggggagagttacactctttgccgtctcaaagtccggcgcctggaagccgaaggcagatttttccagagataacaaagacactttgtcactttgggcgctgcgtcggtgcaaatctttaattgcaagtgtgtgtgtgtgtgtgtgtgtgtatgttggggggggcgggaagagtgtctcgagcaacccaagcgcgggtctccaggcggcaaggccccctttgatcaggaaaatccaattatttgtgtatatacatttcccacatagtgattacttcattaattgtcccgcctttatctcctcccttcccatcccccctaataatcagttcttttatccagaccaacaaacacaccataggagctttgtggattcaaaggatttgctttcgcttctgaaagagccgctattctttgatgattgggtagcggcaaacttcaaagccataaatcttccctctgactggctggcggcccagcaaagtccttatcaaattcttggaggtgatcctgaagcgctcagaccgcgcgcggggcgagcgagcggggcgcggcgaggggcaagggcggggagggccccggcgctcagagcaggcgccagggaggcaggctgggcggcccttcgtcctcgccttcgggtgtccatgcctcggcggcggcgtcccgctccgcagccaggggcctgcaagccgtagccatggccgcggtggccgtcctccggaacgactcgctgcaggcctttctccaggtcagggccgagcccggagggggcgggagaaaggtggaaagggccgtgtccggatctctcctggtactccgtgcaccttgaacctcaaagggaaccccgccgatgggtgcagctggagccaggcctaggggtgcccacgccaacttcacacctaatccggtgtggcctttgctggagggacgcgtggatccgggattgttcggaggtgcccggctggccgagaacaggaccggagctcaccctgctgggccctcctgctgatttcagcctggggcgggccagggaggagcgcgaaggcagtgaggacaagagagcttaaaagatgggagggagagcggccggccggcggggttgtgggtgtttcccgactcttactgaccacggagccgggag

SEQ ID NO: 38424 - DNA, 1139 bp, Homo sapiens
cgtgagccattgcgccccacccaatgtctgaagattactgtgaccactctggagaactaggataagccccacccaaagttcagttcagatgttaagactcataatgccaagtacacctcaagagataacggaaaggttgattacttacatacttgaagtctctggggaaagcagagcaggcctctctgtaaatccagaatggcttgagagagcagggaacagagactggctctgagttttattgcagttagggggtggggggcggggtgagggctcccccgttgggaggagcttatgtagtttgagtctctccacagcacagagagaacacccagcctttcttatcagcttgcccaggtgtggggcagacagagagacagagaggtggggctcaatgctgttgctagtcaaacgccaaagagtggaaccagactccttattccagagagagtgctagtttaatttttaacattgtgaatattgtggcaatattttctaaaagttcagatcgtgaaaaatagaacaactgcaatatcaccagcatgacccagatctcgctgaaaaggaacgctaaatgactgtgttcttttaaggacagaaggaaggacacatacgacttgattagggaggtaagtcgccaaaatggcgcacattgcacaatatgcagaaaacagctttggcctgggcgttgcggaaaaggtgattgcgaaaacacatgtggacgctggatttcacaattctgggattagacaaggaagaatttctaaatcagaagaggtttttttttttggtctcccaaagacacctaagttcagttaagaacagtgaccactgaattggtatgggcataccacatgaacaaacacacagtattttatcattctcttgatggcactatggaagtgagtgaagttacatttcctgattcgcaagctgaagctataatgtcctgtgggcaaacaaaagggggaaatttgagaactgacatgttggcccctgtaataggttgctagggctgccataaccaagtaccacaaaacaggtggcttgacacaacaaatttatcctctcatagttctggagaaggaaactctgcaatcaaggcgtcagcaggactgtgctccctccgaggttctagg

SEQ ID NO: 38425 - DNA, 1475 bp, Homo sapiens
aatccagatttgagtccaacaaacacgcgtccttcaaaacacgttgcctagcaacaaattgattctagttacttccggcatcccaagtggagaaaaataaccaattccttcctagaagccaagcttgagggacctttagaattctgtaacagaaaagctccccaccccctactgtgacccaagcagttacttaaacactaatacctcccattggccggcgtggcagagcagcagctctggcgctagagggaacctgggctgctctagctgggggagagccgggtctctggttctaatcacttgaatctgacttctgggaaaactggcgtccagggactccccccggagacccataatcttcttggggcgacctcaggttgggggactaagtcctgcaggggacacttgttcatccactaccagggacacccatctctcccaactcaagacttctttttactccccaagtttaaaactctgaggccaccccgcccccttccctctccctcgcttagaatcaggtatggacaccgacattccaaccttctttccttcttcggcgctcctgaaggtaaccggtgcgcgtgcgcacgtcaatccgagggtgtgtgcgcccagtttccggcgccgcgggacacccacaaccgcggggctgtccctcagctcggccgcccgccccgccccgcccccccggacccgcctcccagccccgccccgggccctcctcgccgcgcccgctccgtcccgcgccctccaccgccctacggcctgggcccgcctccaccctgcctctccgtggttccccgggctgcccctgcccccgcccccgcccccgccacctcccccgccgtcgcccaattcccccagcccccaccctcggctgctgcccgagcttcctccacgcgccgtgcagtctccacggcgacgctgcgttcccgactcggagcccccagctccgcgcgagcagctagccgggctggctctcggtgtgtgcccttcggatggtctgctgaagagggccgccagctggtaagacactccgaggcaacgaccggtctccctctccctagcccggtgtgcagtctgacccagcccccacagcagaccacccccagaccgggcgcccgagtctgcggaccgctctaccgcacctggttctggctctgggccccgggccccgtggctgccaggggccgccgggaagggaggatgcgcgccactggggtgcgcctggcttgcggcaccctcctcccgcagtggtcggaagaggtgaggaagcgccgttcgtgtctacacgggtgtggagataactgggcgattctgacaggcttgtctacactaccattctttgaccggccggtgcacacgcaccaactccttccccgcaaataacgaagatggcccagcccatcccagggcttcccgacccccttccctcagtccttgcccttgcccggaattcttttacttatttt

SEQ ID NO: 38426 - DNA, 832 bp, Homo sapiens
agagacaaagggagaaagaagaaggaaagaaaagaaaaggaaatctatggcttaacttcttacttgtgggccttggagaaaatcagctgaaagaaaggggtgggaggaggtgagagttaactggtgctcagtggactccaattacaacctaatggcaaactggggaaagcacagacttcttgtcttactctagtcaggggggtctgaaagaagctgcaatccccttgggagggagacttagaaaggcgccttgttttagtgttacttttagagtagtgggggccgtgatgctggtgagtggaataaacaggaaaaagaaaagcaaaagaacgcttcctttgtgcgtttttaacaggaaagccctcattgtctcctcaggctccacagacgccacctagtgggcaaacaaccagctgacactcagccggcagctggggtcagccagagttgacatttcacgtcgcccttacttcacctgcccagtgcaggagtgtagacagcgctttagctcctcgaaggttgcccatcacttttggggcagaagcagcagctgatcaggactgacggaaggtggctcgggagaaccagggagccccaagaggtgggacagagcaaaggggagtcctggctgccgcatgccagccaggagtcaggaactagagaggccaaggactggccagggttccagcaacaccaaggatctggaatctagggtatctgatgaggcgagttggaactcagtggtcctcaaaacagaggtctaatgcttagaaggtcatcactattcaagacagtagcaccagcctgcagacatgcagtggtgaggttcatt

SEQ ID NO: 38427 - DNA, 936 bp, Homo sapiens
accacgtgggatatgttttcacaaaaggcaaagctatcaagagtttgtattcagtagtgatggtggtagcactattagcagtggtagtagaacatctaacagtttttacagtgatgtaagttgaaatattttagtgcaaaaatcttcagactattgacataaaaaatggaaacttctgaatatgacgctgtggcagctgttcagtaattcactacagctgactcagagaggatttcaaaatcagtagagttcagctcctcttccttacctgctcccaaatagcactgtctggtgcaataaaaaatcaatagttcagtcatgtgcattatctcaaaggtataaggcaatacaataaataagaccatcctttattgcctgctcagatttgtggggcagttttcacatttcgccctgggcatactacttgcccaggcagttttcctttctgtgagctttgttccagtggaccaaggctaaatgccacagcttgcagcttccagcacagggtggggggtgtctatagcaatcttccaaataaataatagccattcagggacacagacctttgtttcagcagctcaggagaattcattctccgtagagaaaactcatttgctcatggcagtgattcaagccaccaacttcacagagaatattgctggagccaaattctttctcagttatggaggtcataggtgaggcaactgtgcttacagggcaaagctcttttttggattcccttggctttctgctttcttctttacagctgattaacacccaatggccatttctttaaaaaagaaaaattcaatttcttgatttaattaacttccttaacacagtatttaccacagcctgccagaattcagacagtgatttgagacttcctaatacttgatttcagtttcaggtaattcattgcttgcagctcactaa

SEQ ID NO: 38428 - DNA, 2604 bp, Homo sapiens
atgtgtctcttggttatattcttcgggttccttttaatctggcataggccctttcataggactctgactcgacaaagagaactggccagctgtcctgaaggaaggcccacttcctgtatttgcctggttccctgtggtgtcattttacttgctcctcaattccccttacttcctgtaaacatcaaactcaagatgccatagaggcaagttaaccaccttgggctagaatacttcatgggcgatagcacgtactttacattgcatcacataggaatccacataatacctggttgacgcaacatcagtccaactgaccacaaagcaactaggggtttcagagggagtacacgtaaggggcaaaagcagcaacggaatacgacaacggaataagcatgaatacgacctggctacctgaaggaggtaggacggggaaccgagcagcagcaggtggtggaatgccagggaaatccaaccgtgcttcccacgctggcatcgctctgattatgaccaatcctctaatcttattctcacaattagggaggaagaaaaaaaaacaaacccaaaccaaaaaagaagttggtaggtgactctgtgagactactgttttataaagggagcgtttccttttataaaatttagctgagcagatgctaggcagcccacaggaggccactattcccctcagctgtacagtttgggaaaatacctacacacccggagaacagagagcttggtgtgtgttgagttcgctcctgttcatcagcagccctttccccgcctctggccaccagggggacctgcaaccaagtatgtgttctttcaggcgagcgggaacgcgtctgcataaatctagtccaatccagggccccgtagcaaggcgccaaagctgggggaagcgcatttctgttctctcgcgagcacgacgcggtgcctcccagtcctcctccggccctccctctccgccctcccggcccgcgagcgctcgggccccttccagtggctcgcggcaggtggcgctgtctgcggcgtcgcagcggcccgggctgcagcagagacgatctcccggcgggctgtgcggcccggctctccggcggcagcgagtgccacgtcccaagtgctacgcggaggattagagcaggcggtgcgctgggggcgggagcagcgcggagcccggctcggccacaccgatcgcccgccgccatgggctcctcgcaaagcgtcgagatcccgggcgggggcaccgagggctaccacgttctgcgggtaagggctccgacggcggccggggagctgcgggctggaggcggggccggccgcggggaggcggaggcccccatgggctccttcacggggcagccaggcccgatcccgcgaaggagcggcggtcgcgggcgctgccttggtcgaggctggttccggaggccgctcgcatcccacctccgcggagcgccctgggcacggggtccgcggctgtaggaggacgggctggagctggaggcggctgccggcgactcggccagggggcggccctgggaaggggggacaaccttgctctttttccgcacggccttctctctcctccaccccccctcatttttagcttccaaagttaggaagggcgcggaggcaacgtctccaaagtggtgactgtgaaggcagcctttgcgctttcctaggagagggatccggacccgcagtccggaggcggggcctgcggcggcaggtgttaaatcacctcggcgccggccgagtggcctgaaagaccagcagggcaggagacggaaaaccaaatggcctggaagtaggttcgacggacttaaacagacttgattttgaccagacttttcctttcccgtgccactcctgaccctcccaaaccttctcaagatttcctggagtgggaacttccgttctgttccgattgctgagggtgtggtttagattataaggtttagatccacagtggtaaagaggtagtgcagagaaattttttttaaaaatcggagtatataaaggaaaacaaccctagcttaacttccaggacgcagagaaacatagtatctcaaaaggcgtcagctaagcccctacctatgaacggcctgggcctgggtggtacaaagcatgtggtcttttcctcatggaaccgggcgactttagaagtagcattgatggttgtttgctgtgacacctgtgtgagtgttaacatgaacagtcaacagagtggccgcagcgtgtagcgccatttaggggtgtaatagagtgtcactcaatattagctcctcacaggcaagaacgttttcactgaaagtaagagagtgcacttcctggtgctaccttcatttcctgccctgggtcccatgttttaggtgagacacattcttaaattgcccagctgtctatgtgatagggctgagacagatcatctttctgatcttccggattatcgtgtctattgcctttccattacactaaaaatccctcctctgccatactcttagtaggaaagggtgattttttttttccccgaaaggaaaagggagcctataaataaaccgtattatcttcctatccccttctgctaaccaaacacccaagagccacact

SEQ ID NO: 38429 - DNA, 1957 bp, Homo sapiens
ttttggcttctagagctctggaaacagtgttagcgtcaggtagtgaagtatgcatggttccaacacgttcactcgagatcagtggctaaacaacctgtgtgcttctcggtggtgaggaacagaactgctagaggagcctcataaaatcaagaagaaacagatgcctgttgtatgagtccaggagctcaaagctcattccgattttaataaacagttacttgcctttgtctctgtcaaggttttgtttttaaagggcatgaaactttagagactaattcatttccccaaattcagatctctcttaggtaagcagtacaacctgagaaaagaggacaaccctctgggatctttggcaccgtgacgctgccatattccaggagaggacaggtgagggttcgctgtggctgaatcggaaggagacagaagaagcagggacgagccaccgggcaggcctcaggacaggcttaggttctgaacttgatcccatggactggtgttacccagagtgaagaaaactgtctttcctcctttaatacctatatattttattttagcacgtattggggaaaaaataatagttgcattggatatggctaattttacgaattaacttcagtgaaaaaagggaatggttttaaagagaagtgatgggtgagttcttgagttaattccctcaggggaagcaggtgcgcctggagagctcaaaccgaggcccctgcttcacaggcgggcgggctttggggtaggagctgaatccacgtaggtctgcccggtcccacgcctcagttctgtccccacgcggcaggttcctggaacgacattcacctttgttcaggaactccggtcttaccgccgcccacgtggagtgggatccgagccaagggggcctcccgagcggggactacagtgcgcgccacgggccaccaggtggcgccgggagcctgggaaagccgcgccccgccagcggccgcggggtctccgggccgccctcgcagggcccctgggcggggccggggcgtcgcggtggggcgctttccgttctttggaagaagggctctggtcccccgctttctttccatctcagacccagtgcggaaacgtgggggatgagcctgggcgccttcaccaaacggaaccccctttaatctgatgtgaaggcaaatctctccaccgggggacccgttgggtgcggcggagacacccttcggtggctgagaaaccctcagacgccgtggaagcaccaggggtctgagcgcccagtgcgggaggtgcggggccggcttccctccccggggctggagccttcaggagcgccgcccccacccggcttcctccgagggcagtgctggactctggcctggcccctggccggccgctgcccttggcctcgtccaacccacacccgcggggcggaggctcctgctgtgcacaagcccggggcgccggggtggggcggctgggtctgggcccaggtgtcccgaatccaaaagcatcccactgcgctgcctgtaaattagcgatttcggatctagtgatgagcagaggggacagaatagcccagaggccgggtaactaacatgtgcgggatcaaggaaggcgttcgtgggcagctactattagggctttgaagaatgcatagaggttctcttaggtggtcaaagtggaaggaagaggttctcttaggcagagggaacagcgtctgcaaggacacacaggaatgtggcacgtggtgtgtcccggaactacaaacagctctggttgctggaatgtgaaaagtcaagtatggagtggtagcagttgccacagaagggggagcggggccagatcgccgaaggccttgaatgccatgctcaggggcttagactgcactgccctggggagtttataagggggatggatgttttttgttcttggcagtgaagtacccagggagcttgccccttacataggtcagtgg

SEQ ID NO: 38430 - DNA, 2986 bp, Homo sapiens
taagcctattgtcactttcacacatgctcacaggaacaaaatgacaaagaatgctatgcctgaaccactggattcagggcacaaaacacttgattaacacttgtcaaggctctgactagcaaatatcgacagatattttcaaaataaagtactcgcaccgattcctacataaatcgaagctcttgatttctttaaaacattcactagacggttgaacttccagacatttgaaaatgtgcctatctcctcgtgtgcgacaactaggagtgaacagcccgtctaccaattgcggatgaataccgctaagctttttccagactaaagagcgttaaaagacattccatgcacatttattcattccccataaatgtgttttctcccaaatttcattttatgttgtatacttagatacagcaagttgaaattttagtcaaaagcacgccggtgccttacaagctgtgtaactgctacatctggtggcagcccacttgcttgcaagaagccagaaaacttagaaaacaattgtaaccgatttggtgcgtgtttgcaataacctttacgcagatatttcccacaaaacccacgaccctgtcacagaagaacagtagcctacttgcagcagagaatataacgcacaaacacgcaggaagcaacggcgaaggagagaaagttgcaaccatctggaggggcggttttaaaagcctgcccacgagtcagtctgtcgtttaaattgctctagggggccacacaggggatcaaagtctgcccagataatttcagcgtctctccccaaaggagaaacccagcaagcgaggggcatcctccaggtcccgggcagcaaagctcgcaaagtggggaccgcctctatgggaggagtgcgcgggagaaggggagggggctcgaggacgaaggctccagcgggagggaaaacccaccagagaccggaggccaggaggttaagagtactgagtgtactggcaaatggagcagaaaggggctcgcgtctggggggaggcttcccaccctcgcaggactggctcccaggaaccccaggcgagtctatgcgcctcgccccgtccccaccagcgcgcaccccctcgtccgtctcctccgccacccgcgaaccaccatccacagccagggcactacctccccagagccggggagccgggcggcctcgcgtccacctcgccaccatcccccaccccagggtctggcggagaagccccggggcggggggggcggggggggggcgcgggggtccgcggcgcgggagaggaggcccgcgagcgggcgcgggcgcggcggtgcttaccttccctgggcctcccggatggcggcgtgtgattcagcagggacctggccgccgccgccgagcccggggttggagacgtggagagctgggaccaagatggcggcccctccaaacttccactgctactttggacactcatcaagctactttctgggaacccgactccccccctgcgacggcagcggcggcaacggcaccggcacccgcctccgtcatggcgggggccgcgctgagggcgagcgagagagcgagggctgggaggggagagtcaaggggatgggggaggaaaccgagaagaggggaggtggggaggaaagaggtgagggaaggagaggggacagggaggagggaaagggggagaagcgagggagcgagcgggcgcgccagaggagaggaggaggaaaggagcgcggcggcggaggcgtcgagggggtgccagccgggccggggtcggagcgcgggcggagcgcgggctgcgccggccgaggacacttccgcgggcggaacctgccggcacctctgcagtgcgtcggcccccggcgtcgcccgggaggcggcggcggcgggctgtgggtggcggctgaggcggtggggtaacctctgcatcagttacaggcggcggcggcgtcacgcgccgcctgtgcaaacactatcgcgaggctcctgcgcctccggtagcggcggcggcggcggcggcggcagcggcggccgcgggagcaggcttgggggagggacctgccaggggctggggggtgggggcatggggaaggagcgagcgcgcgagggaagagactagagcgccggggcgcccctgccgcacccgcggatcgccgcgcggcgcgggagcccggggttgccggactcgcgtgcgcgggggcagcgtccccgcgccggccggagggaggcgcgcccccgccgcgccgctcgggctccagcgccgctgccacctgactccccctgtctcccgcggaagcgcgcctctctcctgacccacacccaacacggggagaaatgctgctgctctcgctcagctgccgcttctcgggagttcaatgtgatcgtttctcaaaatggaactgaaaagttgagagttccttctttcttgcccctctgtactgtgcagaaaaacgtatgtgcgcctccccgtctgcagaatgggaataatgaccgaataaaagagctatgaaaataaacatgggtagtgggagagttgggaaataaaactttctcgtgttttctaaaaaagagtgaagaatctttaatgaggaaattgaaaattaccagttttgtagactgtatggtatagcaattctttgttttaaaacagtaagtggaaaatctaaatgaaaaatgtgattactgaatcacatatttaggaaaactatacagcgttcatcttgcagaaggtatggtttctagaaacttataatttgtttctagtgtctccgctgagtcccgactacaaaaatcccaaaataaataacagcatttgctaaaatttatagatagagtgtagctttctacagacccacacaagtatactcacaccagggattgggcttcttgtacataaaagagcactctagttcaggaaaagtacaacaaggttatttctctctttagaaaaccaaattgaatagagcactaaaaagattatgatatagcgctact

SEQ ID NO: 38431 - DNA, 851 bp, Homo sapiens
cactgctcccatcgtacatttgtcattgctgtactgttctctgttctctatttccccctcttggctgaaagcctagggagagcaaggacccttctctgtaatggttacagttgtgttaatacccaacatctagcacctgcctggcatacagttgtggagccaaccaactacctacacagctggttaataagcactggagtcccctgagctaacctgctcataaacatctgggctggccatctagcaggggaagaataggccaaatgccccaccaccccttcacactcatccttcattgcccaatgtttgtggtttgataaagttcactgaccttgttagggttttcagattaaactatgaatattgtgtaggccatatttatcctaaaatgttttttattgatttgaaattcaaattatctgagcatcctgcattttaatttgctaaatctggcaacccaagcccttttgaagtaagcaaaaagatatttcgtaaggtagtatctgtgaaagacgaagattctctgacctggcagttccgttccaaagaatgtatcctagaggaattcttgctgctatgcaccaggagataagaacaagaatgtccgcggcactactgtttgtagtagtcaaaacctggaaattacccaaatgtccgtcaacaagagaatggataaattagagatatgtatatttgtacagtgggatactacacaacaattaaaatgctcacaaatataatgctcattaaaaagagcaagttacagaagaacaaagtcagtttgattccttctcaaatattcaaaatcattcaaaactaaatcatatattgttcaggaatacattaaacta

SEQ ID NO: 38432 - DNA, 848 bp, Homo sapiens
ggaaatgtgctcccagtttcccttcaaggaagatttttcttttgttgtttttcactgcacttctttttcttcgtttattttattttttcttttcttgctatagcttgccatgttgcctctatgttttattcttaagatggtatttaagccttttatatcctgctacctttattgatagcaaaacggaagtttatgtgtcttttccccttgaaactcaggaaggatttgtcaagtgtgactttttaaggaaaaaaaaaaaaatcaactgtatctgtttggcaaagattcgccaccacacttgcaattctcctctccagtactttcctgggactgacagttttttggtctatttcactggctgctgtaacatgttcccttatactggctcattcccaatggtttggtagcaagtcagatgaatgagtcatggtgaactgggaagtaatgtcaacattcagagcccttctcactctccctccaggctggcataggccacctcacattctttacatgttacaaagagccaggtaactgattctaacaccttttcacccatctacaagtggaaattgtgcaacctctgtgagcacacaacagggctgagacatctggaatttttctgctattcctttccccttggagagtttacactgtattaaatttaacttttctgatagctaaagaatagttttagagttaggaaaaagagagaatgaatgttaatgagcaacatttttaccagttctctgcaacattacccaaatcattcaactatcttattgctaaaaagaattctaccaacttttcgggtggaaatcctttggactggtgcctgatacaccaacttt

SEQ ID NO: 38433 - DNA, 540 bp, Homo sapiens
aaacacaaaaaccccaaaaaacacacatgtgtactgaacatgtaaaaaacaaaaagaaccatatatgaaacagggcaagaggaatcagatgataagtataatttttatataaggaaaattatataatgaagaattcttgggatatgaaccccattgagattctgtaaactgtctattatttaagtgggttacataatagaaatcacattgcaacacacagtcttaccttggatctacagaaaacggcttagctcagtgtttttaaactgaaggtcataaaccttggtgagtcatgaaatcaatttagttactctaagcaacccttgaataaagaaatagaaacagggtagaataaaataaatggaaaatactagatgcacacctcccatggtaaaaactgtactggaaacttttgttcctgttttatatatgtgtatatgttatgtacacatgtgctggtccatgatggaaagtgtgtttcttactgggagcatgccaatggcctagctgatgtagtcatgtaaaacaagtgcttagtgc

SEQ ID NO: 38434 - DNA, 2340 bp, Homo sapiens
caaaatgacatataacaaaaccatttttaccataggccaattgatataaacaaaagttaagttcctataacatatttctggtcacaaaaacatcaccaaactcctaaatacaaaccaaaacacttctaatattaaacattgaaataaatgggagctatacatacatttaaggaagattaataaaaacaagtaagatagttatttacctaattattccagttcagggtcgagggtggctgaagcctatcccctcagctcagggtgcaaggtgggaaccaacccttggacacgacgacattccatcgcagggagcactcacactcacactcagacaggaaacacagacaaggccaattcatccagcctgcactgagatgtgggaggcagtaccctggggtacctggtgaaaacccatgcagacgtggggagaaggggcaagatccacacaaacagtagccccggtaggaaattattattttttctcatcaagttatacaaaatgacactgaacgaaaaaatgcgattcaaggacctgctgtactgtactttttgctctgccagtcaggtgcgatcgctggctttctttgagcacctatgaacaagaggtagcatgcccaagtccacgtgggagatacagcggccccacccttaagggacttagagcatggcggtgggacacatgtggtgcaagcttgctgaaagtttagtgtgctgggaactttgaacatacaggcagggctagttaacaaagtatatcttttacttagagacatcgacgaggaatatcttaggccgtccaataagaatgtaagcatttcatattttattccctataaagaaaaaagaatggaggcgagaggaaatgaaatgaagcaattatcgcaaaaccagtcagtgtccccgcaggccacccaaggacaagcctccgggaaagagtaactcaatcccagtttggagggtgaaactaagagtgaatgggaagccagcatcttcctaatacaaaagcacagtttaccgtccccctcagccaacatgcggctgaagggaaagccgcggggcgtacctttagcacgggacgctgctttggggggatcgccctcgacacagcgcccctcccggcacctggccagaacctcccagggcgaaggtcggggccgagaagcttgtgagtaccggggcagtgagggagggatccctaagtgcagggcgcacacacggggcggagacctggaggcggcagcaccgcgcccccagggctctgcccagctagccactcgcagcacagagaagcgcgcccgcaagacagcgcagcctccgcgggccggaggaggcggggccgcggcaggcagaggcagggccgggcaagccctcgctccccgccgcctgacgggaattgtagttcctgggagaagccgggctgcctcacgaggcactaggaactacatttcccggtgagagagcggctccggccggccgcgcggtaccggagcgtcgcactgtcagcggccagagagcctggggcagatcgaaaagggagtgcttcttcccttctctccgcgctctggcggtgcaagcggctctgctttccctcgccccgccgtcgggtgctccctgcccgcctccccgtgtcagctttccctgggccccgccgggaaagtctgggcctcgaaattcgaaggcagcggcggctgcccagcacgggagtgtggggcgcgccactcggcggcccagcctacccagggcccggcccgcgcctccatgggcccgacccggaagcccaacgtgtgcagccggctgagtcgccgggcgctgggctgcttctcgcgcgacgcaggcgtggtgcagaggaccaacctgggcatcctgcgggcgctggtgtgccaggtgaccgccagccggccggggcgggacggagggccgcgggcgcgcggcggccgagcctcctgcggggatgcggttttaacgcgctggggcctccctttatagggtcacatgtgatggggaggaggatacaagcccggaatctgggataggtggtaatagggccaccagctgcttttagttttacgcttcttatgtcttacctggaaacaattattctaaaagttggtcacctcattaagccaaaacatgagggcagagtggaggaaggatgcaaaaagttttaaaataatataggtgacattatgttgctttgaaaatttaaaatctaacttaaagcctaagagttctttcctgaacggaaattctttatgtcttttaggaaagtactaaatttaagaatgtctggacaactcattccaggtcacctatagcctatgagagaggaagaatatattt

SEQ ID NO: 38435 - DNA, 408 bp, Homo sapiens
ccgccctgcccagtcattggacggtcttgagcccgacttgtttatgtggcagaagagtggcgaaagttcccccgcggggcttcctattgggcactggcccagcactccgggtgggagatgcccggagagggcccgcggctgcctggcaccgagggatgcctctgctcgggatgcccccggcgcaagctgcgtccgtgtttggcccgcggcgagccagccccgggcctgcattctctgggctgaggctggcgcgggggaggggctcagcagtcgctggcaatgtttgttgtcattgtgtagtgcctctcaatgtcctgactgcttccttcggtttgccgtgtagctggaggaacctctagcttttggcgcaaacaccatttatttgtaaccacttccccaaaggcacgg

SEQ ID NO: 38436 - DNA, 1510 bp, Homo sapiens
cgtcttcaccaaatgtgcagcagcgtgattcacaggttcaccactggaaaatagaccttaaaattccgccaatattgggtcaaagatcttacactataacacatactacactgtgggcacggatcaacagacgagaatactttatacagaagcttctcgacggaagaaggccttggagtgggaaatctaaaggaggggacacactacatgtcccagcacaccttgcgacgcccagcgaccacaattcccagaacgcactgctcgtcgcacgcaggttttccttgttgccggggtttgtagttcttctcgatcgtgtcagtttgtaaggcgagggcggaagttggattcctggcctgagaatattaggcgtagttttccagtttttggcaaagcggaaatacttaaggcccctgggttgactgggttctttgttttatctaccggcttctgctttacgacaggtaagtcacggaggggctacaattcctcgcagcagggccccaccttttatttctgggagcgacctcgttctggtgaggctatttgtccctaagctctcgccgtagcagccgccgcccatccctctttgtgtgctttggaaagccgcggagctggtggtggctacagttggtgttgggggcttaggcgagggacgttaccgggaagttgcaggcgggaggactcttccccatccagtcacctgacaggtgggttgactgttcttccctcaaggcctccctgcctgtgttccacgtcgcaactcgaagggcggcttggcagttcctgctgacatccccgcccggcccagctttggggaggaaaggcggggagacctgggtgcggtgactcattgcggcccggcgagaggagtccactcctttcccttctcgaccctccagaggcggcctggggagccttgaggcttgtccggcgcccactggcttcttccggacgccctgccgtggaccgcgccctcttggccgtgaccccaggggagaaagtgattcgttttcgccttgccccattttacaaattaaggccatctctacttgccttgatagtgtctcccctcaccttatgtgtgatggaaagcccccgaacacggaggttctagcacaaaactctagagactctcttctcttgagttttaagaacgtgaacatgtcggtcatggaggaaggctctggcttctgtgaggatgagaggattggtcagctgtagttcagctggtcaagactttgttgttgggctttaaaaatgcgcttattttaatatcaattagtgttggtatatctgttttacagttgacgttgaacaaaatataatgtgcctagcgtagcatacagttacgtatggaagttctcttcaccagccgtttgtatggagctgtttagaggtgtagaaagagtggaataagaaacacggtctcttgcttttagtttgttcaaacaaatcttggaagatattgtgtatatatttcaggtctgctatgtcaacttttcatcctttt

SEQ ID NO: 38437 - DNA, 991 bp, Homo sapiens
tagttacaaatacaatatgcacatgccaatattgacctatagacttataaatgagattttcagctgtttccccttttgatttatttggactttaagcattagttcattctcctgataattgtacagtaatgtcacatacatattttaaactgagtaatatttctccttccgttctgtctgttttgaaattgtctagctgtaccttattgcttccttaaaaaaaaattgagtgtccagatttcatctcaaatatagatcaccttcacttcaaagcttttgttttaaaagtagcccagattgtctctcttaaatgtagggtatctttgtttctattacaccacttcagatattggacttttgaggtctgttgtcaacagcatgatgtttacagttccaaaggtacttattgctttagtagagttaccaaatgtggatggaataacactcaacaaagttaattctgataagttatgagcacagagttaagtctgtcaaaatgaagtcaaggcctgatatataaacctataataaaatgtgtatgtaattggtctacttataggagacttctctaacattttcacttttatgaaattagcaaagctggaatcagtgagatgtttgaggggcatcaaggaccaatcactggcatccattgtcatgcagctgttggagcagtagacttctcacatctttttgtcacttcatcgtttgactggacagtaaagctttggacaactaaggtatctaaaatatagatgtctgctatttgctcaggtttctgacacaaggtggtgatctaatactacataggaatgatgaaaaccttttaaatcataattgtttgctaatagatgaagcctgctaggaagttacacagagcatgagtgaactactagatgttgtaatttttataaaaatatgctaacaagtatggtaaccctacgcagaatcaaggaccagtcttcccaccacttcagtcttttcgagcatg

SEQ ID NO: 38438 - DNA, 725 bp, Homo sapiens
aatgtttttggtgcttcatttcagcctttaaaatatacagtaatttatctctcctgcttgaaggcttacctgtcatcaaagagtacttcatgaattaagagtttagattcattttcagtttttcaattttaaatgttgcaatcaaagtctctctctctgtcattctataaatgaattagagaccattttttcaaacaaatttttcaaataaactcagtgagaaactctaccaactggtaagtgcaatattcagtcattctaaaatgaaagtcaggaataacaaactgcaaaagtagtgttcagctatcactggctctgggcaccgttactcataaactgtaagacagtccagaatatctctgaacttttgaactattgggcaaccaaactttgtaataagtgatatccacaaaaacaacaaaatgttccagcaatcccctgtgtactatacaaaagtcaaaatcagagcatttctgttgtggggatccatgactaaatgcaaaaaacctgttagcaaacataacaatggtgctgctattggatgccaccgtcacactctttgcaactctgtaaataatagtcatatctaagtatatacatattatttaaagattacataattttcattcacatttacttatcaaagactacaaattaatgttgctttaacttttcatgacattaaaagtagtttttatagaagtctcatcatttttatttaatta

SEQ ID NO: 38439 - DNA, 853 bp, Homo sapiens
tcctcccacaccctttctgatgccctccaactccggactcacaatcccatgcacctaggacaggacattactcttccttcactgacccgtgttaccgtacaagccccttcaactcacaatccctcctccttcccctcccccagccgggcatcccctcctccggtccaagccccgcacagctctccccgcagcaagccggagccccaggacaagctatctaagacctagacaatgaataaaatgggaagcagtggggggctgcaggcagggcgctcggaatgtctcttatgcaataaaagcagcagcagagagttggagtcaccttgaccgccatgctgtgctcggaagccggggacgagcgagtgagcgagcagggccgagctgtcagggcgcgcgcgcgccgtcttcccggccgcgcccgccctccctctcgccggcgccgcgcgcgtccctatgcaaatgaactcggggcgcgccgcgtgcggaaaggggcccggcgtcccggccagaaaggcagctggtccagggccggccggccgggcggaggagggggacgcgcctcccacggggaaaacaagcgcgacccatgggatcccgacgcgccgcgtggttgccacagctaggtcgccgccaggaaagccccaggtttcctaaggcctcttagtgggtgtggctttgggcaccgaccagccaaagtcgttttccccgaggcttaaaggaacatttggggcctatactgagcaaggttccgacggatcaaagagcacttcccattaataacaatgaattaatgacaactgatggcaaataccgacaaaacaagattgggaaccactcactctagggaaaacct

SEQ ID NO: 38440 - DNA, 1299 bp, Homo sapiens
acaaatgaggaaaacaagtgaaagcttctcccgcaactgaaactcaacctctacattttacctaggtaaaatggtaaaattgcccacagggctcaggtgtttggatgcactgtccaggccaagaggaaagattttcagccagtctccaaaacatctcagggacgggtatggaaaacaggcgtaaagtgtctgtattgatcaaatcaaccccagagaaactttcctagggccagagagcatctcaaccgcgaaagtccgtttgcggcctccttctccacttcaggcctgcaaagcggctgacggcattcgcagtggctaggcaacggcccgcgcagacttctcggcgttagccccgcctcttgaggcgcttccgccgccgggctcctggacacgcctcctttaattggctaacgtcacgctgggagtgggcggggaaaatatgtcagactgtgcggtcacttccggcccgggagcgcgcgggttgattcgtccttcctcagccgcgggtgatcgtagctcggaaatggcgggtaagttaccgggaaaagtttaccaaggggaggaggcggccagatcggggatagaacgccgagacggtggtgacaatgcccgcctagaactttcgggctgtagcctgggttccagaaggcctgcttgggaccggaagcgcggaactctcagcccagcagctccttgttggcggcggtccgcgcccccgcccccaactgcttggggttctgcgccttctgccagcaatccggcccctaccgagggccgaagacgccagggaaaagcgtcatgatttgggctcgtaaaatgccacatgccttggggcctgtttctcttcccattccttttgtccactgctgcttgcttcagctcttgtacatctggtcctgttcccgccagctgattttaatgctcagatcctcctcctcttccaggtctccgtctaccttccactacagtcaacttctgagctagcgcattgctgccttgccctgctctggcgctcccacttggatctcgactgacttcgtagtcgtctcgttaatctgtcacactttagtattccgaggatcgtatttagatgccctttgagaaagactttgttcctgaactgctcccttctcttttagggttggactactataatacaattctcttgtgtacattctagagacccttcaagttacaacatttaataatgtataattgctattactttgtacgtgtattaaggctgttttggtgtgattatttttttcgattacttatcttttgaagttatggacagtt

SEQ ID NO: 38441 - DNA, 1701 bp, Homo sapiens
ccaaatttaggattaagactccagttaatactgccaagcagaaggcgtccttggagaaagagaagtctcctgaacatacccactggggtacctagaatagattttgcagcgacacacagatcctgtgttgtctggagtctctgctgagtaatgtagattctgggacagcaaaaggggagctggtgactttgaaccaaattttacctttcaactgaatccaggggaataatttgcaacagagtggcagacgatacaaagtgctatgttgaacactagattgtgctttattttttccgcccaacttcacgtttccatgcaccaaaatgttgatgctataaatattggatgccacgcttacctgacaggcttcttccatcccacctgggcgcgggggctcagagcgagcgcgcgagccgcggctggagcccgcctctcgcggctggagaggactcagccggccgcgggttctgctgcttgcccgggtgccctagccgcttcccagccagggctcccgcagtcagccccgcgcgcgcacgcgcgctcccctcgggcggcctcgacgcctcagggcttcggcagggctgcgactggccggctccagcgggcggggcggcgagcgagtgctcgcggccacgtgaccgacgccaacatggcggcgcccagtggcgtccacctgctcgtccgcagaggtaagcgcgtggaggagagccccgtgagggttcgcacggttgctcactaggtacgcacccgggtccaaagggatgcgcacccgcgctcagacttctcggcgcacacgactgtactttcagtgtttacgaacacacgcaggcacacacgatgacacattcacacaccacaggatcacacatacaaatttgttcactgatcacccgcctagaacacgtcaccacgtggcatcttttcgcaattactccttgagatttgcgggccattgtctgaagtttttttccccaacttcggttgtatcattagtgtaaccaacatttattctgtatgccgagcaaggaaacctatggtaattctgaaatgcatctggacacccggttcccttccctagagcttttatgcaggcatgctttttggggacttgcaaaatgtgatggttttcttccagtgacttaaagttaagaagataagaaaggatgactgggtagttctaagtaggttttatcctgcgtgagtgttgagattttagtaaatatacaaatgcctttgcagcagaattggggaaatctttgttggatttgaactaggtgctgaatctttgttggaaagaactagaaagtttttccaaggacgggggaagaggaaaactatcatattttgaggagctacttaagcgtcaggcatgtaggaacagttttgtgaggtaaatattattttcatagtaacagctactgtttattaagtgccttttaagtacacgatactgtgttaagcgccttacatatgcttgcttccttttaaaactcaatgaatgagaccccgtctctacaaaaaattttaaaaattagtcgggcgtggtgacacatgcctgtagtctcagctattctgggggttgaggtggtaggatcgcttgagcctgggaggtcaagaggctgcagtgagccgtgatcgtaccactgaactccagacttggcaatagagccagaccctgtctcaaaaacaaaaacaaaaacc

SEQ ID NO: 38442 - DNA, 1108 bp, Homo sapiens
actggttagcctattggttctgtggagctttgcattttgtggattttgctgatggtattatattccacagggcttgttgaagatgttcctctatgaaatggtagttagatccaaggcctgatttaagttagacattttttggtacaagtacttcatagtggtgttgctggagacattgtggcctggagacattggagacattagtggccattggcaatcatgacctggctcattaggagtttacaaatgacaatattttaattactccttctttatttatcagctagaaaacatctacaaagagaaactttctcatcaagtatttcattaccctgacaggccctgtcccagcaaggaaagttaaatggtttgttctccttatttatcagtttttaaaataccatagtcccccgcttatccaatgggggtatgttcccagaccctcagtggatgtctgaagccacagatggtactgaaccctgcacggtgctgtactatgctttttcctatacacacatttctgtggtaaggtttaatttataaattaggcagagtatgaaattaacaacaatcactaaaaatagaacaattttaacaatatactgtaataaaagttaggtgaatgtggcctttctctcaaaatatctttttgcactgtgctcacccctttttttttatgatgatgtgagatgataaaatgcttacgtgatgaagtgaggtgaatgagaaagcattgtgatgtagttttagactacatgtctgaaggagaatcatctgcttcaggtgatcctggatcactaagccatgacatgatgtcagaagcagagaatgtggatgactaatgggttgctagtgtgcagggtgtggacctgctgacaaaagggaggattcatgtcctgagcagaatggagtgggccagtgtgagatttcatcacgctgtgcagaacggtgtgtttgtgaattgtttatttctggaattttctttctttttttttttttgagacagagtctcgccgtgtctctcaggctggagtgcagtggcgcgatctctgctcactgcaaactccacctcccgggttcccgccattctcctgcctcagcctcccga

SEQ ID NO: 38443 - DNA, 741 bp, Homo sapiens
cccacatattttagattcaactatgtgctttattttcagcattaaagaaaatgagctgttttccaacacctgcataccaactgggcctgcatcctctttagaaatgttgtttaataaacactgtggctttatcatccagaggctgttgccaaatgctgttaattaggccaaaaaaatgttttttaaaggttggtgaaacagatccacttttctctctgtaatggcatcttagcttgaaatccaggaagcagtggtgtatggtgtccatatccacgatttcctgcattggagaaaaagtgtggaaagcatctggggaaaaggaggctctttaccagcttgtttcctgtaagttcaattggaagaccttgtctgtgcaaatagatttcaaaatagagcctgccctttgactgtctccataattacatggctcgctctgtattttatttggcagccagagcagttaacccctggaaggaaggggctgatggtatggccagcttggcttcccaggcatgtccatgggaatgaataaaccactgtttggagaagcccatagctaaaaacacactagaatagtctgtaactgaactgaaactcttttaaaacaagttcactaatgtttattatgatcggttaaaaaacttaactttgtccttattgtgtagattatagagctgtattaattgttttaaaaattgggaattgggggagttccttgttgctttgatgtaatcaacatct

SEQ ID NO: 38444 - DNA, 1140 bp, Homo sapiens
acggttaaaatagtaaattgtatgttgtgtatattttgccataataaaaatttttcagaaaccattatgaacagagcattgtctcaatgaggagacactaagcttgttgacttttatcttgggtgctctctgtgtatgtgtatttatattaaaagtaaccagtttcctgaaaacacaaaacccattcctggccaacaggctcttttcctgtgcttttgtgcattctgaagctgtcttcataatgtgttggtcaggaagtgggtgactcatggggcctttatgacagacccttgagtcacacacacacacacacacacatacacacagacacacgtgagtcacccctacaggcttctaggacaggcagcgatttagatgccagagtgatgtgcctggggcatggcgggaggcagcctggcgcccattgccaggcacattcctgggagcctctcccatggtttagtaataaatggaagctgtggccacagctcccaactccaggcccagcaatagctgtttctctgacttttaaggacaacccaaatggtggcaggaggggagagcagttggtattggaaacgcccagtggccgctgggctgctgtgagtggcgcctgttttggcgatgtgagtggcgctgggtgtaggcctctgaatctgccggtgcgtggtggcaagagcaggtcaatcacagggtgatcttacgtcttcccgggggtcgtgaatcgggttgggagccactcagttatataaacaaatggaggactgatctagaccttaggagacctggtttagactttgatctgccactagcttgttttgttaccatggtaaatcacataaactctctggccttgggttccttgtctttaaagtgagggagttggattagatcaggattggctggcacacagctcctgtgccacccgtccctccagttcctgaggcaacaatgttcactgccctctgagcccacatggcagctcctggtccttcttagatggccttctctttctattctgttaattggagttagcatctgaaatgacacctatttgctatcctgaaagctgatatgctggttctcaactttgcctataaattagaatcactggagagcttttagcaaatacaggtgtct

SEQ ID NO: 38445 - DNA, 2508 bp, Homo sapiens
ctccatggactacaggcaagcagatttctggagagcacgtgtgaaatctacatagtgggacaaagcttatgattaaacatggcagacctaagcttctgccttccaaaaccccaactaaaaattctagtagaggaataaaaaggtactagtgcacaaaaccagataccaactaaaaattctagtagaggaataaaagggtaccagtgcacaaaaccagataccctggaagaggagctacacagattttgaattggctccatggtgtagacagatggaaagcaggtggaggggtggtgattggtttagtcttcagagggcattccaaggaggagtgtgccatacccaccccttttcctcccagcagaacctcagaaaggttgaggttctggggcaccaagtgctgcaggaggcaggaaggagtttggcaactgaatgcagggggctgcttagaagtctggaattagatccctaagtgttctccccgactgggcaaccacacaattcctctccctccccttcctctgccacctgcttgcataaggctggaagtttttctctagagatgtggaaccaaaaaggctatgaacatagccacattagcacagaggagggcaggagtgaggtttggagctggtactgggggaaagtgaaagtcagcactgacaatgattgaatggagatgatgaccccagctagcccctgcctctttcgcagccaggcaggcatcctctccagccagagagcagggattctgtctgccatgggggaactgagctgcagacagaagaccgactaaagtccatttggggccctactctgaaaaggctgcctcagtattaggtttctgtcagtgaaattcaccagctcacaagcctgcccacgtgtctcaaagcaaacccatgaatcagagttttggatcttcgtcttcaataagaatgggcatgcgagggccacctgattctggaggaaagacttcaacataaaagagatcaaaatcattcaaatgggaaaaaatacttaggagaaacaaacaatgaaagggaacagaagtaacctttataaacatacaaaaacttatttgatattggtagggagataagagagggtgctgtacccgtgaatccagaacaggatgctttaattcagaaatcatcaaaggacaagaaagaaaggtcttaaaagccctaaaaaaaaaaacacacacacacacacacacaacaacaacaacaacaaactcccagaaaaatgaacaaatgaacaaaaaaacatggacaacagggaagacatgataagaaaatgaaaggattggtcctggagggctaacattcacctaagaggaattccagaaagacaaaataaagaaaatgaaagtgaaagaatgggcaaagaaatattaccagaatatttcctgtggatttgaaaagatccatgccagcttataccactttggaatttcagaaaccgtgaatgaagagaagaccgtaaacatttccctagacggataaaacaggttctgttcagaggaacagaaagtagaagggcacaggatttctcagtagcaaccctgcacaccagaaggcaaaggaagtaaaatgatagtgcactcctgtcctcagcattgagcaattatctaataatggaaacacagaggatagatttaaccaaaaattataatttatctatatcgagagaatagagggaggcaaaatatggaggaaagtgtaagaaagagtctcctagcctaatgggaagcttattgatgtccctactggataactcaatagcagcacaagcattttatttagaaatttgaaggagaatataagaaacagctgaaaggggacaggtcaggggaggaaagcaggagactggctttgtctgttccatgataagacttggactttctaaatcacttgcatggactacatgataagatccctgtaaggactttgaagaaaagattccttttttaaattccctgatctgattgcttcgacttcttggaggacgcagactgaccctcgctgtcttacaacctcttcattaataggggatctgggttcccctctcttgggggtataggacttgtctcttggaacaatgagaaaaataagactccgctggggctttatgcctacgcttacacaggcagataaaatacatgaactttgttcattgttctcatggggatatttacagagttcttttccctcttgctgtttatcttttggctggggttctaagcggaatggactcaggtggtgagtaacggctgaatctcattgttcccctcccttggtgacacaccctgagcctgtaacccagcagcagctttcgtgccatgtctactgtcccgtggagtaaagctagtcttgcctttgatgtcctactggttgtaaggattttttttctttttttctttctttctttctttttttttttttttttttttgagacagagtctcgctctgttgcccaggctggagtgcagtggtgcaatctcgactc

SEQ ID NO: 38446 - DNA, 1045 bp, Homo sapiens
tgggtgatttttagatagactttggttacttaaattctgtttttaattttgtgtttgacagtttcttcattctaatatctgctgtcctatagataggttttggcattctgcttgcttcagaaaaatccaaagcacttccacctgtctctgtgtgtcccctggcatggaggagggcagacatccaccatgttccacaggtgacccttctgaggcgagaggagtatgtgatttgttcaaggtagaatatttcagtagtagcagaattctagaaattgattaaggtacttgacccttgggtcagagaactgagccgccctctttctgcataaagtcaccttttgggtacccaggacattttaatcttgttggcattcagtctgcaaataaagctgactcataagtatatccattaaacacattttaaaaagaatacttggaagtttcctatcctgctgatgtctaaaatttcaaaatcaactagtcatttatttgggtaaagcaatcctcttctaagcatttcttccataatccagttgcatctcagggaaataatgtaagttaacattctattttaattaactacttagatttttttttctcctacaataacaggaacaggtgaaaaccctcatgtcagtaagcagggtataaaaggtggggaaaagtgtccggagatggctttacctgtgagtcagctttatttgcacactgaatgccaacaagattaaaatgtcctgggcactgaaaagatgactttttgcagaaagagagtggctcagctctctgacccaaggagtaaatcaccttaatcaatttctggaattctgttgttactgaaatgttctacttgcacaaatcacatacttctctggcctcaaaagggtcatctatgaatcagggtggatgtctgccatcctccgtgccagaggacacacagagacaggtggaagtgctttggattcttcagaagcaagatgcagacacaaaatatgtgtaggatgcattgtcagctttttgctcatgattggaacaaggctgcagactt

SEQ ID NO: 38447 - DNA, 1233 bp, Homo sapiens
gaataactgaaaagatccactggcaggcaaacatggaaggtgattctgtaaagagaagagggtgctgggactctctgacgaccacagcttcctcttctcctgtggtcccttgtcctcaagactcaggcgtgggccactccaggctctgggtgacacagacaatgttaagatggtgcaggtgtcacagagaatcagaataccctctgtctcagtaggaggacttggaacttgatcacgtttatccgccaaacaaaaacaagacctgtgactgaagtcaccagcggccaaacttgtacagctgtcccacaaagagaggtggcagcaagggcagccagaaagtcatgggagagccctgcctgtggataatgagccagggtgaggtctgagcttggcaacctttctgctgggcactcgtgaagcctgttggcaaaacctcgtgtgctggagctgggagctgggccaggctggcctgttctattagattgggaaacaaagaaaaatctagccaaggctagaaggtcttactttggcctagggtcattttttggcgaccacactaggccttggtttcatatggacacggagggagctgtattagaagggagctccctgagggtcctccatgccttcttgttctgcgattgaatgaaataaacaggacaaagtccttggtgaactggaagctgctccttatgtgcatatttttgggtccccaacgtgatctcagggcaccttgctattcaataggcatcatacacttctttggacatgtgttgggaggcaatgagggcaaccctcagaacatgcggtagcgtgagtggtgcggtgtgtgagtctatgtgtgtctctgaatgtgtgtgtgattgtgtgtgtttctaacctagttttgctcatgaggagctgccaacaggaagaaggaaggattattttgccacaaggagagcttgagttatacaaagaaatccctttttaatgcagttgctggattttgtttccaggaatacagggccttacccaggctttgtagctcctgctctagttcctgccacccccacccctgctcacacactcttgtcacccagacaattggcccttgtcccctcaacaattttattcatatggatcctcaaacaggttcctttctcatggctcttccatgaaaatctctgaaccacacttgagaccctcatcggccaggaagccactcagggcctctctggcttctcttgcagg

SEQ ID NO: 38448 - DNA, 1441 bp, Homo sapiens
agaagagtggatagacactggttggatggctcactctctgctaagtgctgtaggtgccaatctccttgaccagctgtgcctgggatggtgtccgtgagttcagtctcctactctctacttttcacagcttctacccttttagaacccacagctgatccaaatcagttcatacaacagctcttacaaaacagcaacaccgataaagtgcctggttagctcgtcctgcccccagtccccactgtacaggtccctggaaagtctgactgctttgtgggagctaagggcaatggactgggttggtatccaggttgcactttttattttggtcctctgggcagtgttccagttaaaatgagaaaaacaggattaattctagtgacgtttcatcccctcatagaagtatggagtccttcctttgtgactaccatggatctggcctcttagaatgtggaaaagcccttgctttgcccaaggtagcctttctagcaggtggatctcagaattactgtattaaaaaaagtctaattaatgaccaacggaaggaacagtgacacagattaatatttaacctgttggaaagagtaactgtgtgtttggggtttagtaacagatctgcagcacaggttaactcagtctctgcctcatcagcactccttaggtcgctctgttccctagaccacagtctttccttgacttcattccccacccctattcctctatgaggaactcaggaggaaacatggaagccaagcctcaaactgagactcgctagccaaaggcagagctgagtttaagtttaatatttactcagccaggaaatactctaattaagccttgctctttaaatcttaaagctccaccctggaaggacagaaatgagctctcccaaagggtttcatcctggggatgaggaatcctttttcccctacatccaaatatttctgagatggggttaggcaggtcttctttccaagttcaaaaggcataactaagattgtgggttgaatttccatgggatacccagatggcttccagaaaaagagctggctgtgtagatccctaattccagacagccagaaaggattcactgaatatctggagcaaaaggagattttcaatgcagggaggcagtttagtataaatataggagccgaagtcagatgtcctgggtcaaatcctggtcccgccactattttctgtgtgacctttgagtgtgactcatatctctaagccttagtttcctcatggggaagttgcagtaacagtatctacctcattggactctggagagaattaaacaaaatagtccatgtaaagtgcttagtacataataagtgcttaaagaatatctgctataagttatttgaccattcattcaaaaaaaatgacttgtgcctaaaatgtaccaaataatgtgtaagataatggtacatatagagat

SEQ ID NO: 38449 - DNA, 1314 bp, Homo sapiens
ccctcccaccacatgtggggattatgggaactacaagatgagatttaaatggggacacagccaaaccatgtcagtcctcatggatgggatccccaagaaacaagccagggatctgagctgctgagaattcagacacagggatgagccccctcatccttgttttaacaagccctgagtttgttaaaagtctatgagaagctgctcatttccaactgcaactttcacatatccactcatccttaaaaaaagagtagatgaaactcaaactcaaagagctgggctctttcatgccaaaagttccccaaacctgtgaaacccttccatgcagctttctccactggcaggactttgcacttggaggtgatgaccctgagcttgcatcatttgtgatttctatttaaaggcaaaccccagacagagaaatatttgccataaattgttacagcaacatgacatatggcttttctgccactaaggtcacactgccatcggcctctcacttcctcctcaattgcttgttcattccacaaggtttcctcaatttcagcaattcttgtggtgcagatctgcctgcccagccatttatcaccagtaataacaaggagagttgtgatgttttacatctctacacaatgatctgagtcttggaaggcttcccaaacccccttgcccctctgcctggccaggcagggcctcttttcctttcttagtgtgacatatcagcagtttagatgcagggctctcccgctgggtaggagcttgtaggtcacagcgacatccaacagattcattaacatagcaatcgcaggagagaaaagaagcccaggcgattctggtgaatgctgagccttgttctaaattctcatatagaatctccatagaaccaggaaggagggagagatctgaggctctgttttgcaaaagaatttcggagagccaccagcttggaaatgaagcttatcaggatggaaagaaagccacgcattgcaaagccctcctgcaaacaagctcagctctggggagaaggatattaactaaaataacagcacgtggtagtcaacaagttccctagctgtgccttcactgaagcaggtgaaagtattttaaaatgttgaatgaagtggggggaggggaacccagataaagccaagaattcctttactctctgccagtggttctgtgaattattccgttggaatactgtgccttctctccagccctgtgtttcagaatcaggggaccttcctgcaacctacggacatttccatagattttgatgaacctaccctggtgtcaggggtgggcagaaggatg

SEQ ID NO: 38450 - DNA, 3310 bp, Homo sapiens
tcctggtcacctgggcaaaatcctaggtgatctggggacaaggcggaacttcggttttctgatctgcaaaaagaaacacctacctcataggactgttaggatgaattgaggtaatggctgggttgtgtacattatacagcactatcaaggtgtgcgctgtgatcatttttgagggttgttaggtgtttgaggacccagaacagtctacacagctgtagtccccaagtgttgggcacgccttaagcgctccataaacacctgtagaaatgaatgaatgacgtatgcatctgcacgtgggcccacatctgcaagaacaggctgctcaggccatgaggcccggtgcatcacctgcacttctctttataacgggtagtaaagtctccctcgctctgtgctactcggcaaccacaattctgtccacagagggcggcgcagtggggctgcttcgccgcgagctcgcctccggggctcccacgtcgtggcttccgggcaggtaccgggcagctggagacgccagagccggcgggtaaggtgcgggcggtgcgccgggccgcgggcgcgcaaggaggggcgagagggtggggaggggcggggccggcgtcctcgtcacttgataaaacgcctgcgagtctccagagaacaacgggctcattcagcggtcgcgagctgcccgcgagggggagcggccggacggagagcgcgacccgtcccgggggtggggccgggcgcagcggcgagaggaggcgaaggtggctgcggtagcagcagcgcggcagcctcggacccagcccggagcgcagggcggccgctgcaggtccccgctcccctccccgtgcgtccgcccatggccgccgccgggcagctgtgcttgctctacctgtcggcggggctcctgtcccggctcggcgcagccttcaacttggacactcgggaggacaacgtgatccggaaatatggagaccccgggagcctcttcggcttctcgctggccatgcactggcaactgcagcccgaggacaagcggctgtgagttcccagacccttcccacccccactggggcgccggcctgcgcgcgagttgaggcgagggcgcgccctgttcccgccggccccggggagtagttggcccgtgggtcgcgcccgggccggccgaggcgcacccagcgcccagcgcgctcggctccccgccctgacccgccccgcgcggcgcctccctccattcagctcgggaaggaggagaacccgagggctaggctgggccccgggagagtttacttttttttctgttttaaacaaagtgctttccgccggttcttccctccgggcgtgtttgctgggaccccggcaggtggcacgctttgctgagcttcacgtgtgtgtttggggctggggtggcgttcagggtcaccgcagcgctgctgtgggtttgcagggagcgtagttccaggatggtctaggcctttcccaaactcacggtgcaccccgtctcccccgcagactggcgcgccccgcacaagttggaaagccactttccatgtgtcctgcatgactttctcagcaaggcgggggcgctccttaggagatacttttacatgcctttgaaaaaaaaaaaaaaaaagatgggggtgggggcgggaattaaccaaacacctgttcgctggactagatcagctgagaaaacaagtctgagtgatgtgcccagcccccaaagtactcggccgcacccgagacccgctcggctcctgcgttgggcgggcacagccaaggggttaaagcaaaatgtccgatctgagcctggactttgcaaacaaggtttgtaagggacaaccccccaccgtagcggtaaacctcccaggagaaagaggagaccggcactactggcctctccttttatttcttaaacagtgtttggttcccacatgatcggctatttaagccggagagggtattttggcgcttagtcgccttaatcgctatggggttgcattcttcatctgtgctactgaaaaataggctgtagcaacaaaaggtctcccctccccacccaggccttgagttgaactaaggaccttccaggaccaacagaccggagaaagcaaagtgcagccacagtgaagagattttgtgtttaggagaggcgaatgggattttagaactggaggaaacctcttgatttcagcggttaacaactttggaattcgtgaatgttgcagcccctgaattttagtcagtttttttttttttctgataacacctgctaggtgaagcacagaaattagctgggggtggggaggctctaggagggtggtctgaggctatatgcctggccagctgcttatactctgctttctctcagaaataattgttgttaagctgtaaatctgaaatgaaaggttcctgttaactcagttaatagatgacgtttattgtctcggaatacttggtgtgtagaatttgagcttgttagtgcagaaatgattgtgggccagcagagggaattcattctcctgggcattctctctctgcaccagagccccactgaaaccggtggcttccttgaaatacttgttcaagcaaaaagtgtgaagggaaagtactgggacaagaaatatcctggcagtggagatttgcgaaacgtgactttgccaggaatctgtgtcgtgaaggttagcagcatgcttgctaaaacttgttactgctgctgggcttctctggtattagagctgaggcaactcctcccgaggtaaggataagcctgcaatggggtctgatgccttctaggaaagctcttcttagcagctgacagaggggagaggccccgtataaggagactgtatgtttcctagagtccaaaggcagtgaccacactttaaagaggctgtggtttatgtcacgtgctgcccacctccatgcttttgtaaagctttattccagcttcaggaatagcattggtcttcccaggagaaccagcacacacaggccatagcacaggtcagttgtcaacctttgacagtaaagaatgtgggtgtaaatggcagagccagtaagactgagaaaacttctggaccagcttcctaaactctatggaaaaactcagtgggggtctttcagggacctggtgggagagagacctaagctgagattccttctcggccttttattagcagctgttaatttactttgagctttaatttctttatctgtaaaatggagatattactgcttactggggttattatgaggattaagagataatatgcaaagtgcttaatgcctgtctggcatgggtacttgctgactaaatggtagc

SEQ ID NO: 38451 - DNA, 2776 bp, Homo sapiens
gagaatggttgatgtgatctgcaaaaatataaagtagagagggaacagggagtgcagatggggagggaagtggtcagcagtagggctgcctgggaagactttgctgagaaggtgaagctgcattcctggcagagagaatggcaaacacaaaggccctgaggcagaagcatgttcaggcaaagcagtgagtctccttggaggcagattgtatagggccttatggatcatcgaatgactggcttttactcatgaatgagatggggagcatttgtaggttctgagaagagtaggacatgtcctcacttggattttaaatggatttctctggcctgcagccttgagagtagactgtatgaggacaaagatagaagtaatgatactgactaggaggctcctgtaataaacagataagagatggtgatttggaccaatgtggcagcaatgaatatagtaaaaagtgcttggattcaggatatgtcttgaaagtagagtcaacaggatttcctggggactaggtatcagttgggacagacagagtagagaagaatgtgtccaaagtttttgacctgagcagctggaaggatggagttgtattatggtttggggagagatgtgagagtaatagattttgggggcagggcaggagtatggttttagatatgtcaggtttggagtgtctagacagccaagtgagttatttaggcagttgagtaagcagctgagtcaattaaaaaaattgaatttaaaagcctgaagttcagttggaaaggtttgattggtgatgcaagtagaggagcctctaggttgtgtttagaatgatgaactgatgagggcaccaaggacggggatggaggcctgagccctatggtgttcttacacatggaggttagggagagccctggagactgacacccatggcaggaggagagggagggagtgtgtggtcctggaaaccacatgatggggtttcaaagaggaagtgaaagatcagttatatcaaatgacacttactgagatttgatcgctagattggcaatgtagaagccactggtgaccttgtgagagcactgatggggaggagtgggagcaatgcctaattggagtgggtttgtgagagaacaggagagaaggaattggagaccataggaactcttgaggggttttgctgtagaggggagcagagccatggcaacaactgtaaggggaaatagtgggtttttgtttcgttttgtttaagatgggagaagattatagtgagctggtttgatgaagatgattcagtcaaaaaggaaaagttaatgcaagagaggggagaactgttggtgtgacctcaccaactgagtaggtgagaggacgtaccgtgggggaggtggcctgatgactggagcaagggtagctcatcacagttatgaggaagaaaggtcggatgaggggcacagatgcaggtaggtggctaattatcctggtggaagggcatggggtttttccattgcttctaatttctcagtgaataataataagtcattagccctaagttactcagtagttgtgtaaaagtttgcctcattaggagtaagaacttcactgaggcagatggatgtggatttgaatcccagctcctttacattctgttgattttgacattggacaaattacttatcttcattggtcaaatgaaggtactaatagcacctacctcagagggttgtgaacattaaaggtgaggataaagcacttagcagagtgcccggcatatccaatcaacatcagcctttactgttagggtcccttaaagtaaaatatgaacataattccctcacactggggagtttttgtagctctcttatcttttcagtctggtggacagcagaggttaccctttgggggccaggtcaaaggttaagtttccctatggaagactacaactggagggcagtccacaggccgccatgaagtatacattgttttgatgaagacaggaaggggaaatatgggacttggaagaaggaagagaagatggcagcatgtcaaaactctttggcaatctgcagacctttgtgctatatttgagctacagagaaccacgactttttattttgagttcttacaagactcattttaggtgtggagagagctcttcccatgtgggtctgcagctctagaattgggtagtgccttggatggcacagtcctggtgtatcctgcaggctgagtggacaggagggcgttgactgggtgtgtgtgatacagggtggaagccagctccgagaacgcagcaggagagccaaggctgtgcttcctgttcctgctggcctggttgatttgtctttgtaatcctagtcaatgcatccagcgtctcagtgcatatattgaataaaaaatgacgaatggccttgttgaattgtcaggagtgtagaaaatgaggctcaatcagcactttgggttctaaaatactgtcgtttttcaatctcttctttcaagattattggtatagaccttgagggaaatctgagttcaaaaggaaatagaatatctttggaattttgcaaaagtgtgagtcatcaggacttgagcatacattcccctggtgtgctgcaaatcagatatgaaacatcttcctgaggtggcatggtggtggtataaaagcttcattatagtacagaatgaagtgtgtacttatataaaacacaagtcttcgaagacattgcaagcttttggtggttgctttgcactgtgcctctgtacatgttcacctgcctctgtcattcagtgcttt

SEQ ID NO: 38452 - DNA, 1011 bp, Homo sapiens
agttgctcagatgataaacatttctccattagaaactaggctcggatttgcctgtggccacaaatccagaagcagctgtgtgttccccatgtttctcaccaacccctgcgtcatgtttctgaataaggagtcctggttaccgccacacccctcattcattgctttagattagatgaaaggcgaggtgcctgactcaggccactgactcactctgcttgggtgaacccagctcctcccggtaggaagtgattgccccaggcaggttgaggagtgcccacagcatccaggactaaagcatttggaccctgcagctatttataaacagcactttacagtgctttcagtctgaatattgggactcccctagaaaggacagattcagtcctttctgaaaggaggatagacgaagggtgaggagttcttgttggatgtattttcatagctgaaaggttcccctgaatgctgtcagtgccatggatgttcatagggaaggttagagttcctgtctctgatgtcattcattttatgctgcagctcacttgactgtgggactccctaggaaagcttatctaccttttcagctgttgcacctcttttcttccatgtagtttgccctctgccttacattcactcttcattgtaatgccccagttgccagcacagtgcctggcgcacagtaggtacgtgtttgtgagcttgctttactgatgtgttgtcatgcctctggaacgggctgtaaaaatcaatctttgactctttgccagcaactgcccacataaagagagcatgtgtgagcttgttttatgcaattacaaggtttgcttcatgacttgtgggcgctgattttttttttttaacctcactatctccatcattttctctgcaagattttcagtgaccctcgtgtccatggactgacctccatttttaaaatttcatttttaatttatttttgaataggtagtacagtcacatggtacaaatattaaaactacaaagatggaatgaaag

SEQ ID NO: 38453 - DNA, 1087 bp, Homo sapiens
tacctcaggaaggcacagtgttagaaactgacatattattgcttattacatttagtgtggccattttttccttccattgtcacaagtatttggtttcttctcttgagtttcatatgatatccctggcatcataggggcttagaggttgtattctttgaagagggtgtcttttaaacaccagatcatacccagcaagaaatgctgatactatgagagacaggcctattttcctcgttttggtatcccctctttggcttcccctgtttagttgtgtttgtgcgttttgcatgaaccagccataggactctacatttgttctcactcactgcctaagctgttgaagaattagtggactcctagacaaagaataatcccactatctcctagttctgactgatttaactgttaaacgtatattaaattcaaatctccaaattgtctctgtttcatcaacaggttgctcgtgggggccccgcgggcagaagcgcttccactgcagagagccaacagaacgggagggctgtacagctgcgacatcaccgcccgggggccatgcacgcggatcgagtttgataacgatggtgcgttcctttccctcactcagcgttcactccggcagcttgcctgtactgtttccatgagggaggagagtggggacaaacatttattcttgtagagaggacttcttttaattgcatcagacttgactgttttttatttgccctgaaaatatttacttactttacttctgaatcatactgggatgccgcgtgttttgctgctcctcctaaccgtggtttctaaaccgatatggtgtagggatgttgccacctagtgatgtgttgaggttctgcaggaggttgtggaaaaactcatttcatagcaatgaagagaatgaatgagcgtatcttgtattcatcagccaaaagttctcacatgctgttaaaatatttgggagaaagacagttttaaatatcagacccctttggaatgagagctggctaacagagataaagttttccctcctgtctcagatagagacttgttttgttaagggctctggataggtagaagataccatgaggta

SEQ ID NO: 38454 - DNA, 2160 bp, Homo sapiens
aaaccaacagtcagtgtgggagaactgctgatactcgaatacatcaaatagttataaaaccgccaaaaaccgttttctctcaaacttttggtaaaatgtgcttcagggaaaacgcagattggtggttctgataaaatcttaataatgaaataattttaaaaagcaataatggtaaaaataaatcccatttattatctggtatgtccccggcattgtgctaacacagatagctctactacccatgtcacagcaactgaaacagataatatgctcctttttcaggtaaagagacggaggctcagagaggttaaacagctcactcaaaggcacagagccagtacatggcagtacatctcttctcccggggccgccgtcgcggtgatactatttagggccacacgtcccagtgttcagctttcgtatttacgtactactgtttggcaagcggggactcctgaagctctctgaccctggaaaatgcgtggcttgcgtcacagaggagcgtttctggaacgcgctcgcagcacgacaccgcggtgtgtgcaagcggaacgccgccctgtccttgagccttttggctgagattgggagggcagaggaagcaggaaggtgggatttgtttcaaaagggtgcgggaaggggacgctccataccgcctcgcctcttagtgtccccagtcccatcacccgacgtgtacggggacggccgacacgctcaccccacacctcgccggctggggcgggatctgggcggcggctgcggcctggcgcgcgctccgcatctccttcctcgggaggctgggcgggactccggcgagggggcgggccccgcaagcgcccgccccttttctctccccgcctccttcccgctccgcgtcccgcccagcggcgcagggggccgggctccggctaggagggtgggggccgcgccggtgacagccgatccccgcccctgctgcccgccacgtccctcacgtaccactcggcagaggcgcggggaaacctggcgtactggctgtggcttctctagcgggactcggcatgaggctggcgcggctgcttcgcggagccgccttggccggcccgggcccggggctgcgcgccgccggcttcagccgcagcttcagctcggactcgggctccagcccggcgtccgagcgcggcgttccgggccaggtggacttctacgcgcgcttctcgccgtccccgctctccatgaagcagttcctggacttcggtgagtgcggcccgggaccttgggcctttttgcgcggtcccgggcggggagctgcggccgctgccccaggccgggtcggcgccggccagctctcgcctgaggcgcacccctcctcctcagcgtttccgcccccagcgccttaggtgcttccttcctccctccgaagtgccggcgctggctggcggcgtaaataacggtgggcgtgtggctttgaccgtattgttgaaaacaaaccagctgggccgcgggacgacctcccgcctcccggcgcacgtgtgcaggtgcgcgctaggccaggccccttccaaggagtcggacccgggtgggaggccgagcgtgggcacccccgagaatcgcgtttggattccgtgcagtgatgatgaatgcccagttttgcatatgatgattgcatagaattggcgtgataatagggaaggcagattataactggcccagggtttcttagaatgttttccttgccagtggcttaaaactgttggcaccaacagcacatttcatcatcagcaagtaagtcttgggcacgtgttgagtgcatgaggacaagatgctgtgaagtttatttaccacattatcttggttttctctagaagctgttcaacaaattgcagaaggaattgcatagttaggcattttaacttttacatcccacttcccatgtgaaggcgatgaggggaaaagggaaaaccttaatgaattcataaaatttgagtacaaaggttatcttctgcattgtgacttctgcattgaacgatacctgcatggttggcaactttgtcttaaaactgtggtttgtagtggcataatttttggctcaaagccttaggtttttgtttttactttaaaatgaccctagttcgaggaaggggcgaatttggtggtattcatgagtatgccataaaactt

SEQ ID NO: 38455 - DNA, 2848 bp, Homo sapiens
ggattataatacttcttccctctattggtttttttttttttggttgttgtaaaaataacttgaactataggttgtgaagtttctttgtaaattactgtctaaatgattgtatttgatataatgactattcttgatatagcacacactgataatgtaataaaccaataaatctgagcacacgtgagtcataaggggtaattacatctctttttatctgtgtgtctatggtgaaacatgaatgcagaagagaaagagaagaggcaatgtttctgtcttagagtaatagtttatcattgcccttaggatatccctagcaagttacaatgaaagtgaagacaggtaacacagtaaaaagtgaaatacatttcagagaagggaaaacaagataaaaatttggagaaagatgaattctcaataaatatttatttcatgagtgaacaaattaattggataggagagagaaagtcagctgccgtttttctcttactatttatatgggaaacctccagaaagataagcaccatgagttggtagaagtgggaatcttggtaaggagagcgtacttgactttgaaagagacaagaagtattcttgcaatgtttgtaggtctgcagagaggaagacaaatgtagatccttcccagaactattgattttatattctttatctctgaatcagttgagcctctcattttagtcattctcctcccttttcaagctgtttaaagtttgaaattagcatcatacatcagaacaaactctcttgctaagtcatagctctcctttatgtgttcagtgattgtatttttatccatgaatcaccagttctctagatgacataccttccttcctccactccttgctaagtaaatttgtttatttcaccatttgttctcttcacagtctaaatgttaagcacattcccataattattgaggatttgtgatttttaaataatgaccccaaaaggctgctgagacctccctatccaagcacacctcgtttaattgtgctttgctttattacccttcacagatactgcattttttacaagttgaagatttgtggcaactcttcattgagcaagtccatcagtatcatttttctttctttttttttttaaaaaacaagatgcttttctttgtatttttacaatatcattcaataaaaagcagtagaaacataacagtgttaatattaagtttacaaaggaatatttgaacaaaaaatctgtacacattataatttacagcaattttatgtggtaaatccactgattgttaaaaagtgttctttataagtcgctctgctgcattaaatcttggagtattatagataaagaatgcacctagctctatttacaaatgttagcagcaggacatacccaagtcatacagcatcaaagcatgttaccagcagcaaatccatatgggtcttcagcagcctcaattcctgcctcctcagaagaaataattcaactgaggggcatgaggcagaaggagagactgaggcaagttttagagtgggagtgaaatttattatcaagctttagcacaagaataaaaggaagtaaagtacacttggaagaaggccaagtgggcaactggagagattaagtgcgctgtttgacctttgacttgggattttctatgttggcatacttcccgggtcttgcatctcttctcaacctgattcttcccttggggtgtgttgtccacatgcacagtggcctgccagcacttgggaggtgagcatgtgcactgtgtttattggagttgtacgcatgttcaattgaggcattcttcccttactagttgaatgtcccttggaggtcatatgccagttaaattccaccattttgtcccttaataaacatgcttgagcccaatcgcccaactcctgggatcttatcaggaagctgctgatcactaggctcaggtttttctatctattgggaaactgcctttccctggccctggctatgactaattattattttagagagacagttaacaacctccctgagcatcacgtgatggtcgcctgacattcctggtgtgtgtgctgggggagggccctctcctgtcctgctcatgactgactagctacctactgtaacacaggtaccaaatgaagaatgtaaacttccataaaacccatcagtttaacagctcaacttaacatgtttgttcagagccctgtctgacatattgataaaaggccaaaaattaagtttccataaagatagtaaaggtgtctgactcttgacactgctttgccagacacctgtaaagaaagattactctcaattggtcccatgaattacatggttaaatccaaaacaacccatctgacaagtggcaacttaaaatacttgtggaaaatccatttcagtatacttgtcagtttaccttggagcatggtaggggattaaagcaaagtttgccacaagcctgcgttaagtttgagcttccttggatttagccccatttacaatttaaaacatacaaaatacactcactatacatgaaattaatgttccttaagaaaataaggcttgactaacaatttattgtgagatgatgaactatcaacaaagaagcccccaggtgcaagtgcgcacacgtgcttggcacctgatcagccttccaccagacctgggaggagctgtttcttttggtggccgcaggtggcgcagttagctcatgacccagaagtctctcaagggttcagcgaaacttcaaatcaaattcgtcctgcactccgcagtccacgcgtgtaactttgatgggtgccagggcacgtttcaaagtcgtcctgtgagcttggctggggctcgggactgctct

SEQ ID NO: 38456 - DNA, 1473 bp, Homo sapiens
aagcatactgccacctcggggcctttgcactggctcctcccttgtcagcactccctgtcctcaaatatccctgcagatatcatccttcgctttattcaggtctacctatcattgtcacagttctctagagacagagccctgggcaaaggttaagtcttagagggttacttgggaggtacaatcccacacagctggctgctcgatatgttagtttctagagcagctgtaataacacaccacacactgttgtcactcagaacaacagaaatgtgttgtgtcacagttctggatgctagaagtctgaagtaaaggtatggtgaggccatgctccctctgaaacctgtaggggaggctccttccctgcctcttctagccttggtgtttgcagctctctgtggcgttgcctagcatttagataaattgctccaatctctgcctccattgtcacctcaccatcttcccctgatgtgtctctgtctttctccttctaaggacaagagattggattaggcccctacccccttaatgacttcatcttaacttgattgcatcagcaaagaccctgtttccaaatactataaagccacattcacagttactgggggttaggacttcgacatatctttctgaggaacatagttcaacccataacactcagtcggcgcacaggcttggccacacacagcaggctgtgtggagaaattgtgcaccagacggggcagggggaaagggtgaggcagttcagctgcccagtatcctccaatctcctgtttcctgtctcccactggtgcaaagtccattcagggggaatgaaatcctcttcctttccgagttgcatcattcagccccattggcagttgctcaggaaacaaggtcctgcagtttggcatttcagctgagtttggacgtggggagagaagccagatattctaggcctgtggctggtgagcctcaggcgggaaaaccacaggggcctttggtggctgcagggagcaagtggccgaggaaggaacaggtggtgctgagacaggccccaggttctgcccaaatgtcatctgaccagagaggccttctctgactacttcataccagatagatgctccttccctgtctctgcatttccttgttttgcttaatcattcttcgcatcaattattgccagttgacatattatatatttatgtgtttatttgcaatgtctcattttactcactaccacggtgttccctgcaagtaggaaatttatctgctcgtcctttgccctttcttcagtgcctatcacagtgcctggcacattgtaggtgctcagtaaatattgagtttcaataactcgagaaatcaatggatataaagaaatgaaaaagacttggtctctgcagtctgttagggagtagctgagtgggtggcagtggggttctcttaggtccagacaggcctgtcctaagcaggtcaggccccaggtgcagctgcaag

SEQ ID NO: 38457 - DNA, 1300 bp, Homo sapiens
cccccattgcgcccagcccttcctcaccccgcaggagaagctggcctctcattcctcactgagagactcgacgggcgtccccacgccaagccttcctcgccctcccctccagccttttctgaaggggagacagcaaaggtgagcaagcaaccgccggcaagtttcgacagctgctgaggaagactcatgggtttctaaggaaacagagaggcagcagccattttagtagcatttgctgtatgaaaaatatatagacactggcagccctctccccactctgccttggcgcctgccctcccgccccgcctcagaggccccggggtgagggtggggccccagtctccgagggacgcagcggacacctgtcgcaggtggccggccaccggggtcgccacccccagtgtcccccagcagcgggaccgcggggtccccaccccggggcggaatccccacccacgggcgccgcagtgcagcggcgggcgggcgggcgactcggccctccccgcacccgcgtcccgccccccgggtcccctccctctccccaccgccccaggccgcgggagcccgcggggagggcgggcctgtcgcagccgcgctggtcgccaggcgtccgggaggagcggggtccgcgcggcggacgaggcgggggcggaggcgcaggcagagcgagcgcgggaggtcgccgcagccagggacaccgcgcgccgccgctcaacatggtcgctgcgcacgctgcccattcttcctcctctgccgagtggatcgcctgcctggataaaaggtagctcgccgggggccgcagccgggggccgagctctgcggtgctgcccgggccctgagaccgccgcagctccgcacctgggcgcagcgcggccgggctgcgggtggccggggtccccgagcgggggaaggggttgaggtcctcgtccgggagacaggaggacaaggatccccgcctctcgtggggtgccagcggcatgagattattacacgtggtggagaaaatgcagcgcagtaaggggagagagcacccacctctccaaccccctgccctgccgcgactccaggctccgctcctgggtgggggtttattttctcttggcatcacgggacagaagaatcgatgcataccctttccggctattcagaccttgcggggtatgaagttttaaagaggggtgggggcaccggcaggtgcagagtaacattctttttttgttcttgaaagcaaagtgtgagggacccggtggagctgtcgaatcccttgctgaaattcacagctctctgcccccgcagtcgc

SEQ ID NO: 38458 - DNA, 707 bp, Homo sapiens
taacttgtacttctctgctgagatttcttttatgtccttgagcacttagttataatagctgctttaaagtctttgttaattctaatatctgaattatctcagagttggtctcttttggttggtttcttttgaggatgggttatttttttgtgtgtctttgcatgtgtagtaattttggaatgtactctggacattgtgagtgatatattatagagattctgaatactgtcatatgcctttaaagagtattgattttctgtttttgtaggcagttaacttggcaaaactcaaattccaatttcatcttccctgagacagcagcagacatctctgttcagttctttctccttaactgagtggcttggagtctgcttcacatatgtatagtactgggatcagtcagagatttggtcagatctcatgtagtcaatctggggctttccctctgtggctgtcttctctctaggatttcctcctttattttctagctgctatcatttccctgaactctgtcctctggtttctcaaccaggaagactacaggcttttatctgactctggccacactgtggaactgactgggccttgtccttagatgaaaagttataaaaattgggtaatttatcaagtgccattcttctaagtgtcagcacccaccccccgcccgcctttatttctgcctgttctcagtcattctccactgcctt

SEQ ID NO: 38459 - DNA, 795 bp, Homo sapiens
actcagttcttttaatgctgatactgtaaatcctgtgtagctccttgtgtaaaaacaaaatgtcctgtttactcagaatttggattattgtatttttttgttgcaaaccacctcatactgctccactagtttgaagataggtgcaaaccacatgtaaaaatgacctatgcttctgtctcctctgtataaggtcacagaacctcccagtgtggccacccttaccaggggagaagcctgaaggaggtaaaaaggaataggactgcctgtagtagatactcatgaaatgtttgtaaatcaatgacaaatgagcaaatggatgagtcattagccttctagctcggaacactgagatacccctggaaacagcctctgctgtgctcagacttggcttggagatagcaggaatttgctttgctcacaatggaagttgttttccaatgtctttcatgtgctacttgccccagcttcaaatcactagagccgagtggagtggtttgcaaagtaaaatcacagcatgtgaaacttaggagttaatgtgcctttccaaaattccgagtgttctggtgcctaaatcagtggaattagttgttttcatggtgagaatgaatcagtgatgggtatttacctctgtgaaagtaaaccatatggtagacgcaaaataagcctgggttttggtgtctgggcacatggccctgctcctgattcattgatttatttaagcagcattatataagtttttatatttctaagcagcattatgtaagttttcacggaaatgcaaattgaaaacactga

SEQ ID NO: 38460 - DNA, 839 bp, Homo sapiens
aaaaaaagaaaaaaaccaacaatcagagataattccataaggctgtataaaccctttcaactccacctttcgaggaccaactgaattcaaactgttttctgtggaacacagtttttaaaaccctgctttacatgattgatccaggctgaacctatgaagacaccttggccagtgtcaccgatgttcccctagcagttgtgtccctctgctctagggtaccagtggcctcactagtgccattaccgttctgaaactcacgtgtaactggccagggtacaaaactttaataggagagtgaaaccacaaaatgctgaagctttgaaaatcttgagccatcttgtcctgattttgaaggacacattgcttatcacccaaatgaagattagattagcagtgctgctggcccaatcctgtgagctgtgtagtgtgtaaatactcctttcattagctggcctattagaaagcgtaacccccgagccaggacttattttgccccaccttctagaaaataccgtgacttcatgttgaaggtgccaagaacaacttcagctctccagtctctgaggaaatgtttgtttttgtacttgtgagttatgcattttatggggcagactgtcgttgctgaatttctttctgctttttattccatctgttcctcaactcttacaaaagctagccataccatctctctctctagcttctgaagtggtaagctaattgcatttttaggaatgacgtgtagttgtcatccatctaaatggtaaataggaaatgtaggtaatactctagaactctgatccttctgttgtcagttatgccgtgtgttggttgcttttgaa

SEQ ID NO: 38461 - DNA, 2769 bp, Homo sapiens
aaggaacaagaggaaaaaactttaagacatcagatttggaagaaaattaccacaaaatccttctagcagtatatgatctagaaacctggtctggtcagctttgttcaaacaactaattttatactaacatttttttccagagtgcagacagtacagttgataaacagtacatatagaaagaataacataaattctgatcctgacaaggcagattgttttcaaagcctgtactttccaaagctgtgacagaacatgacctggcagttggttcctttcctgtttgggacacaggtcccacatcctagaaaatatcaggaagacgatttctgcaggtcaaagtgttcatctgagaaatgctggcaggtcctcaaagggagtcccacagaggccgaggagatgggtgggtcagagagggctgtggtgtgcatgactgcagccccgaggtcatgtcttccagctgcacagtctgggcagggcagagtgagaagggcgaggaggctcccggctttgctgccacttggccctcctgcctgacactctgcatttgtttctagtaaacggagctgtgaggccgaggtgctgcagctgacacgtgcttccatgtttcccatagtggaccaggagcaccatttccaagacaaatatttattctatcgatttctggatgatgagcacgaggatgcccctttgcctactgaggaggagaagaaggagtgtgatgaggagctccaggacaccatgctgctgctgtcacagatgggccccgacgcccacatgaggatgatccttcgcaaaccgtgagtgagagctcgtggctcacccctccaggtcccaaggccgcctagtgcatagacataccatgaggagagacacaaggctgctctcaaaagccctggccatcccccatggaacaaaagggagcagctgaagggtgccacagcagtgcttgtctctgttattttaatttttgtgtttgatccagatggctccattttccatttgcatgagttaaagctgtagaggttgtcagtagttggctccggctgtcaaaactgagtccccatattaaatgacctttggtcaatgacaaacagaaactgctctgtttctatgccagcctgtggcagcacctttctccctaatgcaacaggacagaggtcatcaggaccatagccttcatgcctaggcctgcattcatttgttccttcactcattcagcacatgctcttacccacctctgaggcttctgttcttcagcttaaagctcattcttctgagcacaccacaactgcattacccctgtcaaggcccccattgagccactgaggcagtctctcccttctgtctcagctgaacccaccttaccttcaggagcaggccaccacctgcaattgtggactctgaaatgtttaatcagatccactcagaaagaatgtattattaagcccccgtttgatgcagggcactccacaaattgctatggggcatataaagaagcatacatgtggtcctgatcctcagggaaaccttttcagttagcggtgacttggcccttgcatccgaaaccaccacacaggcttgtgttttttggctggaaatgaagacgccctctgccccacagccagcgtcggccagctgtggatgtcagctctgagtcatgtttggccgaccttggtgtattagtcttgtattagacaagggcattacatgttacatgtcctggatgtctgctgggtgctttccaagagtgaagtgtccctcaggccagcctccccagaggctgcccctcagaccaacccacagtagcctctctgaaggcactttaatttcccttccccaggattctttgacttgcccttactcagggttgtcccctttgtcaaaactttctcatgggtctgactctcccacaccatgtgtttcaaaggcctcccctcatcccagcagataccatcatccttaactctagaaccacactcttcagctctgtaagcctcaaaaccctttcttcacataaaaagatgaacaggaaaatccaaaacatcaaacaaagctagagcttcactgacataagcaggagtggggtccaagaaacctgcccagccaatgtatgctttctctgccctgaaggatcataggagagcatggctgagggggcacaagagaatccctggggcctggggaactcagatgaacaccaccattttaagccatgttttctttcttgtcccctcttgtcccactgtccctcctgcatatttcctcatcatttcctgggtccatcccctttttgctgtcctccttgctgccacctgcatccaagccaacatatgcagtggttctgaatcaaggtgggacagccccctaagggctgttgtcaaagcacaggagggggcccactgctagcactcactgggcagtggctaggaccaagggctgccaaacacactgcagtacctaggaacccaacacaataaagagctgtcctgagaacaatgcccgtgtggagaaatattgcagtcaaccatgagtttcttaaaggcaaagacagatctcattttactacatttgttcatttattgagtacctacattgttctagatactatgttaggtgctaaggcattaaggtaaacattgaacaagaaggcttctcctccttggagttttctgtctagggcagaggattaagcaactacttatgcaagcaatcatttaatcacagctgcattacatgctatggaggaagatgtagtgtgtgttggcacag

SEQ ID NO: 38462 - DNA, 1937 bp, Homo sapiens
actgggttcttaggaagatagagccatgatttgggaccgtaatttggaatttttttttaaatgtgaattttagctagctaggaataatttggaattttaactaagaatataaatgtgttcgttcatttaggcttcattattcagcttcaagacatagaattttccaacatgtttgccatgatgcattatatgtaatgcaagcaagagtcactagtaacaacagaatcatgtgatgttgcacatggtctccccttctcacccacagccaaagacaggcaggcaagtgggctagttaatgcaggtgggaccatgtttgaaacagtctctaaggaggttgcctggtatgaattagctataagctattctataaaaagagctacaagctttaaaagcctagcagcaaatcgagtagaagtgattttagatgagagcagcagcaagagaggtgagagatgactgcatgggaagccccgggacagtttgcattgtgcccccagaaagagtacaacccttttccacccagacctggaaatgtggcctttgcatgtttcttctgtttttcttctaggtgaaacgagagttagcaggtgttctcatttttgagtctcacgccaaaggagggactgtgtgtaagtgaaaagctgtactggaaccttgcgcctggccagcacccttgcaagcacatgccacgggaagccaggctgctaacgcctcacttcttggccccgggtctggcttggtgacttggcagggtgtcctgtggtactttcgtttttctggacctgtgattatttccagcacatgtcaattattctgaagtatcgtggttttctagtaccagcaagtgttgtgggtgccagcctgagtctcactggctccctaccctcctgactcaccacagtgtttaaagagggtgggatgaagtcactgcccttcaggaagggcctgaggcagtaccttttcccagtgacctcatttcgttcatagctttagaagaactaatcgatctcttgaggttgttagttagaatgatatttaaaccatcctactttatttttcttctctcacttccactttaagctccaagctggagagaatttctttgcttcaaatacatatgcagtgttaatctatagtatctcaccaaaatccaagttgcagtttagttctgtgatcatatttggaagcaagaaaaggaaatttgatgtgaatagatgtgaacaatattatataagctggcattccttactactcctacaaaaatctggctggaacaaacagggttagtgatctactaaggtcaggaaatgcctctccaatctctcttgcagaatcacaggacacagcagcatgctaatgtgttctcagaagttctgcaataaggagaaatgatcaccacgtttaaaccgatacttcctgagcctaatgacacatagaacactttttgcatggacacctgttaactctttagagacagtttggaaaatcttgctctttcttcaggctacattgtatgagtcaaataagcaggaaacattaattgtaaatgtggtttttttactttcagtcatcaaaaatgatatttctgacattgatatctattttagtaagaatgtaacttcttcaaatgttcaaggcttactttaatatttttatcttaatggttgctaatgacttattcttttttattttcttttattcttttcattcaaacttgctaattgttttcattttattatgaaatagttaaatattttaaacaaaaaatagagtatattacaattaccttcttaatctttgtcagataataacatgccatttttttcatattttctttttttttttttgagacggagtcttgctctatcacccaggctggagtgcagtggcacaaccttggctcactgcaaccttcacctcccaggttcaagcaattc

SEQ ID NO: 38463 - DNA, 1007 bp, Homo sapiens
acagttcacatgcaacttaaaaaataaatcctcctgtgttaattgaagaacaccatggaaagatcttctgaaataatgtctaatataacccccagtaatttatatctggcattgaaataaattataaggattttctactgctgatttatttcccattcatgatctactggggtttgtttgtttgctcatcagtgttatggggttttgtttgctttctctcgttttattattagctgaatttccaaagcacataccagtgtacagttgggaaagacagagcattccagaaataggcgggggaatccagtgtgggaagaagttttgctatgagtaacccatatatggataacctagcttactctcacttcccctcaccagctccccctgcctgacctgaactgccctgggttttacatgttcctttttattctcctttggaaaaaagactgaagtttctcagttcccagcctgctaaagctgctcttcaagaagtttaccttatttccatatagggaaaaaagaacagtgtttgtagtaacgacttcactttgtgggttttctgtttgtttgttttgtcttcttgtgtgactttgacaaagtgtgtggtctctcttaccatgaaaggtatatggttccctgggatctcaaattaaaaaaaaaaaaaacttagataagtaaaagtttttttaatgatttgcccacttttgaaaaattaatggcatttttgtttcttatccaggtatactgtgatgtcaggaacacctgaaaaaattttagagcattttctagaaacaatacgccttgaggcaactttaaatgaagcaacaggtatacacatagaaccgtttgcatgtccattaaatccatgcatagcattgtttaaaagtcctgaattcatttgcagtgtgtatagcgaaagcagtttgggaaggggattctgtgtattgatatttgaaaagcatctctgtgtgacctgactgggaacagtccttctgactgtcgtcttc

SEQ ID NO: 38464 - DNA, 1411 bp, Homo sapiens
ggatactaaagatctgtagggagaccggactcagggctcctcctcaatgatgcacacagtgaaggctagttcagcttcaattcccttttatctctggtcctcactgtgcctggccatttggttgctatcacaggcacaatctttgttaggtgagacactgtgtatttctggatcttgtgaaaaaaaaaattcttgtcccaaatatgtggaggtctgagtgaaataatcaaatggtgtaaatgtggttttacacatgctaagcaaggagtaattaacaaaggtcctatatttgataggcataggtctggagacagaatcaaatcggtagaggcagaaatgtaagaaaaagcaatctggcaaacattaagagcaaggatggtacagatcttaaggggcaacagaaggaagatcaaaactgttgagggcaggcatttagaagaggcctgacggtgaggagccgcttcctgagggatctgagcagaggcagaataataggctaagaggaaggctattgtggccgctgtctgggagcgggaggtcctagagtggtaccaatgaggtggcgtggcctggagggcctgccggtcagaacttgaagaatgaagtcttctcttccgcagtgggagagcaaagggggaacttggactagggcacaagagtcagtgcaagctggctaggaaggtgggggcagccacaaagtcctggtaggctatgtcatgtctttataggagtgaaagtggaacttggctggcctgctcctgaggggaggacaccacagaagggtgacgcctgccaagagccaggccgcaaaggcccagtctgagaacaaggtacctctgacacctcagcggactcaagggaaattccctgcatcagagcttgagggaaatttgtgtttgggatgccggcctcagagcctctggcttgtgccaggccgaggtgcagacagtggtcaccccttcctctggatgctgtctttgtactggtcactctgatgcaggctgacccctaaattggggctcagctggagagagttcttggctttcctaaggaaggaatttaagagcgagctgacaatgaaagacagcaagttcatgagaggaacagtatacaggaaaacaagtgctctgtagaccgagcagcgctgtcttataggcagggtagcacagagtagcactcacagagtgctggccggctctatttatacctactctagttacatgctaactaaggagcgggtttttcacaaactttctggaaaaggggccaggagttcctggaaccatctaaggtagcttcccggtcattgccgtggcatttgtaaactgtcatggcgccggggggcgggagggggggtgagtattgtcttatgcaaatgcattataattcctagtcctagctggtttgggct

SEQ ID NO: 38465 - DNA, 3804 bp, Homo sapiens
gcgatctcggctcactgcaagctccacctcccaggttcacgccattctcctgcctcagcctcccaagtagctgggactacaggcgcctgccaccacgcccggctaattttttgtatttttagtagagagggggtttcaccgtgttagccaggatggtctcgatctcctgacctcgtgatccacccgcctcggcctcccaaagtgctgggattacaggcgtgagccactgcacctggcctgttttctgaatttctaagatgtgtatatgttagtgttataatcagaaaggaggaagaagggagggaaggagggaatcaaatcatcaggattaacattaaaatgcaaacttttgctggaagattagagaggtcagtaatacagagtgtgtagcaaaaatgtgaaggtagaatattttgacttgctgttcagccaataaaatctcatacctcattagtgagtcttatttactgtgaggaacttgataagctaacccttctccacatctaggatagttacagattctcttacaaattcatggcaacctcaagaaaggatggtgaaaaagcactaatgtacagtctcaggcatgatagatgttttttacatcatggggaatatgccaacaattatgagagttatgccattaatattccttacctgaaaatgccttgtatgtatgtgggtacccctttgaaataattaaacaagttatacatcagctagttgccttcagatagtcaacatctcagaacatgtcacttctcatggtaccaagtattgcagaaatggtttgttttcctttttggattgtactctacgcttacttgaatttctatctttcttttttctatattccttttagcgcatgattgcaaatacggccagaacagtgagatactacaggagccaacccttcagtaagttaagtgctgccacctcttacaatgtagatgttggtgattaaggtcttcttaatgaggccattgagacacccttggagcctgggaaatatctgactgtgtcagagacactttggaccatgaattccatgagataggggccttgagtttaaagattttttttgctgttttaaactagaacatatttacattgttgtgaaactagaaaatcaccataggaatattattttgtgaatgaatttaaagagatttaatttgctctatccagtgcagctggagacaactaaagtacgactgccaacaaatcctgcctcaaaccaactctctttatgactcattgctccatgttgagaaactcacatcagcccttgatgactcagttcagtcaattataaaccaggaaagataatatttattgtctttcagggtgttgcaagaatgcattaatgtttatagcacattcgtaaaaggtccaaaaacaggatttcatattatatttctagtattcccacatgaatttgaggtgctcttttaaaatctgaacatctatcacaagaactggtataatactttaatataaaaaaattactaataataaataacaattttagtctgttgggagttaagttgcatcatagcaccagatggtcatactagaccagtgctactgtttcttctgggctgggactttggtggtgggggtggagctttggctccctcaatctggtctggaaatgagaaggtgaacactaaaggtttttgctaagctcattgtatgactcacttgaagaaatttatctcattaactcaatatgatactatgacatagacatgaatctgaggctaccagtaccgtctcctccaataaaccgagtgctaagagactatgatgttcttgttttattagtcagagttgtttgttcttcctagagcaggactggctcatggccagatttgctaacatgggacaccagaactactaaatgttcattttttaatgaatagggaggaaaaatataagaaaaatgacattgatttggggagcaactgattcaaatgactgtgccttctctgacttccaaaatgtgaatagtcttgcaatatcatcaactattcttatgtggattcagccagaattaaagtgtctcatgtgttttcatctattaatttacgttgtgtttaaagatgtgatcataaagcagttgtacaagtggaaacaagaatagataagtgacaccagttacaaccggagtttataatcccaaatccagcagcggggataaaaggggaccctgaaattatatgccaaatcgtgtgtgcctgagggggtttatagccttaagaaggttttcagtgaggctcaagaaccataaaataatatgctttgttttatgagcttctttggaagtaaatcttgcattcttctatgtcacctcctagagaagccaaggggaaaatgtatttaaaaagaaaaaactccactgcatttgttgaagttatcagtaactgctggtaaacaacagctgctcagctctgaagtcaacaatctatagataaagctataggaatagattcacaaacactgtgggaatgtgtacaatgtaattacagtatattgtacgtgtagagtacactgccagtgagaagcagaggaaattaaacacaatgtgctctgcagttcgctgtggtattatttctatgtgataattatactgatgagtttcttctcacagggggcaggggcatgtatgtcttctctctgcttttctgccttcagacctgcaacactccccttcaccccttgtgcagatggcattctaattgtctttgggagtgctgtgtggatctagcaggagcaaccagactgcagaaggcagtgtactgtggtggaaaccccggtcaggagccagggtctggctctgccactccgggtgtccccttagaccagaggccctacccagtgatgcttgaaatggaggtggcccacagaggtgttgggtctaaagagagcatttttttcccttttattttgaaataatgtcaccattttaaaattgggagaattcacgaagaagaaatccagatttcccatttcttaacaaaaaaaaaaaaaaaaaaggaagatctggcaactctaggcacagattccccgtggcagcaacatgcagaagccaggtcatcacttccagagggacctgtgtttccagttcaccaccttctggtctggctttccttattcatgtatgttccctgcgagggctgagtgcattggctcatcattcagccctgatcttcattaaattggttaacctcagttgctcacatgcttgggatgtgcatcagaatagaatggtagctgagttttcagagcagatagcattaaagaatcaaacgtctagcagaagtcataacttcagcctgtgagttgggttttttctgaatatggacagtctctaagaacatacagtcggtatagtaatgctgtatactgtgtgcaagtaaagaggggagtcaggactctgtagtctcactggcttgcttcagtttggcccagatgttaagcgcttttgtgaggggctaataaaaactgtcttttgacattagtcttcatctggatcaaaggaggcagagacacagagtgtgagacacagagacctctggaaagggaaacaattttaatctatacccaggggctatcagacacatgcttcccttttaatttggtgccattttttttttacaacgtgcaattcaaaggagaatgatcaaaagaggtgattccagggaagaaaagaaaattggagggtaggaaggaggagatggaacaaccaagtggaaacgtttcaatgattgtggtgtgttgaaaggtcttgagggaacccag

SEQ ID NO: 38466 - DNA, 3632 bp, Homo sapiens
gtatcttatatacatatattacacaatgccaattctgccctttcctctttcaacagatcctgatgcagctcaagctaataagaaccatcaggatgtccggagttatgtacggcaattaaatgtgattgacaaccagagaactttatcacagatgtcacacagattagagcctcgtcgaccatagacatttcaaatgcccaaagcaacagtttgtctccagtccacaatctttcaaaaatgccatttatgctactactgactgtattgccactagagaattctacaaaacaagcaaaaacacatcctgagacacctcagggctgcattcagcttaccagctacctagcaagagaaggaattatttgacatgcctaaagcttacacactctagcttaggaatccccagtttgtggctaccctgtttcatttccacttgtgccatcttctttgctgaagtgttgaataaggcccacgtgaagagtttggtagaaatagccttgtcaagagaactagcaagcccctgacatttttttctaagagtgtttatgggatgagatgtgctacaaatgggatagatttggataaaattttaactcaacatcttgatttggagcctggggtttcgggaaggtgttgaggaatctatagaagtccaaattataggttgtattcttccatcttcattgtcttacctctgaaggaatagaacctgaccacattattatgaaacattatggctgtttatgtaatttagggaggactggtctgtaatttctgaatgtatatagaataatatttatgtttacaatgtaacttttcaaaatttacaaatcaggattatatacataagaattccactaagaaatgccaagattcttaaatttgccagcgttaaagtagaaaataacatttcagaagagcacaatatgcataaaacatttttcaaaattgaaatattttcctgggcattaaaaacctttactattggctacaaatttattgtacctgatgaaaacatattttctggacttaaatgttattacaaatatcttaattttcagtaattgttttgcactttcaaagattgtaaatagttcattcaatcaatggtatggagttatttatttgctacataatagatactgtgccaaataattactttttatttattttatttagtacgtaattttgaagtacattttttcctgttttcacaattagactacatttaatgtgtaggaattgtatgtatgtatatcttctgtaaataacatctagtatcttcactaaatataattgtcgacaagaaatggttgtgttcatctcaattcctataatatgaaaggggtaaccatttggtatggtggggtgttggatcttttaatgacacaaaatacacatattataaaattcattcttttaaagtgcagaatccagtgatttttagtatatttacaaagttgtatagataaccatcatcactatctaacttcagaacattctcctcatccctaaaagaaactctgaactcattagcagtcacttcttcttctcctctccctccaacctctggcaaccacgaatctgctttctttgtcttcagatttactctggatgtttcatatgagtggaatcatacagtatgaggccttttgcgtctggtttctttcacttagcataatgttttcaaggttgaccatattatagcttgtaccagtacttcatttatttttatggccatgtaatattccattctataaatagactacattttgtttatccatttatcagttgacagacatttgtctgttgtgttcacttttcggcaattaggagcattgctgctctgaaggggcactggattttagagctcccttgtgtggggcctcatgccatttctcagtgatttaagtacttagcaaatatttgatgaagagatatccaaaattctttaaattccagacatgcctctattttttttaataagtcagcattttccagagtgtgttccagcctattctagtctcacaagttcacatattgtccctccaaaaacaaacacacacatacaaagccaaaaacaaaaccaagattctatcttcaaataaatgtggggaccactgcataatataccccattcatagaaatgattcccagtattcactcacactgaaggctctgagaagtcctattgtaatcccttttaacatcccacaattaaagtccactttcagaaatgccaaagcaggcaaatgcctctctgtgttcattcatataaaatttcagggtccccagaaccagaggcggtgttttctgcggtattacacctgcctctggaggcaagtgcagtgtctgggatttactagacaataaaagaaggtcactgaataaattttcttgaaatcattatcgttcagtatttcactatctgatagacctcaatgtcagctgcaaaggttccacttttatatattttcctttagatatcctttatagtttcttttctagataatttacaaagatgatgaacgaagctgggagcccgttcctggggcatccttgctcttgttttgcttgtctttattcctactttactgaaagctagcattctatatacagcagcacttctccccaattccatggtgaatgccaacttacgatcttattttaatatagtttcaacattattcaaaattaatacatattccccatgtatgttccccttgttcttccacatgagaataacttactgtacttaataaagataagacatttttaagtatttctagcttctttgaaaatgcatcaaactccattcttgaaggtagcagtggtaaaataatagaattcgcactctaaaaatgtagagtagtagccaagcaacccttcctgaggcaggagatgcagttaatactttaaaacttgcaaacaagccaaaagaaaatgagatgcctacagggtcacaagaaggataatgaggtttgctggaagatgtgaaaaagaagaatgtttttaccaaaagcgcctgtagaaaattatacatttgagtgtttaacatacctatttagcaaggtcactggcatagtttatgggagctaagctcttccggcaatttttgaataccatgcaggttaaatatactcctcctgaattcagtggcatttcctctgaaggtatgaatgcagatcaatgactaccagtgtgagaaaattaaacagagtgtcattttagtttcaaattgtgctccgaataataataaaaaaagcctggaatatgcagtgtggtaaaatgaacccctacctcgaatagctttccttttactgtcaatctagaatgcattacatctcttgctttagagtaatcttaatctgtcctacattgaaaattgtggtattagatgaacagttaccttatcccttacttctaaactggaaaaaagcctttaacttaggtattgttagtcacttttctattcattcattcattcattttcattcatagaaaataatgactgaagtgcttactgagtgccctctgtggacacagaattcaatggtgaggacaactagagaaggtccctgttcaggtaaccaaaaaatgatgtgaacaaataaatagaaaaatgcttcctg

SEQ ID NO: 38467 - DNA, 1503 bp, Homo sapiens
tagatgagacccgtctgcattatggagagcagtctgctttagccacagctcaccaatttaaatgttaatctcatctaaaaacaccctccaacttgacaaaattagccatcacactgtataataaaccactccaaattttagtgacttaaaaccacaagctttcaatcaacaaccatgaaccatgagttgatgggttaactggacagttctgccatctgagccagacttagcagatcagggctggactcaggcatgcatttgtggtcagctggtctaggatggcctcagaaggaatgacttgtctctgttccatatagtctctcactctccaaccagctatcctgggtttcatcacttgttggctgggaagtgttcccaggaagcaagaggacaagcaagagctctggaggcccaggtcagaactggtgctccaagaagacactatgacttctgcagcactttgctgaccaaagtggtcaagaggatagccaagagtcaaagagtggagaaacaattctctttcttgatgtctggcacaaccaagtcatatcatcaaagttgtgaatataaggaggggaaagctgttgccattttcacaaaccatctactagagtgagggtagcacataaggggagtggctggaaggtccactgttcttgtttagggagagcttttcaggcgtggtgcagccagctgttgaaagtgcttctccagggtgactctattagctcttggggaagcagcaggaccagcagaaagataaccagcttgaagatcaggtagacctgggtttgactcaatcagggccacctccagtatagacagcaactttgtgtgtattaggcaagagtcaacccttctctccattggtactgcctcacagagagctcctcctcaaccaggcttcctgttgtgtgtgccgtggcctacactgttgtaatgtgatagccctcagctgtgaactttggtattttatctctttgagcttcattttctacatctggcaatgggaatgacaacgcctgcctcacaaaagctggggggagtcctaaatgagtgaaggtgtagaaagtgtctggcatactgagtgcttggtgctcaagaaatattagtgcctttcctgcctctctgctataatgagaggccacagaaagaggtgctttagaacattgaaggatgcctgagagttcagccaaaccaattatgaaaggatgaaaaaggagagaaagttatatggtggctttaagtcattgaaattgatttgggctagaggggcagtttacgagttctgtcagatgcctgtcctttgtattccaaacttgggttacaccagttttgcaaagtttttgctgcaataattgtaccaagataccacatttttatataggcacaactgaaaagttatttgcagcggaatagaaaacatttcaaattactgaataaaagaaaggagaagtgaaaatagaataaaagactcatgctccttaacaacagataaaatgt

SEQ ID NO: 38468 - DNA, 1049 bp, Homo sapiens
cctagaaacaattatgcattgttacgagatgcctcctaagaaagtagctcttcattagcagtcctaatcttcccccacctaatactcagaagccattataaaaatccatttatatttctggcttcagaaattaaattgtaggtataagccaaagtgtacattaaattagggattattgcttgtggcactctatgtgagccaggtgatgctgggccattttaattaagaatttgtttccaataacaacacaagcaaatgaataacattaaatcaacactgaaacagtcgtgggtggaggggattatgggaataactgtgatactcagttgtattataggcttattgtgcagagttcatttatacattagaaaaaaacatctttgcagcaactgaagaaagtctgtagcacggggcatggaaatcttttgagcacgatgagatggttgctaggagaaaaatagaggaagtcctgtacttgttttttaaattagaagaaaagcaaggtcactaaggaacacagatttttagtacaaagttttctgaatgtggactttggaagagaattttctgggctatttactggttcagtaatcaatgctttttgtctgccagttcttctggcatttattgaacacccactatgtgccagttacatacagaaagcattttattctaaatacctaagaaatgaatagtttcactatttgctgatgaggaaacactgagagaaatgaaatatcttgcccgaggtcacacacttagattatgaaagaggttgggatctcaaaccaagtacatctgattccaaggcatatgttgttagctatgaggctcgctgtctgcctagcttctcgtccccaagaggactgcttattcaggcttttgaagctgcaaaataaaaataacagataggagttcaagaaccaaagcatgagattaattttgccaaaatatagtaagtgaggtttttaggaaagtgatttggagtatttttttctaaacttttatctttaaaataaaagtgtgtatgtatgtatatgaatcccttc

SEQ ID NO: 38469 - DNA, 5004 bp, Homo sapiens
cacgtattcctatttttgtcaatgacaccatcattcttccagtcatccaggtctgagatcttggcatcatctctcttcttcttctcttctaaatcttgtgggttaccaatttctgtggcctcttgctgaaacgtttaatatttctctcaattccatttcttcttttttttttttttttttttttttttttttttttgagacagagtctcactttcatccaggctggagtgcagtggcgcgactgtggttcactttagcctcgacttccccagctcaagcgattctcccacctcagcctcccgagtagctgggactatagatgtatgccaccacatcaggctaattttctgatttttttggagatgaggtctcactgtgttacccagccaggtctcaagcaatcctctcagcttggcctcccaaagtgctgggattacaggtaccatgcccagcccatttcttctttttaattccatttcctacatcctaactcaggtcctcatgatcccacaaccgggtggtgacaatatctactactcatcctggttccatcctagcaacccaacctacaactactgtggactactctctcaaaattaccatttaaacagaatcacaaacccccatttcacccctttgattctaatttttcacagctcccagtgtccatggataataaaattcaaattcaaaatcctgaataatgttgcccatgcccttgcaacctcctctcacttttccttcacagaaccatcctccccaatcagaaatttcttttcttcccaacgcccacctccacctttggcttaggcctgtaacggactctggctcctcttctgaattctgctctgttaaaattagcaactagagcagcagaccacggcccctcctcaaaattccagaggtacctactgatctttctagagaggcagccttcagacctatgttcccagaaatctctacgtttgtgcctttcccaactagagaattaactcttgcggggcacaaaacagcctctatttctttgcgtccccagcgcctgtttgttgaagactgagttgaaggagtagcaggtggtgttaatttgtcaaaaagatgagttaaggtgctgggggcgagggggaacacccccacggccctccccccacagcaaggcaggtgtgtctgggggcctcggcgggtgccggggcgcggggcggatggtgccccccgggcgcaggccagggaggcccgagcgccttccccacgccccgctcgcccgcgcgtgtgaggggagggcggcccagccgtttcgcgccgggaggtaggtggtgctgttgccgtgactgtcttcctcattggcgccgtgcagagaggcggaatgttcaactcctaactgcagcggaaacgtgggagccgcgcgggccgctgtcgtcccaacccccgccgccctcgtcgcgcgcggggcctccgcgcccccggctgctgctcacgccccgcccgggagccaggtaggggtcaggctggagcccgcggagggcggggagggagggggcgaggcccgccgcgctcgcgagtcgtccctgcgtctcggggccgaggctccgccggagcccgggagtctaggcggcctcgggaggctcctcggggctcccctccccgacccagggcccgcccggcggcggcggccggagcgagcgggcgggcgagcgagcgagcgttcgcggcgcccgggaagtcctcgcgggaccttggccgcggcgccgccaagtgcggttcgggagagttcgggccggtcccatggagaagttggcgcctggaggcgcgggcgcaggccggagcggccccggctttcgcggtcccgggcgtgcggcacgggcaggggctccgcgagcagcagagccggccaagcagcgggtgactggggcactgtcgggaggcgaaccgcgaggcccccaaatcagggtagggtgcaggccacttcccagcactcgctgtgcgtgcgaggagggacgacgaacttctgcttttctaagaactcgaccgcgagcggtgttgcttcccatccattttccttcattctgttttcctcacacaattaggccatgcgaataaccagcaggaacaatgaacactaaagattagttttaaaaacatgcgtaaatgtatccagagccaccgctccccgcccttcctgccccgggcttgggcagcatgaagcgcccgccctctcgggcttccccctttcctcccaccggagccggggatgtctcctttggcgaccctcaggcagcggctttttgtgggctcccagacctgcaccaggcccagaagtgcttacccaggccgtcgcctcgtctggcctcgcttgcccatgacagctttcagaaaactttaattcaggactggctagatgacatccgattgcctaaaaaatttttttaaaaagttatctctgttagatcgctgaaaatgttatgtttctgatgcgctttgagatcgcgcataagtactgtttatggggaacttaattactatttttgttagtttctgtaataatgaaagcaacacaatttaggggcccattccaagtatggtacagtaagcagctctcgatactggtgtgtgagaatcgtcttacagagtgaatttgaggatgtttgacttaagattgttgaaaactgtactccttctttaaccccgaagctgttttggaagagccttcttgcttcctcgaccttcgttgaaatgaacagctaggatttagtggatccaaacctccaaacacgtttaaagacaaaaataaacaagtgattcaaggctagttaatgtcctctttgtagtaggcctatctccacagtgaaatttcacttgtttttcaattttccaaaaaaaaaaaaaaaaaaaagtgatggctgcattttaattatggttatggtcatttgtagagtctttgttttaaattcctgctactatagtgagagatttaggagattgtaaatgaatacgaatttagtttgggaaaacagaattaagataaagaaaaatggtcttttggaccactgcactgtttattttaatctatcacaatttaattcctactataactttttgagattatttggggagttttttaactacaaaatattgtttaaataaaaaaatttagtgataataattccagagtaaatgaccatgatgcaattgcaaggactttctccgttgtctaaaaaagcaaatagatgattgatccgtttttcttaatcttttagggaatatataaggacacagtaaagagagaaaaaaaaatccaaatattaaacactcggacttggatctaaaaatggatggtcaaagatcttgggaactaaggggccttcttgccaaataaggaaacttggcaagttgcactgtgtattttaacttagcacaagagtgagtgttattggcaatatattggctcagagcctatctggaatgagcagtgaaactgactttgatagggctacaaaattataaataggtttgtgggggcgtggagtgaataatcgaatcatcagagaaaacactgaaaacttttcatgaaaataagtcagatgtaaggtgaagctattagtgtggagtgacagagcaaaatggacagtttattttagaaagtggtagattcagaagagaggagagaatcagtggtttttttgtttttgttttgtttttgtttttgtttaaactggaaaaagatgtttgtggggatataatacttcttggaataagatagccctatgtctgtatcctgagatgttggaaataaaaatgaatttagatcacttgttttccattttattctacccaggacagattgacagggtgagtatcttgtctatctaaatgtagtaggaacagttaaggcaccttttggtcttactgcaaggaagatttaggctagttttttggtagctattaactttgccccactagacacaaataagcagagttccagctgtgaccagaaaattgtacctggtaagggaagaggactatgaatgctagagcttagattgattcgactgatacatgggtgcttttatgtcagaccctcctacggatgctgaagcatcgtcctaatagctgttaagtaatcccagcacagtagaagaatctgtgagaacaaagcagccccacatttgacaccctaaccccagtgtcttcaattgtaataggaaattaaagcctcaaattgaactttaggtggatggtgagcaatccagtaattactgtaataagaaaatagtttaaatagggtaaacaaaaggcaaattagaaggaggaggcagaatgttattaacaaaaagacatgatatggtagaaaacaatgatatgactttggagtcaggcctgaatttgacacaagttgtgtcacctgtaaggtagttggcttgagctactttcatacccctgatcctcagttttctcactcatgtaagttaggaacagtagtacctgcttcctaaggataagtacagtcatgtgtccattaatgatggggatacgttctgagagaactgtgttgttacgtgatgttgtagttgtgtaaataccacagcgtgcacctacacaaacctagatgctatagcctactacacacctaggctgtgtgagatagtccgttgctcctaggctacagacctatgtagcatgctgctatactgaataggcagttgtaacacagtaataagtatttctatcgaaaaatagaaaaggcacagtaaaaatacagtataaaatatacagtatcaaagataaaaaatggtacacccgtatagggcatttaccatgaatggaggttgcaggactggaagttgtttggggcaagtcagtgagtgagtggtgagggaatgtgaaggcccaggacatcactgtacactactgtagactttataaacactgtacacttaggctctactagatttatttaaacatttttcttcaataataaattaaccttagcttgctgtaactttcttgttt

SEQ ID NO: 38470 - DNA, 526 bp, Homo sapiens
cagctacatccatgatgctttgccaagctcactggagttaaacctgtactcacataccctagattactagtttattcggtattcagatggaacttaattttttatggtttcaataaaacattcaagtaattggatagttccattcacaactagccagttcccaaaatggcatggtgtatcacaaaatagcagtgattctgtgaagaacctggctagttgcctcctgtcaagtggtgaaatcctggagaagtgtgcttctcaaaggtcagcctttttctggcacccttaggtcagtgtcagttgtgactgatcctgtctcagttcatccacattccctgggcttgttctgcagcataaggcttacatgaattcatactgatctcatcctgcttcagacctctgcctttgttttggaaaggatttctctactcctccttcttccctgaccctgggattcagagggacccagtactgaaagtcccaaatacactctccgaagaagcctaggcagcagtttccaaatcag

SEQ ID NO: 38471 - DNA, 1706 bp, Homo sapiens
tctaccagacatttctgttactgggagcttgtaatctaagacactccaaggtgaactgctataaaggtgttagaggaaattggacacatgttgagcaaataaatgtattaaaatgagtaacatgtattactgatatgtctgaagataactcaaaccttaggagagaggtcactgaggaagagccaccagaaaggcttctcctaggacctagaggaatttggaaaattacctgaattataaataatgttcctaccatgttatgtgaaatgtagttacattaagacaaacaccactgattttttttagatgattagtgtgaccataaaaatgttttatttgcaagccaaagcccctaatccttcttatgtttgctacttagtctttaaaatttttaaaaatcctttcaaagctttgttagataatatatttacctgtacatggaggttaatttcagtttgccttatgagaaacattgcaactgttatttcaccttttcattaaagtattattgatctcagcatattgagcaataaacatttcagttagttaatatttgttctacagccatgctggaaatattatgctgaagtaaaaccaattaacgtatttcagtaaaaatgttacagcctgagtagctgatgttatacaaagctaggctcttgctattagaagaaaaatagtatacagcatgaattcaattcctgagaaactcaaagcctaatatagagaattgagaaattgaaaaattggaggagagaaaaagcagcccgtaagtatttcagatagtttcaaaattgatatgactggctcttagtcttcaaaaatagaattatctcacttgaatatttaaaaagtacctagaattttcttctctgttctgtagtgaagatgggaagtcactgacatgaaattacccaagaatagaggccatgttatcaattttttttcactgatgcttgactcatactcccggttaggacatccagtttctgtttgaacactgccattgatgacatatgagatgcagtctgctctagtttggaacagcttcttagaaagtcctttataatgtaacttccagccattgttcctggtccctgcctccggggccatatacaacaaatcttaccttcttccatgtatcagcttctagaggatggcatctgtaccttattgatctttgtactttctggactctacacagtacctggtccacaataagcagtcaataatggataggatataaatgaaaagaataataaacataatgatcacatctcaactttctcttctttgtaagatttacagaaaggtttcactgttaatgaatcttcagaaaagaatacagcttgccattcctaccctactttatagccttttcttctccatgtttggctgattttttgagttcttaataaattactttgtctttgaatgaagggttctgttctatagcagctagaaaggatgttttcctggccgtggttcttatctggtttgtttttgaacatatttcccaaaaaggaatccaagatgctttttcttagccctgctaatatcagatgttcactgattcatgacctgagaaaaattaaggtgtcctaaatgaaatgagactgccagaattttaatgacttgaaaatatgactcttatccctgatactgttcttcaagaaaataatgcttggcagaattaggtgcattag

SEQ ID NO: 38472 - DNA, 2269 bp, Homo sapiens
gccttactttttcatgttatcagtgacattctggtgtgaacaccaagaatgtaaaatctctttgcctttttgtgatttggaaatagctcttgaatccctggtcttaaatcttcactctgtttcatccagtttttgccaccctcctatcctgccaggtgagtctgcccttagttgggtatgtacttaactagagagcagctctagatccctggagggaagcccaggctcctcccaagtgactgcacacagtgagtcggctgcatcacaccaggaataccattgagcaataggagacttcccagcactggtgactccatctcagttgcttaagaagagtggggaaatgactggtgtattttttttttcatagcatttgtaactgtttttcttccaaagaaaagtcttcatgatgtcaaacatcattcagaatataggatgtattctattatgggtttgaattcagttcatttatccttctttattgccctgaatactaaagagcatcatttgaaaaagaacctatggaattgtgaagtttgctgctttttatgtgactgtgactgaatgggtcttgttaagcccaaagtgactcaaagggcatgacctgtgtataactctctggtgattatatacaggattgaaaatcctccaagcctgcttttaaagttgtagcacagcagttttagacatagaaaggctggttttccatcttgtcatacaggtaagaatgaagttttttatttttatttaaaaaaagccctggttatgatactcttggggtaaaaatgcactgaattaagcagcattttgttttgtttttgactcagtcaagatcctgggatcatgaaccttttatacttttgataactgagattgaaaactctccttcgttttctttataatcagagcctgaaacaattagcaggcaagggaagttctccctacatctttcctgaaagatctagctgttttgacgttatagatttgtaaatactgttttaggagtttctaaatcaataatttctccttgcgttcacattctgctgccaagtacaatagttctggactctgtagtgataaagataagaggtatgctgcactgaggagaccctggttcttttgttgtggatatttatgatactggccctggcctaggaatggagcttgtgtgcaatgtggccccactactgagtaccaggggtccatctgtcagcacacagcaaagaagcacctaccgtagctttcaggtcgaataatgggtattgaatgtggacttggcaaaaggctggctcatctgtagaggtgactttggaaatacatggcaaaatgtattgggtagaaaattggaaatagagggtttaaggttaagtaagcctttcatccttgcttaatcctaaaaccctacatttaagtacacggcaaagaaaacgtacaatgcaaaggcaagggcatgcttgaagaatgcaaagcagcaaaggattctcaagaaattgtgctcatgtaattgccttgggcaacagtgcctacaaagaggcaaagtgcagctgtccaaatcctcattcttgaagtttaaatccacagtgaactagtgaacataactctgaactgtgcttcctactgcaattatataattgattgactgttactcttatgaaatgtaccctaagtaacccttaagcatgtaaaagagcagaatgaatactgaagcaaattcatacctcccggcattttactcttctcactgtacggttcagggttaacatttgctaacataggctctccataattatttaaacacactgaatatcattatcatcaaatactgttcattcatcctttaaatgttagtgcttcctatatatagggtatctgacttttctcactcatgtggtattatactagatattttataagaggagcaaagtaggaaaggctcttctaaagggtagcagaccataggagcagacacaagaagggagaggagcattatgtaataaaatgctgaaccacatgcataccgagtaggttgaagtccatctagagcccacgtgatttccagtatccacatctttagtctcatagcttctcagaacctatggccttctgtaagagtaacctgaatgaacgctggtttgttccagagccgtatcgggagaaaatcacaggtcagtggttaactaaatgagtttttatatgcctaccgtagtcctgggaaggtaaggaaagagcttcactttttcctgacccaatcctagggagaatctttcca

SEQ ID NO: 38473 - DNA, 962 bp, Homo sapiens
tttttaagttctataaaactcagggacttatgctatccaggtctatttaacaagctcagggtatcactaaatgaaaatgaaaaaaacaaaagatgtaatgccagccttagtgggtttgggctccagcccagggaacagaccaggtgccacaaagtgcagactagctactggaaactcctcaaaagatctgtttacctagctcaacctggttttgggcccaggcatttccctctctgccctttgtattcttttgaagtgcacctgctttcaacattagctaacctctttggcttccgtagggtaaggaaacttggcaccagttgccactatttcttcccattcactgagccccagtgagtctcactttcctgccagccttgcttaacaaggaaagaggactcagggtctcctttattcacaagcctggatatcatctctttatccctagctgcagagtttcccctgtcatttgaaaagaaatttttgaaaaatcactgagttctaacagctatttttagtctttgctctgaggctgagtggcttccaggccacttaaataaaattccagagttgagggctccccagagaatcacagggactgagtctggcctcccatccttctctcctcaccaaggtactgtgagaggccaccagtaaacccagaccctgtgatatacagggactaagggtcactgggtccaatctcctcattctacataggaagctccacactttgacttggctggggccacgtggctacttcatgacctggcctagaacaaaagattccttctgtctgttgctctgtccactgctgtgtggtccctggaactcatacaattcctgagtaaactggtgcccctcagcaatccaggggaccactggcacataaatggaaaaatcactataagtaagaaccctcttgaaaggatttaaaaatatctcccaaagaaggaggaaaa

SEQ ID NO: 38474 - DNA, 1255 bp, Homo sapiens
gaggaaatgaggaattatgaggaatggcatcaaaaagggacacaataaaagcctccatctgtttgggtagaatagggaatagggagttaatatttgccactcaaactgtgcttcaatttcagttgtcctttctgctgacacttgtaacacacttctctctcccagctcccctacatccaaatcctgcaagacccttattgcttttgtgaacttgagctctctctgcaaccctctagcccatcctctgtaggctcagtcacagttaatgaccttgactgtagccttgaagatacggacattccaggtgctctgccctggcaggagttcagcattcctttctgtccacagttttgctctttggcctacttcagtgctgatccagctggctgtgactccccaccagatgtgaagggacttgcaccacctgaatctggttagaagctggctcacatagccaggcttgtagtttcagctttgctactgtcatgtgaaccctgggccagaagattctgttgacacctggaaactaggaatggtttggcggtgtcctgatatggtggatatttattgttttgtgtttctggtactcctactactttctgggaataacactccctttatttgggggagctgttcttgctacccaatgtgaaccaaatgagtaatttgtattttacatgaccccacttgtctgtacaaagtgtttgatccaaaggtaggcccctggccaagctgagctaatcatgggagcccctgttctggccacagtgacatgtgtctaatgcatgactcagaacacaccaatcactcccctgggatttcaacaactaaacctgcggggagaaaacgtttttcccttgaggaaaagctggcagatataagccagtagctgtagcagccatgtctgacttctgtgagaaaaccaagccgtggttaggggagaagaaagccgatccacagagagaggcagagacaagagagtcggagagagtctgagtccccggctccaggtgtctcagtcacgctcctgctcttcagggacttaggtcagtacattccaattttttccttacctaggtcaagtaggtcaggtcagattccagtcatgactattaaacattgagtcatggcaactatatttgggaagacccagagggttcaagtgagcatccccatgtcttctacctgcccatctttggaagattacttcttccatgaaacgttttctttttttttttttcttgtttgatacagg

SEQ ID NO: 38475 - DNA, 1160 bp, Homo sapiens
gtagctgggattacaggtgcgtgccaccacacccggctaattttttgtatttttagtagacacagggtttcagcatgttggccaggctagtcttgaactcctgacctcaggtgatccactggtctcggcctgtcaaagtgctgggattacaggcatgagccaccatgcccagcctttaatataattcttttaatcttacgtttatacggtttaatttttaacaaatgccatgtttaacaaccagctcaccaaattcctgaaaagttaacaatttacccttgcaagcaaggattagccatctctagcacacctctggcatgatcaactactttgcaatgagggcaataaagtcataaaatttattattcccaagaatttgtacagacaaaatataaatagagtttttgaaggctcatattaattaacagatgacatgcatgatcagttactaatggaaacaggaatatttagatggtattctgcagaatactagataactaaaattttctgagtgtttattttgtgccaggcactaagatacgttctttattgtcattatcttgttgaatcctgataagaacctatgggtaggtgctgttcttatttgcagtctatagatgagaaaactgaggctgaaggaagttcatgtgtttaaagacacgttaggtgttgagcccgtatctgtgtgatatcatgccttcaataattctttattggaagtctactgtttgccagataagcagtaaggggaacacagaaggggataacatggctgggtggagactgaaagggaccatcgtacaaagtaaagctagagaaacgtggatggccagaccatgcaaaaccttctaggccatgttaaagagtttgttctgactcaggagcagtgaaagccactgtaaggttttaactgtggggcatgaaatatcttcaactctgccttttgaaggcactttctgtggagtgtacataggaaactagttaaaaggccacctcagtgatcatgcaggggatgaggctaacttgggctggggtgacgttggtttgtggtttctgcagctggatgaatggtgctgtccttcatggagacaggaaactgcaagagaagcagctcagaggggaaatcaagagttgaattttggaaatgtggacttttagct

SEQ ID NO: 38476 - DNA, 1018 bp, Homo sapiens
tcctcttttgaaacctgaatgttatccttgttaaaaattgtaatgtaattccatggtaattgatactgcaaagaggttagaaatacacacgcaggcctgcctttagggtacaaggggctcgtcttatttaatttagagcatggctcctatacaagaacaatactgaatttacaaccaaaattgcataagtctagcatgtaagtgatgtgtaaatgaagtgctccctgaacaggcattaaatgcgcgttaagagggaagaccataacagtccatcatttcaatgatcccagcccaaaagtgcttgagtcactttgacacaacagagtgtgacagcttcataggcactgtttcaggctgctgggtccaagcccagtggaaaagtgcaaatgaaaatcggcccaacgagtcaccgatggccgtggcccaggctctgagtgccagttggcacagtccatcacttttccagactggactggccaacttgatccacaggagggaggattttacgtgattttgctctaaataaatgatgagcaactgatgtggaaataagccaatcagataactttaggtttgaatccaaaccctgggcaatggtttccaggtgctcgccaaacagataggaacagcccctggaacagcacaaagggaacagtctcttgggagttgatgttccaatctttgcctcacatacgaaggtatgtagggtgaatgcctaaaaattcatcttcccctacagggattcagaataaaagcattctatctttttccagtccagggctagtatctgtgtatctttcactataaaatgagtccccatgaaacagtccaacttcagttattaatgaagtaatacacccattcatgtaggaaaattgatccaatgctattttggcagggatgagattgctacacatccaggacctactaccaggccttgaccatggtaggaactcaaaattatcttacacaagtcaactttgactcatttcttaactatcaaagatggatttgcacc

SEQ ID NO: 38477 - DNA, 1016 bp, Homo sapiens
agcagtggcgccttcaatcaaggaagaaaacactagaagaagaagaccataagaacatctatgggtaaagcacaagggctttcgtcactgggctctgggcatctcatttggtcatttttttcccctcactttctggttctcagccaaattgtagatagttgagaaatattgggaagtcggatgtcaccatgaacagatacatacacatataaacagaaatcattatcaagaaaattacaggtttctagtcacaatttccagttacaaggtattttttaatatttacaaatgaaaccattatccaaaagctgccttttcctctctagtacaagattgcttcccaagggactgcatttcttttcctagaggacaccagttttcattaaaaccttgaaggaagcaatggatgtcatcgccccaagtcttcgtttactaggtcccgatctccattctatttattcaagactaccacagctccttcaaaaaatcagaaacatcaacccaaatatcctcattatttctgtttctacacaagagcaacatattgactttgccaaaacaattaaatttaagccatgagtcaccagccaaacagtccccttggtgacttcatccaagccttcctcctgccagctgtccctcctgcatctgtcgagtcctgggcaggggaagggctgcaaacaagacagattaaattctgtgatatgtcttcatttttgttgccttagaatttgtggaaaccttctaaacacaaattgattccaaatcaagttttgaatatcggagtcagggaaatgaactattgatttgcccttggctctgcagaactcaatcagaattttctcattttctgctgtttttttccttttacctgtggaaggaacacttcgggcaagaaccaattccaaggctggtagatgatgtttgagaaatagtggctctcctcacccctgtcattctcaggtgtcgatgcacatgtgttggcattttaacttttacaaatttttttctattta

SEQ ID NO: 38478 - DNA, 4659 bp, Homo sapiens
attacaaattatttaccagtaatagcttaacattggtttaacttaaaaaaaaaaaatacctggacatactaagcatttgttgtagactataccaaataccaaacttctgtcttcagtgactattgaaagtatcactccacaaatcaattcctatgatccaccacacacacacactcaaatgagggttttcattattttaataggtgaacaaatctacacaacagtgatgacccaaatgtaaaattcacaattaacagtctaaaaactgttcctatcctattggtattaacccctcatataacacaggcgagctcctccccttgcccagacactgaaaacactacagaaagaatcccaccatatcttacctgactagcagtcgtaataaaatgaaaacatacttttgccaaccaaattcagctataagtattgtactactagtatgcacgtaaatacaattccttacacatacttttctaacactgttatattcagtttcaaaatctaaagtactatctaagcaacttgctgatttcaaaggctgctaaatgtttcatttaccccccttacaaaaaaaaagtcactgcaaattttagtagtctgcaaaaactaaaattcaacgattttgaatggtcaactaaaaaagcagtcttcactcctgcatacaaaagggtaattcaaagaataaaccctcattttttttaataatgtatgatttaaagcagtaagatcctgtaacgtccaacagaaaatgctccaggttcaaaaataataaaaactaaagacattgcctctagttgatactatctatggccgataggctgtgcttgaaaattttgtagtgttaagcgaaggagttttcagcactgatatgaattgctcaaacatccattttggagtcctctacccccgccctctcagacttcattttgtgaagattttgcgcgaggtgctgcagtgacaatttcgagaaagcctgggctggcttcagatccaaaccgggatgcgaaagagcaggaaagggcgccctggagcccagcggcccgtgcgggtcgggggaagcgcgggcgccggggaggccttttgggcaggcgcgccacgggtccgggatggcgggcgcccggcctcggcgggggcgggccgcgcgcgggacttaccgctccggcggcggcgggggccccggctgcggcggccgcctcctcctcgtcgtcgcccggcgatggcggccctatcttgctgcaggtagcggccagcagagcgagcggtgacggctgagtgtcctacccccaatgggcgggttcagagagggagacagggggagggggtggcggttagggtcgggccgcctttcgcacaggaagtacgactcggtccccgccgactgcgcccgggcaagcgccagcccgcgctctcctcctcctcctcctcctcctcctggtcccgccgccagcccacgcctggcgtcccccgctccaagcaccccggctccccggtccgcgggcaggcgggcggcgggctgcgcgccgggcctccgccttccgcccggaacccacccccgggagggcacgctggggcccacactcacacgcgcacaaaaaggcggcaggcgggcgaggcggggcggcgcgggcggggtcggagcgttggcgcctcgggcgggcagctcccggggcggggggaggggagtggaggggaggggagagacgaggagggaggggtgaggcgaggagggaggggagaggcgaggggaggagaaagcggcgcgaggggggagccgggccggggttcagccgctcctcacctgggccgccgctgccgccgccaccgcaccgtttccgtgctgttgctgctgctgcagatactcgccgtggccgccgccgccgccaccgccgccgccgctatccacgtccaaggcagccatttcctcttgtttcacgggcttttcgggagctgcaggcacagcgcgggggggtgggggtggggaggaaggcgggtggcggagagggagggggcccgcgggccgaagcgaaattactcccaaagcccggacccaggccccttcccctcccccacccgccccccggcggcggcggcggcggcggctccctcctcccctcctgctgctgcccccgcccgccgctgcctgtaaccctcctcctcctcctctttccctcctcctcctcctccccgcgctgcccctgccccctctcctctcctcccctttcccttcgcgccgctcgctctcactcgcgctcgctcctctcgcaccgtcagtcactcacacacgcccgcccgcgcccgcacacagggggatgcgctcccggcggaccgggccgcccgccccggggcctggcggggagacggcgttgctggggcttcgggggtggacggtggctggcggggaggggagggaggcgcaggggagtgcagctttctgcctctcacagacactcggtcgcacacacggggccgagaccggcggcagcggccccgggctggctgtggtcggcggcagcggcggcggcggcagcagcaagggttgctctctcggctttacgtaccggtcatagtgtgtttagggcacctcaggcggggctccccgccgccttacacatggtgaggagcgaaggcggcggcggcgggagaggatgcgggaagcggcggcggacacggccggagcggtccggggatttttttttcctattttgattgactgtgcgggaaacacaaaaggtggagcctccagcccaaaaggggggaagagggtgacagcccgcccggaactcccgcccctcttcttggctctcattcgccgccgtgctctttgtcggctgtgctcattggtccaggcgcctgtccgtcggtctgccaggcggcgcgcttcctgtttgcccccgggtggaaggggagagacaatgagcggccgtggcagcgtaggttttcgagagcggctacggctcgccggttaccccgctgtgcccgcctccctcgccggctgccgctgccaggcccgaggcgcaggcctcctccaccttgcaggcgctcggagcaggcctagccaagctgtaggggagctgagctggggaggaaattcgtccccggtgactcctgctccactggacgcttcctccatcccggcagcagtcttggccggatctccccagggcctcgcgctcttggagccgccgcttccctgcgctgccaggaggccaccgctgctcagccccggggctgctgctgcggccgctgccgctactgagcaaaccagacccgccccacgagcccggggggagggagctggtattaggggagacaccccctccgaggctggaggaggatttttctctctcacatccagcttcctgattcagtcacagccatctcgctcccagcccccttagccccagttttccaaccggtctcccactttcacgtaccctgaaggcaggcatttaaagcaaaaaagaaatctcaagtcacctcacatacggaaggagagttttaattttggccagtggcaccaaaacgggcacttaaaagtatatttcattttacttgtggtatgtgtatgtattcagtggggcagaattctgtgttttaaaaaatcggtcacataaccattttgctgcacaaacgtattattcccggcctctttatcctcttggtaccaagtcagatatctcctgaaataagcccatcaaccactgccaacgttttttaaagtcgtgaaccggtgaactaccttttttcccccattggaacatttttgttgtattttaaaatcttgtttctcttactggattaggttaacactccttccttctttggcatccttggtatcttgctgtcatcctgggggaaaatgctcaggttttaagtgtgtgttttgccaactaagagacatctctccctgttaccttcaagtatagttgccaagaaagaagttaaattcaagaggtggaaacactgtccacaatacctgttttttagaaatctggctcaagattcagttttcccattactgtgattattatattttgtgtgatatgtgatgtgctggtggatgaggttgtgaagtccaagcactttaaccagattttgtgtgtcctaacttaataggtaatccatttgtgagatactgagtttacatcccagttccaaagcacttaaccgcctatgctgacaggatcagaaacattgtatggttactttgctcttaattgtacaaagatcaaatttccagggaattaacctaaaaaccacaaacatgcggaaacgagactcaaaattctgagtccaagaatagggttcatctcttctaatagtccttgtagtctcatatttaagtggaaaagtcactttcaaagttgagtcgtataacctatgtactattttacaacaaaaacttttaaggaaataaaagtcacaaaataacctgatttggggtggggaaaatggaaaaagagatgggtgccttgaagagcgggacaggtgaaaataagtggactgggagggaggaagggaagtcactattatcactctgttcctacccggatctcttgggtggaaggtagctctttccctagaaaggatatttcaggcattttcagttttgttttgttttttttttcaggagtggggatatgttctacgctatcg

SEQ ID NO: 38479 - DNA, 1281 bp, Homo sapiens
agtcccacgtgggcatcatctgtcaatcctgtggtagttgtgcattttctctaagtctcaattcttggaggttattaccttgcttgtccctggtatttgtatctctgcgccccaaatgactttgttttcagcaccttgggtatttggagaagtagggtctctgcatttctgggccccaggtccaacccaatcctctcttatgtgttaaagaggcccctttccttactacctcaggggcttcttaagctcttaggcctcggcctttaggggcttgttaggctctggccctcagggatctctgacttctcccagagacttctaggacagaggctgagaaaatatgagtgggtccagcttaacccacttacttcctagatgaggaaactgagaccagaaaagcaaagtgacttgcaagtgtcacacagagagatgtagatgtgtctgtcccctgcttccttcctctcagcctagtgcttttctgtcacattagatgacatgccctgtgaggtctaacagaagtgccaaaggtggctgaagaacagaagtgactacagcaggatgcgtgatcagacagagctcatgcttaagagtacaatagagaggactgatttcttgttagatgggaaatcttgagtactttggtatcacatcttcttcatcaccccaaacaggatgaaatcaaggcaaggaagctggtgttgggtgtcctgaaagctgctgcagatataggccaggcaatagttaagttagaatttaaaaaactttgttccatcaactcatccatttatatgctttcgtaattgtttacccagtttactaggatgagccaatttcgaaagggtccaatgttgtcacagctgggctggactatgctaagaggaaagaatttttctagatctcattcaatattgggaccaggaacaacagctgcctgagccaacagttctgatgaatatgggacagagagaactgaaaccatgggaagcttaagcttgcttaccatctgagaaaaccctaacaaaatttaaaactttaataagaaaccatatgatccaagataccgacactcattagctttcaactgtccttaccaatgaatccattagcaattaaacaagaccatgggtttcgtgttagatttaatttcttcagggtaccagttttatggcttggggcaagttccttaactttcctgaggcttttctacccacgaagtggagataataaaacttctctgatcttcctctctaggtttgtgaaaattaaataagcaagcatatg

SEQ ID NO: 38480 - DNA, 1907 bp, Homo sapiens
gactgaggtgggaggattgcttgagcccaggagttggtggctgcagagaggtgtgattgaaccactgcactccagcctgtgcatcagagaccttgagtcaacaactaaaaaattaagtcccacccatgccaaattattaggatacagtaacgaatatgattttccatgcagaacccagcttgagagccacagagctactgcactgacgcatccacaacggccagagactctgctagccgaggaggaagcagctctcagagcccaacccacatggtcccttcagaccctccaactgttctccatgcagttaggaaagaataaagaagtcccctcttggggtccagagcttaaacgaacccccagaaattctagacaccccctggttgcttaggcaactggtgggcaccatccaacacttccaggccagtgactctgctgggagagtggcttgccctgctgcttagcttttgctcagagaatcctggctctctgcctgcctgcctctggcacgttcacagctgctgttgcgctcttggcttattctgtctagaggtctccctgcctccacccctcttttttccccccctttctccccagatgtctcagtgtttatgtgggaaagcatgttcgtagagcctgttagagactttcgaagtcatgccttcccctgcagctttgggagtccaccacgtctaagtaatgtgtaaaggggactgaacaggaaggtgtattttgcattctctgggtagagttgctaaatgcaactctgggtttcccctggcaccgttctctgattcgtgagcatccaaaactcaggtccttgccctcagaacaaccagccagattaatgcagacgtgcaatatggctgagttccagctatggaggagcaagggtgttttacattttcttgtccagtgaaaatcctccccattctcacaaccttggtgcctccaatttaatgatgttccattacctggaatttggggtgtgtttctcttctttttttccaaaagaaattcaagcaaagaccaaatgcaagtgagtgatctcagataatgaactgccagggcttgtgccagatgctgtcccaccgtcaaaccagcatgcgtcagtccgtgctggtcaccacagcttcttactgcagtcaagccagccagcccaactcccctggggctgggagggcccttaaagcttcaggataatattggcaaatgtgtgcacctcccagctttaagaacagttttgttttgtttttttaaataaaattaattcatgcaatctactgcatttgcactccaatccaatagtcagaccaggacacgcctgaaaggctgaatctgatgtagcttcaaaaggtgtcagagcaatcacatacctaggatggggagcgtgactgccctaaaggtaaatcttcctcctggaggaaactggcaggaaataccctgcctagaacaaatactcctgctgcagggatttcttgccattttcatttttagaaaccagaaaaacatgaaatgtgaaaagggccccagttctaaccatcttactcatacctggccacaaacaaaactaagaaatgggccaggaaggtaagtccaggttttcagcccatatctgcaccaaaggcaaggacccaatcagtgccaccctactcctcagcccagggtagactaaagccgctctggggcacacgcattactgaaatctcttcatacaggacagcagagcagagcaatcagagaagtatgtcatggagtcaatataataatcatcacaataatagtaatggccactaggattcttgtcctacttctactccttataggcttcgtgaccttgggcaagtcatttaccgtttctctttgttcacctgtaacattgtaacattgtcataattatccgttct

SEQ ID NO: 38481 - DNA, 1961 bp, Homo sapiens
caagactgtgtatgtaggagtaaagtctttccaaaagtttctctggcaaactgcatctgagagacttctgcgactccggatcagaatagcagtgagcatgcttttggatgcaagtaacagaaaataaccaagggagctccttggtgatgtaactgaaagtgcagaggtagatcgggcttcgggtgtcgatccagcggctcaccgctgtcctcaggaccagtttctgccactctgccctgccacatgcagcactggctccaccgtcaggctggctctgcttctgggtgtaggatggtggccagaaacctgcaggccatatgctgtatcatttggggatgcttctgctcagcattccaagccagaattccaaggtttatcctgaagaggatcctccttgacatctcttttctctcacattcaagtctgttagtcttttctctcacattcaagtcagctgccactagcctactgccagccaccaatgtctcccacccggcttagcggctcgccttctaaacagtctccctccttccacacctgttccccttacagcagcctgagtcatacttcaaaaatgtaagccagataacgattggaagcgacagacgctggggagcccaatagtgaggagggtggggggtggtgagggttgaaaaattatctattgggtacaatgttcactgggtgacggtttcactagctcagatcacaatattacacaatatatccatgtaacaaacctgcacaggtacgctctgaatctaaaaaaaaaaaaaaaagtcagtcagagcatgttactgctcaaaccctccagtggctccccatctcactcaggaaaagccaatgaacttgcaatggactccaagggtatgatgtggctcccttgtaacctttctgaatttagctcagccaccctctccctctctcactccaattcaaccatcctggcctctaaattgttcctgggaaacataccaggtgtgttcaccttctgactggggactttacactagttgtctcctatgcatgagacacttttctagagagccacgctgctcacttttcagtcactttttcagtgaggcctacttagaacaccccatttaaaattgcaacctggcccagggtggtggctcacatctgtaatctcagtactttgggaggctgagaaggatcactggagtcaggagttccagaccagccttggcaacaaagcaagacctcatctttacaaaaagaaattaaaaaataaaacactgtgacgcctgcagttccccacactcacatcttctatcttgcttattttttccccatagtactgcttacctagtatgtttatggatttaactcactgtttttcccggctagaatgcagggatttttgtctatttgttttattgacatttccctgaccctagaacagggtctagcagatactcaaaaagttttgtcaaatgaatgaatgagactggctcaggacacccactctatttctgtatgcttagggaggaaatgcctaaatccgaaatgctgggagtgtttccaaagtaagaccaagcttgatgtctccagagcttggaatttggattctgctcaagaaaaaaaactggtaagaatcaacagataatccaggaggttaatagtacctgtggtgcttagttaatgtgatcattcttggatcacacaagataccacaggtatccaagataccaagatatcatagataccttggataccacaggcctacaaatcaaaatctccagagacaggggtcataagtctgcttttctttcttttttataaccagcagcccccaggtgattcttctagtcactaaaactgaaaatagtcctggactgtatgcaaagccttggcaggagtgacacagacgtgctgtgagacataactggaatatgactaagagaactgagatataataagtggtattagcacatcagaag

SEQ ID NO: 38482 - DNA, 1176 bp, Homo sapiens
gcgggtgcctgtaatcccagctactgaggaggctgaggctggaaaatcgcttgaacccaggaggcaggggttgcagtgagccgagatcatgccattgcactccagcctgggcgacagagtgagactccgtctcggaaaaaaaaaaaaaaaaagaaaaagaaaagaaaaagaatagatcttccatagagatgcatccacatataaaatataaccataataatggtggaaatatatttacacagtgtttttactttgcagcacacatatatcattttatcccattgaaatccttggcacatggttagggaagacattgttccattttatagatgaggacactgaggaagagagggctaggtggcatgcctgcaatgacagggccgggtggcagcagcactgggacaggaaccaaggtcttgtcactccgaggcccaggcttcccaagaggcacacggcagggcaatgccatcttgacctctctttgaagtctctccatggccttacgcaggacctggaggcgctcacggcaaaggcagtgtttgtgcacgcacacttggcccacatcagcctcctggtgagaaacagagacacagaggaaatgatgttttctaacacagggaaagaagcacagggcctgccttcagaaatcaaggttgcgtagacagaggggaactttttactagggcttcctcttggccaattaaacctaatgactcatttcctttttcttctgaaaacaaaacagcattttctcctaccgtcctgaaggaggagaaacctggaagatcgccacctagtggcccagaccatcaagatcgtggctccttctccccctgctaccccgcccccacttcataggccaccttgcctattagaaaactggacccatacccctcaccatgcagcaagataatctcaaatggatcagaaattcaaacgtaaaaaatgaacacaaacaagtattagaagacacatcggtggacttctttataccctgggtgtgggaagtctgtctatgattcaaatcccagacgcaaaccaaagggcctctgggcgcttgctcctccagctaagacaggagttgggggggaaaggggatgtgtgtgcaatcttcacctccatgtggcatctgccctaccccattagagctaagtgactgtccccaacctgggctcc

SEQ ID NO: 38483 - DNA, 1005 bp, Homo sapiens
caggtttatttataatgatggagtgagtttatcttgggaataacaaaagcttaccaatcaaaaatcagtctatgtaatttaccatattaatagaataaaaaagaaaaaccagatcattccaatagataaaagaaattcatttgacaaaattcaacacctattcaggataaaaactctcagcaaactaggaataacgagtaactacttcaacctgattaagggcttctaaaaataacctataatatcacttataatagcagcaaaatattaaacacctagggataaaattaacaaaatatgtgtaagatttgtattctgtaacctataaaatactgttgagaagagacctaaataaatttaaaaatttaatcgccttcatggattggtagtctccactgacagtttcaatacaaagtcaaaaatcaatgaaattccagcaagcttttttttcaggttcttaaatttatacagaaatgcaaaggaactagaaaagctaaagcaatcttaaaaaataggaaaagggtcagaagacctacactatctaattttaagacttactctaaagctataataatcaagacagtatggtattgccaaaacaaatagatcaatggaacagaatagagtgtgtaaactgacctgcacttgacctcctaaacagttatttgatttttgacacggtgccaggttaattcagtgagagaaaagatattcaacaaataattctggaaaaactatgcatctgtatggaagaaaattaacaccttacctcatgccatatgcaaaattaactagaaagatgacaggcccgaatgtaagagctaaagttatttaaaattaaactttaacagaagaaaatatctgtaacacagcgctgggtaaagatttctgaaccggacacaaaaaacacaaatatcagagaaaatcaactgataaaatgaacatcctaatgaaaaattttgttcttttaaagacagaattaaaaaaaaaaaaaagccagccaca

SEQ ID NO: 38484 - DNA, 1963 bp, Homo sapiens
cggctcatcagtcctcataagcaacctccaaaatctacattatggttactatttctaatggtaaattaatcgacggaacctttttatttacaagtcgaaactttctctgtcccttactagttctgtctccaaatcatgcgtgcagaattactcccacccttggactgcaaagtgaaatcacaaagaccgctaagctcacgtctcagaagctgggaactaaaactgtcccagtcttctggctgagagttgtacctcctaggaccacgctggggccctgcccttgcagtagtattccagcctctgatccctgaccccgagggccaggaatttcccttctcagcgtcctgacacctgttcctggccaactcccaggcctccaaagaacagatacaggaacagcgcctgtcgggtcctctggcctacagagaggtggccggcagcccacccaaagtgggccccaccccccatcctcctctccggactgggccaccgggcgtcctggcgtcgggagaaggctttccccagggctttcccgcgtgaggcgtaggccgatctcccgacgcgcggcctagtccgacagcgcctcattcatccacacatccccaagccacccgctgccctggccccatcttggccactgggcccgggccccgcgccagcctcagggcaatgagcccaggcgccgaagacctggcggagatcgcgcccccgggctccctgagggcctcaccgtgctcggcctgggcgatgacacggggtcccagcggcagcgagagaaaggtcctgccggcagctggaggcggggaggaaggaggagagaacgcaggcccgtcccctccgccgagcggcacgcacgacggcggcgacagcggcggaacgggcgggccgggcgccgagcggcacctgcgcgcagaccatgggccccgcccctccccgccttgcccgcgcgtcccgcccattggcctaaccggccggggaggcgggagtagggcgggaggagcccagggtgggaggagccgcgcggcggcagggagctggagaggggaaggcgctggctaggccgttcccgggagctctagtcttccgcttcggcacgtgggcttctcggttctaggtctccgcttccgtctggctgcgcggcctgggttacctgctcacgttcactcgcgggcctacagccccaagctttcccagctggactgcggagtgccttgggccctgacttccctccgggagatccggggcgtctgaagtcaggcaaacagccacaccagccccgaggaccgcgtggccgctagcccatctcccttttctataactttattcgctcagtctgtgcggagagaagctgttaactaaaagttcttgaaggaaaaggggctaagggaaactttggtctagggatttcttcctcgccttatagttaaagcgtcgcacacaggtactggatcacagaatgcgtttaattgagccaatttccccccttttcctcttggtagttgagagcaggggcctttgaaatttgggaatttccaatctggatttcgccactcattgactgtatgaccctagacaaattaacttctctggacttcaatttcgttctggataaaatgaggctattaaaaccaccttatgaggttattcgtgtgagaataaaatgagacaatgcgtgttgagctcataacaacagtactcagcacatacagaaaaggcttgtgagtagtcgctgttgttaatattaggatttcatcccatctcacccacatcatatcaataccatgagcgccactggagaaggaattctttcatttaggtcctggccttcagatgtcattcaggtatttgttgtaatgaatatgatacctgtccaaaaattgtgacactagaagctccttttaaagggattagttgctattaatattaaaggatgtaaataggtcgccatccccattttacaagt

SEQ ID NO: 38485 - DNA, 1825 bp, Homo sapiens
atcaacattttattgagcacctcctctctgtagtggacacagtgatagatgcctacgttgtttcaaatcctttatcttcactatttcacttaatcctcacaattaagtcaatcatccttaatttacagattagaagactgagggtcagatattacaaatattttgtgcaaggtcttaaggctaaaagtgactgctcgaataactagaatccaggtttgactccaaagctgattctttctacttcactcttttgcttttcattactatgatattcaccaaagtattacaactggtagacctgtaattatgtaaaacactaaacttcaacgagtttagtcatcaaaaagacactagattattaggtaatttttttaaagatctatcttaagtaaacggggaggcttctttgtacagaaaagtagagttcagaagccgtgatccctgggatccgaaaagacaaaaaaccagaatcagctgaaggaagtactgaggaattttgacattagtcttcgcatattatggatttgcattctggccgacaaagattctctaggccaccggtctcctcgctgttgcagaataaacgctgaggacccgctgcgtcagcgagctgctcagcagagaaaggcgagaccaccagggctttaggcctagagaagcggaggctgtcctagggatctcagagacaccatcactttcacttccagcagcctctgggaaggcggtccctgtgggcctaatccctccccgggtctgtttactcacttttttgatattggatttggaggcaggatgaaagtctttcttgcacatgaagttggcgaaggatttccccatcttggaactggaactagggaaagcaggggctagatctgttagcaacgtaaacaaactcagccgcctaaccggaactgcgtttccagcagcaagggggaacttccgagatcaaaggtgacagcttccggcaactgatgcctccactggccactcctccctccgtccacctgtcacttcgggtagctgggaggccaggtgaggggcgcgcacgggggaggggcgtgcatagttgagacagaaacccggaagacccaactgtggcgcggcactgcttgaccgaggggctccggagcccagctgcaccggctgcggtttgagcgcccagggccggggtgcggggtggaccgcggcggcccttcgaccaaaggtgcttgaagctcgagcccattactttctgtggactctgactcgagctgcaaaagcttttctgcactgtttttctcatctatgttatgaagataataattccggccctaaccgtagtatgcttgcgagaatccaacaatatgatgtttctgaaagcgccggctgaactaagagcgcgtgaaatagaatgacagacagctctgcaagaacggaggccctgtctattttgtacccagctgtacggtactggcgccgaaagacgttcaataaatacttattgaatgacgaatacgcgttaggagttggtaaaatctctcaaggcttcacctcctcagtgggctaggtgcaattctaaccagggggcaagtttccttagctttccctacgaccccagttaggcagctcaggttactattgcagcttgatggcccttgggactccaggtttttgagtggacgtggctgctactgcagcaggtgatccaccaaccaagttctctatcagggtaatgttaagaataaaccttggccgggcgcggtagctcacgcctgtaatcccagcactttgggaggccaaggtgggtggatcacctgaggtcaggagttcaagaccagcctggcca

SEQ ID NO: 38486 - DNA, 701 bp, Homo sapiens
ctaataataatgcagtaattgaacagaatttatgtaaagtgaaactggctagtggttaggagaagagttcaaggatttgtgagtgtcaaggcaaatgcctagcaccaggtatcagccacaggttaggacaatttaaagactctttttgagagataggaagttgggagctgccatctgtgtcacactgggataaggatctgagtgcaacttgatagaagtagaatggagaatgcagaaggacccaaatttcttcatcccccatactataaacagccagaagggaatgagcttaccataccacctccccaagaggaaaatgggatgggaatggggtttctgtctgtcttgctccattgaaccacttcggccttaagttgtggggcagcattttaaatgcaacattcctggcattagctgctgttgatgacacagccctatggaatgaagctcatcccagtcccagttctggatagctcagcttagaatgggctttctgaatgcaaaatgctaagtcagactatgatttttcaactcagtattttatagttcttagatacaaaatcagatcttaaacagtatcacaaagtgagatatcaagtaggatgctcatgtctgtctgtaataaactgattaaggtcatttgtctctgtgggcatagccatttttgctcccatcataatggccaaactgtaaatattgta

SEQ ID NO: 38487 - DNA, 2188 bp, Homo sapiens
tctcaggctatttctcaaacatccaacatcctttatcccgtgggataagtgtaatacagtgtggtactattagagcactcttcaacattaatagtcgcaccattcacccactcctacctacttgcagggcgccaaatgtcctccctagagacccagggtagggagcgctgagcactgcctccttgcctcgtctgcagggacagactgtggccctccaagataaggggcgcagagagttcctaaccgaataggctgctcggagagcagctgccagccaacccctgggaaggcagctgtggaagtggaaaggcagccaggggtctttgcctggcgtaagaaaaaggtggtcgctagtcttcccagggcacgggagtcacaacgtcatggtaactaacataccccaaaaacgggtaagggagaaaatttggcgcagtgctccaggtgcctgggcagaagccttcggaagggccagatactgagggtaccctcgggataaagggaagagtctaagaaagacagggtggacgcccgtgcagtgaggagcttcccaaactagggatggcagttctgtctccggaggggacgagacaccccctcccccgcgcgagccttcccgggtgatctcacacgttccacaggcaggcgctgcggggcagagacagcaggtccagacaacgggccgcggggccagggcgcagagggtcggcggctgcccacgtgcccaggcctgaggggcagaggcaggggtaccccgtgcccgcaagggagaaccaggacccagcaggtccgcgctccaggggcccctctcacctgcttcgtctgcaaccttggagtggcgaggagaagggagctggtgctcgcagggtgccaagcagggagaagaccaccgtcatctcccgcccccagccctcttcgccgagcgcaaccgggtgccagctgcagcagcttaggcacgttccgataaagtaaggtggggtaagccgatgcggccctgtcagctcagcccctcgccggccgcgaggccccgcccccgccccgccttcaggccccgctccctcccagccccgccttcagaccccgcccccagccccgaacttccagcaagacgggccgcttcccgccctcgagccccgcccatttccaggagccttgagcccagagtctccgtcccgccctcaggccccacccacagcctcgggcctccgagccacacgttccccaaccccgccttcagtccccgccccctcctccagcctcggagccccagggtacccggccccgccctgccggctgggagcctcccagccgcgatcctccggggcgggacttccggcttccctgctcccacaaaatggtagccgccgtgggggatgtccagttttttttcctcttcccaagtacagacgcagagcagacttgtctttccgcttaacctcaacctcgtgtgatctgccagtttcgctcccggttagcccaggactttttatagcatagagttttaaagcaagggcttagaatcagacctgggtcaaaatcctgccttccaccttcaccaaggcagtgtgaccttgacgttcctacataagagattaaaatgtaaacccttagccctgagcttgttttagaatctgggccccgtccatgactgcttctattctattgcggtacgggggtggggtgggggtggggaactacatgcatgtccactcagtatactgaaactggttacattgatggaaaacttccaaagcttcttgaaataaaggtattgaaactatcctcacagggtttataagaattctggacaaaaatataattaagcattaatcaggctacactttgacccacttccttgtaacccgaaagtcgggtagagctagatagtacatttgtatcccgttgtccctatagataggctttctgatgttaagagtcgtaaggctttttaagaattgcttaaaatgtttttcagacgccaaattccagcgaaacagctgatgccagccagcttgaagacccctgccacagaagaagggaatcagcatgagaatacagcttcttcatctcgctgtcccatgacttcgccctgtactcttcagccaattaatgatctccacacttgggaccactctaaaacccttaagaacctgagactcaaagtcctcctggagacgaatttgaggtttcc

SEQ ID NO: 38488 - DNA, 404 bp, Homo sapiens
gtgatccccctgcctcagcctcccaaagtgctgggattacaggcctgagccactgcacccagcctaaaagattaaatctaaactcctcctggatttcagtcctctatcatctatcctcactttactgacctaattttattggcattatttactgtatctaagctctctaatctgatcaaatcagtttactcatccaccctaaatattgcacaatcattgtccacttttctcttttctttcgttcatgcctaatccaccctggaatgctctcctgtctcatgtatcttcaaaggcccatctgaagtccatggagccttccttgttacctttatcggcacagaggccttctttcctacctttattgcctctatcaatcacacactaaggcattctgagtctgtata

SEQ ID NO: 38489 - DNA, 812 bp, Homo sapiens
acaaaatcatataagaaaaggcaaggctggctcttccctatggtcctttagtggagctatatttgcatagatcctagacaaatgatgcaaaacaaattccctccaatttccactagcaatctccctaattcgctcaacccttacataagcatcagatttagatttttagagttttgcccaccaactcaaatcggttcccttcttcttccatgtttctgatttgatatattttcctgacttttttcccctcctaccaagccttcctagtctctcccagcctcaggagcttgctcagccagaaaggaacaaaggctgcttccatttcacaaggcagaagtccagctgacaagtggagtgcgtgagccagctggttctgagcccagaagtcccgacaggctttccatttgtttccaatggctttattccacatgactttagtaaaccgtactcaatcaatttctgaccttggtactttgaagcaacacttgtatacagatattaagggaagagggaagttaagggaggaaaatcgaaggtcaaactgtgtgtcaaacaaggtgctgggtcctaattttatttttagttgcctcttgaatcgctcaagcccatcttgccttttttgttttttaaacaagaggtttctgcactagcttccatcttccagactcgtgctgtctaatccagtagccaccagccacatgtggctactgagcacttaaaaatgtgactagtctgaatggagatgtgcggtaagtgtaaaatacactctggattttgaagattcagtaccaaaaaataatataaaatatctc

SEQ ID NO: 38490 - DNA, 495 bp, Homo sapiens
gaatgcactgcaggcagagacctgggtttctagaccgtccagcccagaagttaaaggccagacattgagttcatctgaatgaaaacagtgcacactggtctcagaactgatcctgcaaaccctatcttgggccagcacatgtccctgcgcagatgcggcagaaaacacctcatcagccacattccacccttgtactatccatcacacgagaccttaaacaaacaaaacccttcgtgttgtttgtatttgctgggtttcaggatttggcttaccctgggcactgggaaagcctgttgtatcacatgtgagccagaatgcaaacacatttaatacaaacacatgcacgccaggttttggcttcatttggcttgctttatgcatagaaagtgtttggggaggagacactcaccagtgcaaacgtcgggggcggcgggggtgctggagggggagggacaggcatcttgggcagttatgcgttcaacagtcttgctgata

SEQ ID NO: 38491 - DNA, 637 bp, Homo sapiens
ctaactggattaaggaagcccaaagagccctctggttttggtcatcaaggaaatttgtctcacaactgatgatttatttgatttttttttcattttttttaataggaagacaggaaacagtgataaacctttaatatctgaaacttgtgtcattgaccttcaactacatagtgaggttttcagttcagaacatttagggcccatgttacatgtggggataattaaaatgttttaagtgatgctttctattcttcaagtgttggccataatattcaagctgggtacaagcagcagagatttttgtctgagctcagtccaagctctgcagtttctgctgtttgtctttctaggtggcaccagtcagtcatcctctgcagctcatgaaacccagcataaccttttgggctgctctggaaaaacacattgagcaataagggttagaatactttgtgttcaatgtttccagtgctactctctggccaggagaaataccaaatcataggcatctggaaaagagagacagcccagaaagaatgatgatgttacaaagcctgtgagcacagacccctcgtacatgttcatctacctgctgtctgcttaatactgagctataggcatcggagcaaatggtaatttc

SEQ ID NO: 38492 - DNA, 550 bp, Homo sapiens
ctgtgactgtggttttgcgtgcacgcatgtgtgtgcacgcgcgcgcacacacacacacacacacacacacacatcaggccagctttggctggacagagtccaaatcccacatgatataatttatctgagtttaggctctttcactcaactctgatattgaaaaaaattaataataaagctttttgcctcttgaccagaaggcctgtgtttttcagagcaatattggaaatgaaaaatcacaggatgtcagccaccttgtttctcagttgggatgatatcaccagtaaacttttatgtgaagcaatcagcaaacatctcctgtttccctctagcggaagtctgggattcaggatggtgtttcagctgctgtgttaggacacattccagagtagaatgcaggtcaaatgctgtgcaaggttttatagtttcaattcaaacccaaacctatatatagtaacatcttaaaaaaaaaaagtaggtaggaatgtattcatatggaattttttttaacttcagaaattttgaaaaaattaaaaaatatttgtctctg

SEQ ID NO: 38493 - DNA, 608 bp, Homo sapiens
tacaagttctggaaaataatcaactatacttttagtggagattttccttgtcagttatctttccaactgtaattcagtggtctcagataaccctcacctccttcagcagacccactatataacctccttaaccttttcttaaaagaaaaattgcaaatgatgtttttcttcttgctattattcattctttggcagaaattattcctaacccatgctttccccatactccaacatagttttgtagcactgacctacttggattcttgcccttggaacaggaatcgatcatattccctggcctgggagtatttaaagtagtgtgtttattagaatgtgcattattctgcaatgcggattcacaggattttccaatgagagtcaatatatcattttgccagcaggcattaaaatagcaacccttcaaagtcttccttacatccatgttttcaagctttatcaaaaggacagttgctcagaaagtaagataaactaacgcttacatgaaactattgggaaaagagagataaggctcctattactaatactcacatcacaggtaactgagatgggaaaagaccacaacatttttcatcttattttgatcattt

SEQ ID NO: 38494 - DNA, 1068 bp, Homo sapiens
ttgcccatagcatcactgccatgatgagagattccatgatactgacagccaaggacatctgtgtgtagcaaccccaaagacatatattgacattgtttagcagtaagtcaatctccaagcaataacctcaacttgtttgacatcatcctgggtacatctctgagttgtggggcacagccacaggaaaccctaacatgaaaccaaaaggggcaggtagaaaaaagtgctggacttttaaactagagaaggaaagcatgagaaacctaggaagcagtgattaaatgcagccaatcaggtggtacgtacaagtgttgggcaagagagaagctgtggtcaaaggccgtaagagacacagcaaggacagcagagctgcccaggcagcctctctgctgacatagtccatagaagacggttgtgggaaagagggaggaagagtgacccacaggccaagaagagcttcacagggccacagctttagcagctgtctgtctgctgtcttggccctaaggatgaggtggagacccctaagagccctggtgtcaattgtgcatccagtctcagaatcacagaaattctgttcctcagtgctgaagtgttttgtgtgtccctaaaggaaaagcactcccggagctgccaggttcccatcccgacccatgaagaactgtcttcttgattaatcaccccctcttccactgtcatgcagggaactcacattaggctttgtatctgggcccatttttgctcattgccacactgctgggaaatgggggccatccacagtgaactgcagtgaaagaaaagttgaagaaaaactgcaccaccaggtggacccagagtcctgactatactgtgcccatgtgcacagctgcctggatgctctcccagccagctcctgagtcctcagagttgcttctgcttttcctaggctccttatgtgaaatgtgactttttttcatggaagtaccccccatgaagtatttcccagtcctgccctgctcagttgaaatgtaaataaatttgaaattgttcctatctaaatcagtgaagtatccctaaatttcctagacc

SEQ ID NO: 38495 - DNA, 1469 bp, Homo sapiens
ggcctcaccagttttaagactctccattaaagaaagccaattttatactacctaggggcacaaaaatagttcccagctcctcctctctttttcctcctaggttcggttaaacgagcgaacatagaaaacacgtacacacactccctttcggccctggtccctagggcattgatgaaaagcaaattatttctttacatacgctctgctgtccacccagagatttaaaaaaaaaaaaataagggaaaataccagaatcagtctgcacccacacctaagccccgccccaccgggaaaaagctgggggtagcgggattgtgagggtggcggaaaggacggaaaaggccgagacttccagctcctaggttctccacaccattctttccttcaagctgcaccgcagccagggaccctgattctattttcagccgcgcctcccgatcctcctccccgccaccatcaccaatacacggtcctcaatcgcttgaatactgggtggggagaccagagtgggccctctccccgcccaacccaaggactgtgggtgggagaggtctccctgcgcacacggctgactcgacgcgcgccccgaggacctctgaactgacccaagtagggtgaagataattcggagggaggggtctaagagggagccgttattcctttttcctctgccttaggaaagcgcgcgagagggaggggccggaacaacgaacgctggttacctaacggtccggcccagccagtcaggttcccaaagcccacaccgcgcgggccgccgaggtggcagcacagccacaatcgccccaagggctaaggagcacgtcaggagcacccgaggtgatgggaaacggggggtggggactgtgctgagcgacgtcgccatgttagcgccttctttctccgtatccctacagtctccagccctgctgacctctgcccatcgttactcacctttccaggtcactagttcatgatcctttcggtcacccgcgagccctgagcacagccgtgtttacaaagcacccctggaggaaaaggctgaacggcactttaaaggccacgggctcccacaggcttccgtcctctctcgcgagatcggactgacaacccccgcccgctcgccccgctcccggcatccccaccttccttctggcgcccctccccttcacccacacgccccttcttgccttccttctgagggagcgcctccgagtcaggtgattccgtcaggcttaaggagaagaaggcgggtcttcggcagggcgggtagaggggacgggcatcaaagagcactcgggcgctcatgattggacaaggagcccgaagggcgggaagcagttctggagggggcgggaccagagggcccaaggagcgttacttctgtaaacccggagctgtggaagactgtgattggctgtcggctggaggagggcgcgggtgcaggcggcggtgaagggctaggcagggct

SEQ ID NO: 38496 - DNA, 1914 bp, Homo sapiens
ttaggagcgtcacaataaacatttatcattcaaaatagcccagcagttaatagccctgaccatttcaaagctatttctatatgaccattaatcataaaaaaaaatttctaaaaaaggaacttaagcaattctacatcagtttaagaataatctgtgaaatatctgaccataaggacatattccagtccaacttctctgcccttgagtgtccactaaattaaggtcacagaaaaacccttccgaaccaaaacctgattctctaagacaaatcctccagatctagacctcactttaagcctgcaaaattgttatgaaaataatactccagaggcaggaagaaagactttgggctcgttcccccaccaccttcctccgcccccacacggaaaggcaaagtccctccctctgcagcaacgagtttgacctacagacaggcactggaaagcgctgctgaggtgaactaggcctcaacggccccctacatcctctgcagtactccaaccttcgcgtcgaccccaatccaacagagaggctgagagaaggtgggggaaagggccactcctggtctagggaccagagagtttgacctacaccgagtgaggcctgacagctaggcctcggctgctctgcctcgccctagtggcaaggagagggctgagatgccctaagattaggaagaaaacggcaatgggttaataggtaaggagaaagccgttcccgagagggcggtgtgccccgcccgaaggttgccccattcaacaacgtggacgctctaggccaaaacgcccacccctcaatccccccgaccctgcctgggctacgcaccagagagggggtgcaggcgagcttggcgcaggcgaacatcttacactcttcgggactgcgcggctggagatattgggtgacaggcgacgtgggctcctctcccgcttcctctctgcggaggaaaagaggcttaaggtcaagtgccctccaggggcctgttcttcccacccaggccccgcaggctcccgtgcacgccgtcagcttgggccccgtgcccagtgaggcgccggcacaatgaatgggtccctactgggcgccgctccgccctggccaggccgggctccctgtgccctccacttaccttcccaggaggcggcggcggcacgggctgcggcagaggtcgaaggagtgggactcaatgcgcaagcgcggtccggctcttattcgcgccgcagcacccggatgaagaaggcggggtttcgggtgcaccaaggaagacactcaaggtcactttgtaacaactttattggcaactagccgggaaggacaacgacaaccacctggtgatggggcaagagggagacaaaaagaaaaactgtagattcaccccggcagagaggactaaacagattaacttttgatatgagttggctgcaggatagtgggcctttttcttcacgttggcaccttgtaagatttggccttttatcagttgctgcttctctgtagtagaagttgacttgctggtcattctcttcctctgtgaaataggactgtggctggcgggaggaaagaagggtcattcactacttaacaggaaactagggtccccagcaaagcgaagatatttatttcaaggaacctggaaaatggttccagaagtatggctaatccttcaggtgaaagagggcctgacctagaagtactggtggagccataagcaaatgagtagatctaagagctttgtcatctggggcacaaaattgcctctgggtaaagtgagggtgctcgacttttcttctagctctaagattggaagatttaagggattgtatttcatgtagggtttgagactaaaaaaagtcttaaaaaaagtctgagtattctcagaacgtactcaattttaacacctgtttttgttaagtttgg

SEQ ID NO: 38497 - DNA, 992 bp, Homo sapiens
catccttcacatagctcataggattgtttggcagtccgaataaatgtgatcaagtcctctaaaaattagatagcactatgaaatctgatgtgctcttatcactccttcttcaaggacagacttagcaagagaaagtaaactccttgtccattgcttgacaagatcaccatataactatttcagagtaatctcttaagcaaggagggtgagtcataaaacaaaaggttttcattaaatcatatttgggaaaataaaacaggcccataattttatagcctccctctgtgccaaagacactgtttccacagacagcagaaaagaatgaaaagaatgtgagtggccctggcaagccttggtcaccatcccaacaggccctgagaggctgtcccagaccctgggtggaatgtgtcactgctctccctagcccacgtagtgaatcgccacattgtatagtgttcaacagtttttacattaataaaataaaaattaagtttcctgggcttgtatggtttatcacagtaagtctgtgttaatatttcctaatcatagtgacctcagcctgccagaatgcacaggcccctaatcctcactgtaatgttttctcattagctacgcagcattgccacaccagtggcagcgaccaagcactgcctcaggcaccactggaattaattacttagaagaaacactgctgttttgaattgtcatcttgaatttatcacttgccacttaatgtaactcatctgacctaatacctccattgtgtcaccagaggccttggcatgggtttcaccagggtaatagcagtggggttctgtatacctaatgtggctgagacgccaaacacacagctgctggaggcctggttaaaatcctaccctggaggcgatgcatgctaacaatgcccctagcaaattgcagattacccatacgtcatgttccatctgaagctaagagtgattcaaaggtaggcccaatacatctcatttctg

SEQ ID NO: 38498 - DNA, 1549 bp, Homo sapiens
gactggcaatacaattataggagattcacatttttcatttctttttaaaaaaagacaactgcgaaacaatcgtacgttgtagcttaaggaccaaaggcaaagaagctttgccctctaatggaaactgcaatcgcattgtaaacaaccctaatgtaaataattgttccaactggaacttgctagggcaggaattaggcactgagggacacagctcaggctgtttggcatgagggttactgagcatatatccctgagcatacacctttgccttgtcctggtctctaaggaacagcatagacccccctccacctcccaccttgcccccttgattcattcgtaatttcttatttggcaataggaagagggaaatttcaaacaaaatatttttcaccacctggaaaacaatctacctgaaagcagattcctagtgctcattactgcgaggctgggctcatcgcagccattgtcatgcaagcacagttgtaagtaataatgtggcctttaatgacggaatgatggacctgccaaacacttgctcctgccatggactgcttgcatttccctgctggagagcacagagatgcccatctgggagttattaacatatcctcgtcaattcagaaccgactttaacataatccatatttgttggagaaagtccaacatcagcttgagaacagcagtcacgtgcctcaatgacacatttcaaacagcacacaccgagcatgcttgggcagctaagcaattcagaaatgcaaatagctgaagcactctcctgactagataaaaaggacaaatcccttttggcaagagactggatagcctcttaatgttgcaggaaaacaaccaaactgggaaaggtacaaattccagaagcatcagtttgggtttggtgagtcaccaggaaggcatctcttttttggtttattccaatcatgttggtacaatcaatctcgggtcgaactttggacttcagctgttgtcaggcagagctgtttgtctgggattcaggaatacagatgctcttaaaccaacaatgttgcacgttgtacgcttgcttgttgacatatgtacagtataagcacacatctctccctttaaaacacaacaaagagctatcagttccaattcaacatcatcttagttctcgttctgaatgggttacctaatgtgaataaatctgtggaaaaagctagattggttatggtccttaatatgagtcctcataaaattaatttgtatcaaaatatcatgtaaagtctgtggaagttatctccaaattaggcactggtttttgtgagtatagaatatgtgcctggatactttttgaattattttaacgtgctgaaaatacatttcatcaactaaatgcctttggttgatagatactattggtgttatctgtaccttgtagtgaaataaattaagaaataaggggtaaaaagcacttccttgaggccaccacccatttctattgaggtggattttggtaaaattgcaataaaatcctatttcagattacgtaaaccaaagccaaatgcaaattctt

SEQ ID NO: 38499 - DNA, 708 bp, Homo sapiens
aaaaaaaaaaaaaaaaaaaaaaccctttccaccttcccagccacaccaccgcacacaggcatgggccagcgaccagagaaacaactcagcactgacacgtagttatcactttgggaggctgtgtagcagagtgggggaaagtggacatctggcttcgaattcaggtgagatgttcttagtgtcctcatccataaaatgaatccaataataacactcagcttcaagagttgttgtggggtttgaaccaacatgacgtgtgcagtgcagcacctagtgttgagtaagggctaagtaaacattaatggtatgctggctcctgcttttgtcttctttactgagaacgccaggtgcccccacccggctggagtcaagcccaggctagtattttaccagacaccctattctattacccaggcagattttaggagacggcctgaaggtgaatgtcaatttttacctgtgtgagtatgtccattttttctctgaagacaaagtctagggctttcagcttattctccaaggcactcatgaccaccccagcatctcagggagagaaagaaaactgtactcttggaaagcacagaaagtaagaacatacatttatgtttgagaaaacagttccatatgttggaaagagcattacaccatgagtcataaaactcaacttttagtcttgcctcaaccataaaaggactatgacaaatgcct

SEQ ID NO: 38500 - DNA, 766 bp, Homo sapiens
ggaatcatctttcaatggctaaatctggggtgcccttcaaatctcccaaattcttaaaagatgcaaaaatagtcattgcacccaaacagttcttatagtgaacctgaaagagctgcgctatcaattttgcacaggataatgccgatacattttgttctgttcaagtttggcaattgttgaaaacaacgtgtgtgtgtgtgcatgtgtgtgtatgctaagcaaacttaagaggacttgccttccttttatccctgaaagtcaaaaagagacttaacaggccaagaatcttatatcaagcacctgaactaacatttgagatctgggtcaaaaggagaatcgactaatagttggcattttttcaaaggtttttcaagtgatgccaaataattagaatgagatcatgttagaggcattcagacagagtccctttggggacaagaggcagaggatggaggaggaggacaaagatcctaccctttattcctcatccccacatttgattttgtttgtcatcagttgtcccttattagcatggactctcctttttccatggaaatttatctaatttaattgcagaacatgcaagacgggcaatccatcttgccccactgtccatgtaaacaatacagaagggtggactgttttctctagctatgtctctggcagcctgttcactttcaaattaaaggaattagagggtaaacatggtaaccacaattaagatatttttagaaacataaaatcctctagaaaacatgacactaat

SEQ ID NO: 38501 - DNA, 649 bp, Homo sapiens
gaaccactaacctgtttattttcattatctgggccagggggcttgagtaataagtgaaatagacaggcataaatgacaataggaagtggttcagtaggggtcggggatagggcacaccaaagagtagtatccaactaacaggggcagttctgactcggttttgatcacagaaaagcaggatagacatttcaaatttttaagagcagaagaaaatttggatttttaagtggctgaatttgtttttaaaactctgtggcccaaaagtgtctgttgcaaaatatggaccttgagcctcctgatttagacttgtgtcctaggatagcactttcgaaacccattctgcaaaacttattgtccagaaaagccacaccaaataaaatcttctttagtttgctcaaggtcattgtacgtataaggccactggtaatgacagaggttgtccggtcactctgctggccactgttaaaaaccaagttatgcaggaatgacactggatcacctcacttccttgtggcctacagatcaaaacatgctgcccagatctctttaaatgtgtcctgtgaatattaaaagcacaatcaggctggacacggtgactcatgcctgtaaccccaacactttgggaggccaaggtgggtggatcacgagg

SEQ ID NO: 38502 - DNA, 2010 bp, Homo sapiens
tctaatttaaacgcaccactcctgtttaagaaaatgtgttaaaagtcaacttggtcttctgggggctgctgaggaaaagaaatgagcattccctgccagtttgaacatattcctgaaaccaagcttactcacacccaccaaaccgctgttgaatagagtcaattttgtcaatgctgacacccaggccataaagaaaggaggaaacagtagacaccgagcaacacacaccggaggccaactgggaaaagcagaacacggaaaactcagtgattcacgggtcttgcttagtactgtgaaagcaccatcagcaaagctgagttgaccaatttcaactctttctcaatccgtaaactatgaactgacggaatttagatttgtttttctcctcctaccacgcctctgatacaatgcaccttcgcccttcccctccaccccacagcccaccatccctgaaataaggacaatggttggagagtctcttctctaagtagcacgtactccacgcccacacgctagagcccggcagcatgacactgacagttttcagtcccttctggtctttctaactcttggagcctccgcacaactcagaaagagaagcggagagaacgctcaaagcggacagctgagcgtaggaaatgctagtttgggaccttctgacctctttgccccacctgtgtcgagataagctcgacacaagtgggccaaagagctggggctcaagccagtcaccacccggaatctcctagaaccgagctggagaaactaccagccctagaggggaaacaagggtttcaagactccagcgccaccactgccagtgtgctgggaaatccagggaacaaggcggcgagcctgggtctgcgcggaccaccgcgcagcctgactagcagccgccgcagagctctaggccacttggcaggaggcgggggcaccaaggagaggcaagcggggaacccgcagcttatttcccaggggcacagctcagcatgcctccccgctgcagagccctcccaactgccctcgccttgagcgttctacctgcaagaagcgggcgcagcccggcccgggcgtccacccccgccagtctcggccgccaccgcccagcctgcctccagagcaggcagcagccgccactgacagagagacaagccgggccaactccttcccatgaaaccccgcgctccagccgctcgccaattggcgccgcggtcggcgcgcgccgctcccccgtcacgtgaccgtaccctgggcgggtagttgttggggcgggtcggccgggaggttaggatcttgtgtttgtggcctccgcagccagcttaggctgctcggtgtcgtgtcgcagttatgtactgccatttattatgactcttagaatatagttatttcttactcttccgctgcctcctttgcttttaaagcctgttctgccaagtctcgctggagaaggaaacccctgaaactggtcctggtggtctcagaccgccgcgcgagcgaagagtggggaggacaaaggttggggagttgagaaggatggagatgggtgcatctggaagggagtccgtcctgaggagtcccccatcagctgtcagccagccagcagcaaagcaaattaagactacacagctccgaagaagccagttcccaaccaagccagtggagaaaagtcagcccggtccccaggagtgcttgaggctctgtcactcttggacgtcaaaaagggtcatttgatgactggacgcttacctcaccggtgtgaggtaagcttcaaacgccgtatcatgttgctttaaaacctgcgggtaacagcataagctgagttttctatcttagaactcttaaccccaagaacactcttcacaggccctgataggtggacccacaaaaaaaccactcaggctatatttgactcggatttgaaacgctgccgaaacggtattaagtgtcctcctcaactggaaaagacaaataacaaatgatgcctgaatgagaaaaagactagacgtgcac

SEQ ID NO: 38503 - DNA, 1529 bp, Homo sapiens
acgcaatttttaggcactagaattttctgtttgaggcctttttgccactcagggaaatggccgatgaggaactggatgactcctcatggttagctccccacacaatcaactcagtggttgctaaagttttagtgtgtaagttagttacatagtgatatttaaaacctcacttagtgtgaaaactctcctggtgggagggctccctcatgactttgagagagaaaacgcagagacctaagacttggagctactttcgttttccctgtcccagcttgatttctttcatatcttactggcgaccgtggacagctaacttcgattttgagggggagggacagagacagagaaacagagagagatatgatcgcgattcaatctttgcagaagaaataacccgtgcacaaggggccacaccatcccccaccttacacttcgggaagggtcgttaccgtttttgtggtttttctcaaaagatgtgttttcatcagaaacgggcacatttttcctttctcctaatcgccaacttcccctccattttttgtgagtcccacactccggagcttcactccatttcccctgtctatttctcgggtttcccatcgtgggtaggggagattgcctcgaggctttcctttcatctctagtttgcatgtcacttccccccctccccccgccttggagaaatggtaggtttgctgaagattaaaactgtgctcaaacgctctctggaggaatttggattgagggctaaatcaataacagaagaaggctttgttattcatatgcattccctttatattccaaattgcagagggaggagaggaactggtaagtggcccaggcactgggagggaggccctcggggaacccggaaggctaagggggcttggagagaggcctttccttcggttggagacaggcggcaggagagctcctcagaaacccggcaggtttttagcgccgcgggtgggggaacgaggtccccgtgtcgcgtgattcaagaggcgaaggaagcattggagccgggactcacggtcagacaaaggggcgactgcagtgcttccccgcctctggcagccccctgggtccctctggctccgctgtcaggggcggccttgccgccaagatctccggctttcggaggcgctaggctgcgtctgaaagcgggctggcgaccccagggaggccgcaccgcccttcactgttgatcttgaccgtgcggctgcgccccgataggcatggagcgcgctcgccatctcctgggcattgggcggcattggcagagctctctattcgctcctcagccaaatcctgttccattctcttaatcaccagccaagccactctcccgccactactttccaccccgatcctccctcgatcaggttccccagctcgcataagactttgcctgccagacctcgaaagtcataaacccgggggatgaagtgggaagactgtccaaggagcaatggagggaacctagttgttcttgtttttcctgtttttcactgagttcttttatgcct

SEQ ID NO: 38504 - DNA, 1444 bp, Homo sapiens
aaaatggcgataatattattactttaatgggttgttgagaagacgaagtcaaatagaatatatgtgtatatatatgtatatatgtgtatatatgtacatgtgtacatatatacgtgtatatattatatatgtgtgtatgtgtgtgtgtatatatgtatatatgtgtgtgtagatataggtatataagtgcctggtatccagtgggcgtttacaaatgttactcggttacaaaattctggcttacagaaaggacgctaaaaatctcccagattcccctgccagtcccctgggtgggagacgagtcgggtacttcgcttccacctgcgggcccccagcgcagagcctggaattggctggacggagctagccgcgccggcgccccgtaggacggcgcgggggcggggccggcggaagcgctcgagtgccgttgtcggctgcgccggaagtccctagccaggcctggcggtaaccttgggggcctcactgcagccgccgctgctgttggagtgggctttgcgagtctgaacgttggcggggctaggctcgttaactgccgagagcctccgggtttgcggtggaggacgctgaggcccgtggggggcaggcacccgggcgccgggcctcccagccgacatgtctctagtggcggaagccttcgtctcccagattgcaggtagcgcggctggccgcagacccagaaggtggcggcgcggtctcggggagccgcgtggggtacagggctggagctttcctccagccttgcggcattatacgctgaacccggcccggatggtggaggcgggcacggactaccaaccttatctcacatatgggaaaactgagaaggagacacttggccaaggtcaccccgcaggagcaggagtcccgtctccttcccttgggcggtactttgtcccacctccccattcagttgggaggtgctggagtatgagggggaggccttggattgggattgaggtggggggcgttaccacaggggcaagcatctgaacgcttcagtctaagagtggtggcagtttctgggtcttggtactcaaaaagtttaaggtgactgtcactaatcagttgttacctattgttgagggaacaccagacttcttgcttcgtctcccagcgacacagtagtgccatttgctaagactctaggagttatttatttatttatttgttgagacggagtttctcttttgtcaccgaggctggagtgcagtggcacaacctgggctcactgcaacctccgcttcccgggttcaagcgattctcctgccttagcctcccgagtagttgggattacaggcgcccgccaccacgcccgcgcggattcatggaaaatttttaaatctgcatgtactttaaagaaatacttttgagtcggtggactgaacatgactgatgtatataggtttgtaatttctcttattga

SEQ ID NO: 38505 - DNA, 845 bp, Homo sapiens
attaataactatagtcatcatgctgtgaaatagacctaaaaaaaaaccccttatttctcctgtctaaccgaagatgttctgtatttttatttcctaaatctagcaaccctagttgtttgaattcttggaaagagaacattctcacaatatttgtacatacctaggatgtttagtacagaagtatgtctaatctgtactaacctgtgtgtttgctttaggacaagtgttttaggacatcagtgcgtaaaccctgactggaggccttggtacatcctacctgttcagcattagaacctttggaataatgaaataggagaaactactctgggaatgaaaacacccccaggctgctttcctttctgttgcccccagtccatagggagtcagtcactctgagctggattacggggccactttctgctgtctggctcagcatgagactgggtgtttccatttcacctccaacaggtcacaataggaacaaagttgcaagtccaagttcaatatttggcttctgttaaatattttacaactactcatttttcatgcccagagtttccttttattgaattttgatgtctgattctgtctcttccataagaattaaatccactcacacaaaggttcaatctgaaacttgttgtgaggaattctcccccttaagtctgggtatccagggccactagcaatggtattgttctcctatgttgctcccattgtaatgagcttacaatccgaatctttagatctactgcaagtttaattgaaagaagcatttcagcactaagatctattatccagtgaattgaaggggaagtaagaaactaatactgatgcgtgtctag

SEQ ID NO: 38506 - DNA, 567 bp, Homo sapiens
gcttgtggcaaacttagttcactttaaaattggaatacaaaataaagattataattttaatctcaaagtccagaaatttattggtctccttcctcttttcctcctcctttctcttcttcaaccatcaccaaaaatcttgctcattcagatgtatgtggtttgaagccactggctagttagcttcaagataactctggaggggcagtagcatcaccagagaagtcatcctccctcctggctgctcctacagtgaccctccagcaagcagacgctgactcaactatgaatcacccattttgaaacaagagctgttatttgagaagtatactgttaactgtttgattttttttccttggaggctctgttttggaagacaaaatatttgcaaccttcaaataagaataacttatatagcaccaattacaagatcacctgtgtaaaggaatccattgcatatttgttgactgactgaaatcaagactcaaggaggcacgttctcctgttctgtggttagaagcatttggagtaattattacatttggattgtttaccccagagattttctga

SEQ ID NO: 38507 - DNA, 654 bp, Homo sapiens
tgaagttttccagtttttaaatctcatctttcattttgtgatgcttgataaagatagcaaagtaatatgagttagtaaatgttaacacgtgccgcaaatacaaaagcagtttattctgtcattgataatggaggaaaatatgcaataatagtattgaatttgcactcataggtaaaagccttcattgcaaagcaaaatctgatttttgtttgtgaccagcatgaatgctgacctctgccctttgaatgatctttccgtctcccggaaagttcatgaaaaggtcatggagctgcgctgacttcctctgtgtgtgcatggacgtgtctttgctattgatccaggaaaagaccattctgtggttttgttcattttatttttaatggaaacctaatcagtaattataaaatgtttctagaagaattcacgcctgagtaagtgaagaaagctaacctcatttcatgctgattatttaaccttggtcataactcccaattaaatgcatttcttgaacccgtaacaaagcaaaatatggcacttactggtcagaaattcaaagcaggagagagaaaaaatggcttaatagctggaaataaaaacatcagtgaatttttcttatggattccttcatgtcaaattcatatcatgagtgactcg

SEQ ID NO: 38508 - DNA, 1001 bp, Homo sapiens
ctggtcctgctctaactagcacttgaactgggccagccttttttcagcttggaaaaagacctattttctctatcacgtcagcctcacaaaatggcccagatttttttttaaatgaatctttaaaaggagagttaaaaggcccatgaattgaggattttttttttactaattgaaaaatcacagaactaccaaaatctgaactggtaacttttgcaaactggaattagctgtctggaacacactttcaatgtttgcttttgctttactcctggaatgcctgtgcaaataattacttgattcaatttacttcacaggtcaactttgactcataaaagtagtaaagcaggtaacctcccagggatgctgggaagacagatgagcaaatagatataaaattgttgtaagtaattagcaggggttgggggtattttataaatcgagcttattttatggttatgttttcacttcacaccatttagtgtccaaaatgtgctcattataattaatacacaatgttgagaactattatagaagtaccatattccttttaaatatagtgaagaaaataattgtgtttgaggaatctcatcctgtgtaaattagaattcccagtaaagtggcataattgaaaattgggctgactgcatggaatggggaagagagtcattttagcacgatagtgcatgttccatcaaaaggtagtgcaccaaggtggcgactgacagctcttaaaataagtttcagattctctctctagataggaagtttttaactgcctgatatatgcaatagtgacatccagtggttgtagagataattacaagtgtatctcattttaaaatataaaatgttttatattataatcaaatattctgtgttgtccaatattgtctatattttttatttggcaatatgcaagtcaataattcaaactatataccaagtaaagcaaaatgcactctgtttatctactaagcaaattcctaagtcctattattatc

SEQ ID NO: 38509 - DNA, 484 bp, Homo sapiens
ggatatagggagggtccatctaaaatgaggctttatgagctgcttcaagggaaaatggcaaagggaaggtgaggtgcttctgctgatttcttaaacaccaaggtaccatatttggaggtagcaggatctggattccatcaaccagcagaggcttactctgaggagtcaacaagagcatcagtatggaccagcagttccctcaggaagccaggcaatgggccagcctcccttccccaggccaagatgggctgagtccaaagcttacaaactaagtgtccatacaggcagagcaggtgacgtaactgagtgaggtggctgggtgtgaagcaatcaggagagcacgtggaaactgtagtgttcctgccctccaccccctatgccacctctctgcctaagcagattattaccacgtgggatggtggccagtgttgccagctcctctgattttcccacagaactcagaaacccaaatttttgtgtaaag

SEQ ID NO: 38510 - DNA, 2706 bp, Homo sapiens
catagttattacgtgtcctaagtatatgttcaaccatatctacaaatgaaaaacaaaacgctaaagattcactggcaaaagattgagctgctccatcaacatggcaggaatatttcaaataaatgatctcttctcaaatcctttggagaaatgattgcatttgtctggcctttcctctccctgcccctgcccaccgtttttctctactttcatctataatctcgtctgctcctctctggccacactgcaatgattcccccattatgctgatggaaaaaaaaaatgaggaggatgagggataaggggacgcgagaagaccgacgccttcccagatttgagagcgacagggcggctcccctctcctaccactagctggcgccagagccctaaagatgcagtgatatattgcgtcatctcttactaattaacaaagctgttttcaaactgatcgtagttattcaagggaaacatgaaataattttgactatgaacatgtagtaaagcagcagcatcgagggtgatatcccgatgaaaataactccattttatgccttcaagcttttgtcttaaaaaaaaaaaggcagaaaaaagaaaaagaaatgcatccttaaatgattcgtgggtttttattttacccaaataataaaccaaagggaagtctttttatcctctacaaactattcactatatatataaaactgtaaaactttccagttatataatgctctgttaacctaaacaaagtgccttttttattatgcttttagtctaagacagaaatgcccgacacatcagggtcacagggaaagctactttactgcttcagctcctaattcactcacacactccttcctcctaaccagcttcagctttcttcttccgaccacagactctccaagattttgcttttctcatcctatccttccctcttcttgtacaagcgaacactgtccttccagactcttccatggctgcagaagctgtagggaggagccctcggccagccagacaaaatgcacgtaatattgctcactttaggaaaagatggctcctggacaaacgagcagcaaacagtgcgtttggtttgacgacatgaattatcattatgcaagtaagacagagtttaggtctggctagaataaaatctaaggtgaaaaattcaagcactgtatgtgctgccatagaaaatgttatttttcatttgggaaattttcctacacatgtagcacatttttatcattagaaaaatgaaagactctgattattttggcaagagaaagtacattcaaacttcagtgaaatactataatttttttaaagaaatactttatagtttgacttgtgaatatattaaatggctgggaatactcattcaaatcacatgccctattacccaccccatgccctcatttcctctgggagctgcggaggtctggcacttggaaaaagaggaaaagaaggaacgggcttctctgagccttcttctggctttcataggcagaaaaatatcaagctttcttttcttcacccttaccctaattcctcaaagaaagaatgctaagctttatcttgggtggacttcctttaccctacactaaaaataagattgaaacttgttttctccctgtatcagccagatttctacatgtggtttgtcaaaggctgctcctgaactggttttcccacaggatatcagtgaatcattaccctttaatctccaaataagatcccagaaatgaacaagagcagaaagtgatctggaatgcaaatcaatgtttgttttgatggccttttggttttctagttgaaatctcccttagaaattcttttattatggcacctgggtgactttggtctgggagagaacattcagaaagtgaaaatgaagtttgaggaagtcaaaaatgctgcatagcaaatgacgcagaagctcaatgtgtctgcattgtaaagaaaggtcaggtttaatcctttgttatcagtcgtaattttgctggtccctttcaggagacatcatgacagggaaactacattaaccacaatttggtatgccctaatcttcatgctaactacagttttcttttgttacttactggccttgacctttagatggacggcatcaggtgctactgaaaccagcagatctctctctaaagcctagtgcaggcctgagtcatatgcagtttaattcatattccactcaacatgcccgttttatttccagtggaaattgctcatttaattgcactgtacgttttatggggtatgccccaggctgcgttctttatgctaggcatttcagtatttatgggcatagctatacccaaaacttcaaacataaaagtaaaaccagcaaaatatgctctcctccagttccataaatgcttttcaccagtttcattattttttccaatgagattaaatgggtgtgttaaacctgtaacatagactattacttggtgtttccagagcttcttttgtccttcatattcaaatccaatacagcccctttttcctgcttctgaatgagactgcaaagagcaagtatggtccttctgtgtatggtctagcgcccaggaacaataaagacttcctctgttggtagcctatagaatttttatctgtgagaataacctgtaaaaggttttggtgttttttgttttttaatgaactgtgcctgcttctaagtcacacctacacccacta

SEQ ID NO: 38511 - DNA, 5706 bp, Homo sapiens
aattccagagttttagacaaacgcttcttgataaaagccattaatggctttttagacagtttaagtagaatggtacaaacagaagcctcatcacaggggtttcagaaaaggaaaacaaaaagacaataggtatagaacgactcatttgtctatagatttggaaaatgtcatagggtcgagtgaagatatttgccaaattgaaggaggtaaggacatatttagagcctctgggaaagatgacagatctcaaggactaagatttgaatgccggaacaaagcagaatagaaaaagactagagttgtgttttcaaaagaatagggaatatttcgtagacttagaaggagctagaggtggtagcctgaactttaggaataggaattcttagtgatttgcctgcagtgtagtagatgtcaatgactgaaggatgactgaggatcttaagaaagatgtggcttcttctttctcagaaaagccacagggagtgacccctgcaaatccttccgagtataaggtgtacacccagtgacagccttcctcacaggacatagttatcacagcattgatgtgatcattcctctcttaattaggattcagtgcagatgcaattggctgaaaacccaaaataacagtggcttaggtaagatagaaattatagtcattattgggattatccacacattctggttctcctgcttttagggcaaatagactacttgcctacctttttgaagttagatatggtatgtgacttgcattagtcagcaaaatggcatgtgttattttcagttccaagccttatcagtatacaattcactacattccttttgtctttgtcagcaatggtggaagcattggttgacatggacactgtcagcctggctttctgagtacccacaatgagcagagtccccctgctgaccagcaatggacatgtggtgtgatcaagaataaacttgcgctgggcatggtggctcacgcctgtaatcccagcactttgggagtccaaggcaggcagatcacaaggtcaggagttcgagaccggcctaaccaacatgatgaaaccccatctctactaaatatacaaaaattagccaggtgtggtggcgcgtgcctgtaatcccagctactcaggaggctgaggcaggagaatcacttggaggaggttgcagtgagctgagatcacactactgcactccagcctgggcagcagagtgagactccatctcaaaaaaaaaaatagaataaacttgttgttttgagtcacgggttaaatttctttctcacacaaaagtctgagtggtggggctaggactgatacagtgattcatggtttgagggacccaaggtcctctgtcttgctgttcagctgtgcttggcatgctcatgcttcatggttacagcactcaagctttaagcagcaggaagcaggaaggcatggagaggcaaagggtgtgctgcacgtcaaggaaggctcccagaagctctcttccacttggaaacctttggccagaacttggtcccatggctgcacctatagttgcaagggaaagggaatcaacgaagactgggtgaggccagccaaaaattgtgggttatttgaccacataaagggacccggaggactgcattctgccttaactctcaagaactccttgtataaatgtggagatgataggattgcactgtccctccccatttttcataaaaataaagaagtagtgagaatattgatcaatgtggatgatgagagattgaggccaccctaactaatttagttgttggaagggggatttttttcttccccaacacctccgttggtaagagattataagacaaccatcttcattatgaccttcaacaagatttgaaatggactctttgtagtcatttcatgtacttgctcatctggctacttttaaagaaacaaattcaaatttctattatctgctatgatatatcattaacagcccccaaaatacaagatacagagataatagaacggctgacataatcacatttaagtgagtttggctgtacattcattgtttcttgcaaagaccagagctacagaaaaatagatcaatgtgattaagtctaacattggggaattgtttctccattgtgtctgagctgaggctggcagcaggaattagtgctgctacctttaaagggtagaccacgattgatctggttcccaaggcagtcattgaacagacgtggtgaaactggtcacagcagagctacattacacgcaggaagtgccctactgttaaaagagtgtgcccagttcaaagcaaagtgaaaagctttttgtttgttttagtttcacatctaagttcatttttggtcaccattccttaaatagaattttttttcatcatcaagcatgggtcttaagcatttttggtgagcactacacatagaccaggaaggaaatagaatccgacacgccaaggacttatggcccaagatgtggagaggagaaaggctgaccgctgagtatatggcaacttttgtaccaaaatttaccattaaaaatgcaaatcaaaagagaacctgaggcaggcagtggcacagtggcactgtgctctccctctcttttcctggacctctgcaatacttctttgcctgcttcctccctttatttgtatagtggaaaatctgttgtccattgctggagttcaagcatgcctgggcatgtttgtcaaactggcagggcaggccttgcagaggcctcgaggggcccttgacaatggactcagactgggtgtgctacttaaacatatccagacaagtcaggcaaatgagtagggagtggaggaacagggtatgtgtgagatgtggaaaagtgtcccaacaaaaaaaaaaatcactcttggggaagagggagaacctcagctgcatgacatgaggactgatttattttcacctttcaaaatcattctttttttttttttttcagtcctaggaaattgggtcagaatctgcgtatctaatgggatcgttactgttacacttgtaagatttggaatccgttcaaaaaacaagccagaaacaagcctttgtatacgttaggaaaagatgccctgcattagagcccggccaagggagagatgggggcaggtaactgcagtccaaaactgagcagccactcctagaagctctgcttgaaattcatgctgttaagacaagcgaccaaaagtatttaactcctgcattgacctaggcacctctcctcccagcagttacctgggaaagatactcagaatcaatgagaaatgggaaatcaaagaacctgctatggactgaattgtatcccctccaaaatgcatatcttgaagcccgaaccccagtgtgatggtatttggagaggtgacctttgggaggtattaaataaaatttacatgaggccattggtttggacttgttgccagtaaactgagttttttccccactttgtattgatggcaaaggaagaatgtccagttggaaaaggcaatcaggttttattcactggccaagaaggaagaaggggaggctctcgctctaaacgccccttctccctgaacagtagaagttatgggtactttagggactgggtatagggagggagagggatgttagcatgtgcagggtgggactccagacacacaggcttaattcaaaaacatacatcttcatacaatgcatgtacagaaaatggaagagatttttcttttaggggagggattttagcattataatgatatgttaatgatctgaaggcaactagggatcactgttgcagtttgcgctggttagcaggtcttatctccttctggtatcttgccaggggtcaaaaagctctggcgccattctggcctgtctggtttctttaagcagctgtgcctataaataaagcgactaaaggaaagcatttaaaagaggaactttcccagttatttcatcagggctgccccagtaacagacagcttctatgccaggccccaaaaggctagaccaaaatggagtcactcatgccacataatcaaactaaaactttaaggaagcagggaaaaccccaaacagagtgttatcccgaaaacagaaggttcacagctaccaatcagaaaggccccagtcaacctgagctggcaagaaaaggaagttccctctactttaacccttacaaggaaaggtaacctgatgaagtaacctgatgttaaccattcctctttcttaaaaattcttgtttggctgggcgcagcgactgatgcctgtaatcccagcactttgggaggccaaggttggaggatcacttgactgcaggaatttgagaccagcctgagcaacagcacgaaactctgtctttattattttttgaaaagtatatttaaaatttttttaaatcattgtttccttgttcccaccttacaaaaataaactgctctgtcatgcccagcagagtgccttttctaaattgttaaatgagatgctctcttatttgtgaattgctaataaaagccaatctgatcttcaaactaaatttgttgtaactttgtcttttggcagaggtgatgagggtttagatgatgtcatgatagtggggccctcataatgggataagtgcccttatgagggaacagcagagaacttgcttcctccccaccccaccccagcccccatgtaagggtacagggagaaggtggctttgcactagacaggaaaagagccctcaccagggaaccaaatcagctgtctccttgatggcttggctatcccagcctccagaattgtgagaaacaaattcctattgtctaagtcacccagcctgtggtattttgttatggcatccctagctgactaagccagaaccatacacctaaaatcccaatacagagatctctggctaataggccaaagtacacaatttatactctaaaggggttctctccctccccttaagcccaagcccagttttggcatcttcctacaccagttagcctcttgggataagagaagaaagtaaaaaatagctatattgtgacctgaaatctgacctggcaaagcctgataaaggagctgggaagggtggggtggtgacctaaggaagagtgatttaatgattaaatcaccaacactttattataacatagttgatggtgagttctcaaaatgcaattttagggagccactacactaagcaggtgaagaaaatatcagaaaaccaaaagtaatgtgggataagtcaatacagtattccaataccagaacccaaaaggaacaaaaatgttagcaagaacttaaatattgaccttgctctctggtccataaaatatagaggagtagcattttttctggaacaaatccatttctataattacttaactgactaatccaatacggctaaatttactaaactccaagtttacaaccaagagtttttctttcttctgaggtatcttagaacattttaaagtactttaaactgtcattttatatagttattagaatgctagtggtatgtaatgtaatagttttagtttatgtagtatatgtaatgctatagttttaataaataataaaattaatgcagtctcttaaatagtgatgtaaaatgattcattgttcttcaaattataatattcactatgtatgttaacttggaaaaaaggaaaatatccaactgggaaatggttttcaaacttttttgtatccataaaacc

SEQ ID NO: 38512 - DNA, 2186 bp, Homo sapiens
ctctaccaattcaggtattattcatcctttaaaactccctttgaaagtttcatctccatcatgaagtcttcctagatacttgagaccttcatttatttccccatttctctgcagcacagcactttaatgtaaaccatgcaagtcattacttatatgtggtctccctctaataactatattatgaggacaggggacagagaaaatgtcataaccccttttagtgttttcaaggctttgcatattgctgcacctatacttgattaattatgatatacgggagagtcttaggagtcaaagggaaaagaaatgaaatttatatccaagcactatagtgcctccaaaataatattgaaacaattattattatacatgccacttgaagatactgatttaaaaataggtctttatcagttattcctaaggctacttgagtttgtaccttacagtctcagaattttatctttctcaattcatatagtgagcctttttgcccagtttactagaaaacaaattctgagggagattgggtgctactgctttatttgtttaggggtaagcctgggaatgtgagagtgagaaaaagggagatgtggcaggaaaggatgggaagcaatgcatgggtaggctacatgaaaaaactgttaaggagaaggcagtcaggcaacgaggaggaagtggggtaattgatctgtcacactcccagcatctcctatttctacaggccaaagttcatcccgagtgtggttaacacccagctttctgcattgcatcatccggatccctcagcagtcatttgggaagccagataccatgctctctagtgtggtgtttcatccaagtctcaagtgatgaaaggagacagaaactcgaaatgcctgactggcatggcagcagccaagaagggccaacatcctggataagcaactggtcagcccctcacagcaaaaccatgcaggtcccaaagtggtcagatagctgagcgcatggctgagacagcagctagtcctgtgagggcagagggaatctcaggaaatgtagacgatgtctctgataaatatatgcctgtcataaagtttggagaacagaaaggccatctctcattttctctgaggagagtgctttccttgaattctcaaaagcagtgtgatacgttaattatagtaatcaaatggaacaccccaactttcattctgtgtgcgtataacaagaatctttgctccctaaaatggaattagattatagtatgtctgagatagagagacattcagtctgtccatctatctcatataagggtaacagttggaaatagattttctaaattctatgtaagacacgatatataaataacctatggtttaaataaaaatttattctatggcaatcatataaatttaccagaagattcaaatatgcagcttccacaaggaagtaggctagtggcaaattgatccttacatgaaccctaaaaaagaacaacacatttcagtttctctatgcagtgacaactttctattctaggcctagccccttgtggggcccactccagttccatccagggaaacaggtaatatttacaggacctggggcataagtacaaaaggaagccactgcctacaggctggctccaccttctcttttgacctcctgctcacccacacaccagaaggggcctctcaaatatttgtgaggacactcctgcacatccatctaaggggtgtgcacataatgggaggggtgcaccttagggaggacagatattggaaagggatactgaaggttctgatgcatgttccacactgggcaaagaattcgggagtcccaaaaagccacaacaatgtctacaaggggattatcctaataaaaatcacagaattgcatatcttgctgtaggcagttgagggcaatggactgactatactctgtttaggcctagaggcctttccatgagtttctagggacattgtcaatattgcttgttgattactgatgacatactgatgtttggaagtgagtggctgcatatatctcttatgagagatcaaaggttttgtttgttgtagagcaatttttgttattctatcaggtaatcttgccaaggaattgattattgacattcaatagcttatactgcagtgcttattttgagcagagaaaagataaaatcgaatggtgtaaagatgttagaa

SEQ ID NO: 38513 - DNA, 3186 bp, Homo sapiens
gagccatggcgcccggccagagcttgtttagacaaaagcataaaaaataactaatgtctaaaaacagcatacagtcaggatgaacaacaaatctggaccaatacaatagggaggacaaaaagatgtgaataaatgggctgacatttcatgttcctggagagaacttagtatcccatcccacattgtttcgcgatttaacattaacatttatacaaaagttactaattagaacaaaagttattgattagaattaacttattagaaaaacctggacaaacataccctaaagtgcagccaggtgatcactcttcttgatcacctatgtaatgtctcatagagtactctggtgtgaatagcaatttccaaaggtctttcactttgcatttttctttgtatccagaatcgataaagttaccaggactatttcacagtaattagacttacaaaatcttaacactaaatagacgctaaggctatacattcttccaatgtctcaagtctattgctggccatcaggagcacctggatacgtagaacataagaaagtttgcgaaaaaggaatcaaagcaacaggaggagtctggtttgaacggttatttcaaccaaattacattaaggactgctaactgttttctgccccacaaaaataccctttgtaaatgtttccaaactataacacaggtcctcctggagcaacggctagataaattaacaaacttttagactttacgctccccttttccaaactccaagtcgaccactccccatttgttaacagaaacttactataactgattagatttctaacctttcctagggagagccagttcaattctaaaagggttggtcacatgggttgctaaattaaaatataaagcatttcctaacagggaagggaggctggtcaattgtggttatttttatcagtaactttaaatatggatccatagattatcaatttatggctgtcgtgggtgttagaagatgacctaatcccatccccattttcatttaaaaaactgaaactaaagctctgtaaaatcaaatgatttaaaatcatctgactaggccgagaaaggattagctctctagagcattacggtaacaatcattcgcaaacaggtagcattatctggcgaccctgcttttctggaaatcttgtcaattattcagttccttaaattccgtcagctacaacagatgcatcagctctttccacactaacttgaaagaagcacattagaaaatagtcctgacttgtttcttgagatcagtaactaatgaactgacctccaccagtcctgcctcaggtcgttaatggtaaaaattctgtatgtcagccgcgttttgaggcctgtccaaggtgcttgtgagtcccacatgttggagtcgcagggcttttcagtacatgccctcaggcaggcggcgcagtcacagacactggtccccggcatttggaaacaggaaagatggtccgaggggccgaggagtttttcttgcaacctttaaattacaagcaagaaaaacgtgggttttatttcgggcacaggaatagaatgaattctgaaatggagaactagaggcctgcgtggggaatgagggacaagcgcgagaagaaagggaaaggcctttctctctggtgacgcgcgatcacaaggcgttccctctacgtggacgctcaccattggcggagaccgcactgacgtcccggaactcgccctgacgcgaacggcggcaaaggccctcttcccctgaaagctggcgaggcgcgcgcgctcccgcggcacgccgcgcctccgccctccgcccgccaacccgctggtccagtccctcttcgcgcccgcttggctccgcccccttcccaattcgctcctcccccaacagactggcggcgcgcggaaaacgcgtcacgtgacgactggccccgcctcttcctctcggtcccatattgaactcgagttggaagaggcgagtccggtctcaaaatggaggtaaaaccgccgcccggtcgcccccagcccgactccggccgtcgccgtcgccgccggggggaggaggtattagggggagagcggggggttggtggggaatggccggcgttgggggcctggttcggtgggagcggggaggccgggtggaccgggtcggccgtcccgcgctcttgcgttgagacaggctgtgggagggggaggggagcgagagttggagacctccttggggcccctcgcccgcctcgccttcaccttcggctgcacaggcggccccttggaggcgcggcttggtcggggaggcctcgggagggaagccggcctgccggctgcgcggcctccgaagcgaggccgagggcggcatggcgggccccggcgggagcggttgggaggaggtggtgggggaggggaggggacgagcaggcacatccgggcgagcgagcaagcgggcggcggccacattgacattgatccgccgccgcgttacgaaatggcgcattggcccgcaatggccgccgcctcgctctgccgccgggaaagcgagcctgggattggagggaagagggcggaggcggcccggcagaaaaagccgcaaatggcctcgaagcatggggaggtagtgctttcgctgaagttctgccgacgcttttctaggccttttacgggtcctctccgcgagaagtcgataattggccttttctttttttcgcagcatcctgttggaaatacgagattgttaaaaactttgctgctttaaaatacttcctgatatatttttgctaaagtacttacattacacttcttaaaccgccatgtgggcgaaggacttaatttttgagaatttgagtgtagatgtgaaaaacaacccagccagctccttcccggctccggccgctgaggagggtgggtggagaagaatttgagtatagtatgttaaggaagaatttagaaatgttttttatcttcatgttttcccattctttgagtcggctctggttgtagtttcctggaattttatttagaggactgcaaccagagttgaaattttcacgtttttgcagtacatttaatgtggatcctaaatatttttgtcgatttcgttattgtcaatcgaatacatttatccaagacttgaaaagatgagattacatgaattaatgctttaggctattaacgtttttttctagcatgtgacaat

SEQ ID NO: 38514 - DNA, 1828 bp, Homo sapiens
ccctccagccctgtcttaaaacaaaacaaaagcaaaaacaaaacaaaaacaacagagatctccttcatttacaaatctctgccttgcagtcgtaatccttattagataaagcaaaatgacaccaagcagatgtgtttttaaaatacatcttgctgatgactaattacatttcatagatatgtatctgcctatttacttctctggcttctctcacactgcattacaagaatatagcaataccaattgttttctcagcaagaattctaggtcattctttctatttcccacattccagtacttttggttttattagactgatttgctatcttgattgtgttgctacagtaagtgtaaagtaggtgattaaaatacagaaacacagaatactggagacaaaaggggccttacagcctatcgaggccaagtgtaaatgttgccaggtttatttctatgtaactacagtgccttaaaaaaaataactggcctagcaacatgttgtatacatcagcagagacatttaagaggtagcaacagttaccacgaatccaagttttcctttcccttatcttgaataactagagacttttaacagcataaaaaagcccaaatacacacaaagacgtattattcaacaagttaaaaccctagttcacaaatttaccattccctgagttatagaaccatttttctgcccttttatctttccactagaaagtggtccggtttcttcaatctggcaggttactatgtgcagccattttcatgggctgcttcctgttcccaaacaagttcctcagtcatgactcaatctaagaaatatgatccagccaatttactggaactctcacccattatgcttgtctgtaaactgcagagcatgatgcaaagataaagcaaaactggaaagtgaagaaagcaagaatttggattattttctcaagaggcacatgcagagttcggtcaaaaagatgtcagaaaaaaagttaatttccaaaacagcaggtgatcctacctgctacaaaaagcacatggtactgaattttccatgagaggttcacatctgagtccccaaggaggttttgttttttttttgttttttttttggtggtttgtgtttgagtaggatactgctgctaggcttcaaaggacttatgtaagggtttcactactttgctgagagaatggcttggtttgacaagcaaacattaggataaatttttctaatctcttccccatttttgaacaagccatgtatgtattgagttctaaatgctgtcctccacagagaggaacttctcacctttgggattaggtcttgtactgcccttagaatgatccaaccctccccacacccgacccgacccctgccatattaccaacagaaacttcaggaacattggatccaactccctaacctactttaccaaacctccatagaaattaactgggcatggactgaccaggtggctcagatctccaccttgaggtcaaacagctttgctgcccatgctggtgtaccctcatcctccaaggaagtcccccatgagggtgggcacacacaatccagcacattcacaccgtaaggcttctacagatacttctgccacttctaaactccccaagtgatcctttaccctctcttttgatcctggatttgtaaagataaatgtaaagataaagttcaatccttggggtccttttcagattttttttttaaaagagattaagagtcttgctctgttgcccaggctggagtgcagtggcaccttcctagctcactgcagcttctaattcccaggctcaagtgatcctcccaccttggcctccc

SEQ ID NO: 38515 - DNA, 2246 bp, Homo sapiens
tgtaaaacgttcggctgtcatctccctcaagggtcttagattttctttcccttcacagctctggccaaatttagttggggtagttattacaaaagaagtgtcttaaagcctttaaagggttacgaagatggcaaaaggacaaagccacccaggccagctcagttcctgtttggatttagccttccactgatgcattcccactttctacaaactctctctgtccctagaccttgcctatggacactgggtttctaggcccagaacctcagagtaagaaatgctgccacaagtgaagggctgagtctggaaaggaatcctatgagatggtttaacaatcctcataagtacaaggaatccagcagacaggctggagggtcttccagaggagccggggcaacgtgtggggcctctgccattctagggcacacaccaggcctgctatggggttggttttctgtctcagaagacctcagtctccacaacaaccaggacctcacacaaggacaagaagaccaaggagaatgagaggtttatagcaaacagcaaaaaagggcgtgagtgtttacactggaactcgagggatttttgccaggcgtggtggctcatgcctgtaatcccagcactttgggaggccgaggtgggcggatcacgaggtcaggagttcgagaccatcctggctaacacggtgaaactccgtctctactaaaaatacaaaaaaattagccaggcgtggtggcccgtgcctgtagtcccagctactcaggaggctgaggcagaagaatggcgtgaacccgggaggcggagcttgcagtgagccgagatcacaccagtccagcctgggcgacagagtgagactctgtctcaaaaaaaaaaaaaaaaagggatttttttcaagaagaaatggaatgatgaaaatgatcacaaccaccatttgctgaaggtgtgccatgtgctatttcctgtgcccagttcactttgttaattctaggaagatgatgtcacagtaacatcaatctaaagatgatgaaacggaaacacaccctattgtgaaatctaatgacataacctctctttgcctcagttcttcacctacaaaacaggaagaatactcctcacctcacagggcgtagtaaggattgcaaagggcagaagagtttgtcagagcactttgtaccgtgcccagtgttgcagagagtccaacggactgcagctgttgttaacagcattgctagatgtccacatctgtctgcttggggctcacaggaaaagctcataggagagaaaagagaggaaattgttttttcttgtcttgggcaaatattgctaatcattgtaattggaagcaaggatcagactgttagaatttactaaaaatagtaaatcaatctaagagaggggcaaaaagagagaaactctctctgtgccaccttgaggaagaaatgaatccattctttaagcaaaatggcaacttctggctagtttttcctcccctttcatcagtgaccacactggtggatgagtatttttaaagcacaggaacagcggagcatgcaagcttgagcacaatccacttccctccttaaaaacggaggctctaaaaagttatttttacatgtctaacaaggatacaatttagagttacaatgacagatcctcaatctgtgtgctgatgtcaaaccaactaagccgtcacaacaatgctcagacctacaccttggcaggagcccgctcaccatctccctgcctccaacctgtccatcttccaattcacctgccacagtaacttcctatccacatccagtttacctgccctgccctttccagaatcttcttccatggtttccagatgccctgtacaaacttgaaacagtgcacatgagcactgaaggccctctatggcaacccccaagttaaccttgtcagccccactggcccaatagtctgtcatagtccagctcatatctgcaccattgcttgggcttccagctgaagcctgaaccaaacaaaatctacctgcttaaaagaaaagtctagttaaaatggcagttcctccaggatatcctctctgagcaccccagttagaagtcacattttctcatctgcactgtcacagcattgtcatgtatcacagactagtttatattaaatatcaagctcctagagggcagttaatggactcaccctcaaactgactgagcaactattacgtaagcaccaggcatggcgctagacatcagaattacaca

SEQ ID NO: 38516 - DNA, 3353 bp, Homo sapiens
atacaatcccaatgaagactggggaaaagttcaagacaaacaactttaaagggggaaaaaagcacaattaatacattgtccataacttaaaactttacaatagatctttggaattaaccgaaaactttacatttaacagcataaacgtatttactgtacatcaagtacacatttccttgaattccaatttttttcctaaaattcatttacaaaagaagttagaaatataaatatctacttttaaagtttctacaaaggatgagcagaaacttcttttcacttttataacaattcacagaaattagcaagtgttttgaaacgcaagcgttccactctctgcccctgcagaagagggggaacatgttaagaaattgaggcaaattctcaactgaaaaggaaacatatataaagtactcaggggagaaataatagctgaaagcaaaaaattactaacagactaaaagcaacagaaattctaatctacactcgcaactcttacccttgacagcacagaagagaatatcccgtcttacacattttggaattgcaattctgaaacgctaaatccaaagacaaagccgctctggggaaaatagcaattgcgcaacagatcaacagctccaacctgtcccttggccctggcgcggcgaggtttgcacgctataaagcaggaaagggccaaccgagggctgctgtgacggccaaccgagcgctgtcacggaagccaaggccacgcgcgcggtgagcgccaccagggggcaccgcgtccgaactagaagccccgggtgccgccgactccggcctcagagtccactgccctcgcccgcactttcccgcggcgttacgaggggccaactccgggtgcccgagcccgaacccctccccggccgagaaagtgcgcggggcccggctcagccgccacacgtcggggcttctgagcccgctgggcacttaaggcgctcctccctcgtcccggggctgggctttcaagagagctcaaggctgccagagagtgatccgagagatggatgacttcgcaaagccgcgcccacagacggcccagcggggtgagcgcgtcgcagcccgcactcaaggaggtcttggggcgcggcgaaggggctccgggtcccagcccgaaggcgacctcagttcccccgagagcggccccgtgactaggcacatttttgccggcaccgaggcgggggagccgcgcagccccggaagggccgggccgcgccggctcagacggccagcgtccgccccctcttgccccgccgcccaccgggccgctcaaacttaggggctccggagtcccagctctcgggcccggggacgcggctggattctcccccaaggcccacgcgagcgggctcagtccccagaccttcccgcaacttcccacccgttcgccctcgggctcgtggtcggtcggatcacccggccgcgtccccgctgcccctccccgccctgccccggcgcaagcgcggcggctctacccagcgccgcggtcctggctctggccagacgtgggggaagccggttgcggctgtccctcccgggccgcggttccctagctcccccgcccccgtcccggcaccaccgcagggcccagagggccgaggcagcacctgctgggacgggagtcccggcggcggcagctccaagtccatcatgatgagctgtggaccgtgtgttggggctccccgacggcggccctgttccggctgccgaggcgcggcgcggacagggcggctctggtggcggcggcggcggcggtggcggctgcgtcggcggctcctccgggctccccggcactcggtaatcggctacacgccggcgggcccctgccccgctccgcctcccgccccacaagggcggggcaagagtccgggcccttccttcccccgccggccgcgcgggctgagcttccgaaaatcccccacccgcgccggggctgacgcaagaagctcgcggtccgggggcgggaagggactgccagctggggtcccagcaggcgggggacctagaggaggtctccgttagctccccggtgccggcgttcagtttgccctcccccgcaaataagggcagcgctctcgcccgcgagataaagagttgtttgcgaaggtcgctggagttcggacgctttgaaacagtttaaacagttggaacaaacacacccggagccccggaaaggcgttggtgtaggagctgcgcctccctgatttggagttgcagaaccttgccctgcttttatctcactttaccgcccgagaatggcgccagccggggtggggggggctaaagatttggacccagaccgtgccactgccaactgccctcccgcccttgctcccttcccgggctggggccagtgggccctgcctaggggagatgtggacagctccggcagctcgtgttcgcagtcaccctgaacgccctcctctgaactcccacgtgtctccattctcctaagctcaggtcgtcaaaggcaaacggagaagcccctttaggtcggagagtggtcagtattgcccacccagagctgggagaaaaacgggaaccccaagagaacctcttcccaccaaagcgcagccaccacgccacagatggcgcccttcaacagtgtgtaataccacaacatgctgtaatcgtttactctttacaaatttctttttcacgtactcacaaaatagtacaaattaaaaaaagttacaaaaacgtttgtatagtattggctcattttataaaaacgtgcctagaaaaaaattgaaggttaccaatatattaaatgctgtggaatcaacgatttttatgtttctccttgttacttccaagtatgctttaaatctgcagtgcgtatgttttatgtcttacattaaaaacaattatttaaaaattaatcattgcccagagaagacttcaagtatttgaaacgaggaatattgtgaactcttataagggttcaaagaggatagataaatggtttagttttgtttttttcttcctcttctgcatttacaatctttctaactctatacaagactggttttcagtttctagcttcctggaattattcaaaaccaggtgaagtagataatactggcagtggttttgctatttcattcaaaaaccacacacacacccctgactatagcaatcaacgcccaaaaagctgcagagcttactttctctaggttgcataatttgacactcccaggatttatgtgtaaatttgtatattcagatattccttgagataagtgaagcctaaattaattacttgtaattgaagcaagcttctttaactcctattaattcctttcagctgttatgtgaaaaccctgcaacat

SEQ ID NO: 38517 - DNA, 764 bp, Homo sapiens
gactgcagtcacatacaagagactgtaagcaagaccggcagaagactccctggctaagctaagtcaacaccaagaactgtgagaaattataataaatcactttcagctattaaatttgggggtggtttgtttcatagcaattgataaccaaaacagcatactgtatgtatggtgactatcaaaggcagggtttcccctggctgctctttgtttgttaaccaacattgggagcacaaacagggagatgatacttggtgatttaataaaactcagactctcagaagaaaatgacttccctgggaatgaggaagctgtctttcccataacatatctttgttgctacatacaaagtaaaaaacctcatcacaccatgcataagtttcattttattagacgatggagagatagtctccttatcaaaatacacttcacgaacacagacattttatcaatgaagtagatggagggataaatgcatacagaggttctgaccgtgatatgacctcatttgtgccagttatgtaagatactcgctgaatatctgcttagggagtttgaacttgagcaacctgcccagtggataaactaaactccagtataggccaggcgcggtggctcacacctataatcccagggaggccaaggtgggcggatcacctgaggtcgggagtttgagatcagcctgaccaacatggagaaaccctgtctctactaaaaatacaaaattagcttggcatggtggtgcatgcctgtaatgctagcta

SEQ ID NO: 38518 - DNA, 872 bp, Homo sapiens
atttttaaaaaagctctaaacactgaataaataaatgttttgtgacaacacggattcataaactagagggagatttttttgtacactatatatggagacatttcttgctaaagtttgcccagtctagcctcctgggaaagtaagtactgtattagcaggaaatacatcttttcaattgtccgctctggttggaagattagataatatgaacacttgatctccttataatcaattcaatttaatttaagaacactgttgtgtactgtgtgaagtgcctcaggtaaaacttgagtttattgagcattatgtacaaagctctccttccaaacactttgtatgtgtcattactaatactagcaatagccattttacgggtgataaagccgagttcaatctgattcagtaacttggccaagattccatggaagagctcatgtgaaattctagatttggctgtttcaaaacctttgctcttttcactgggctaggccccaagacacctcccaatgctttgtgaatgattaaacattgtagggatcacgttctatatgatagtacttgccatagacctcatttaattgtatgtcattatttgaagggtgaagtataattttatgcaactgagatatcataaagttgtataaactgtgccataattttcatgttggaattcaatttaagatttccatgtatttgttttttttctttcttgattaaggcttactaaccctctgctcttgatccaaatctgcaaatacataaaacagaaagtacgagggcccccagaaacctctctctgattgctagtggctcattggaagaatatcactctaagattttgcagtctgattctgtggtacaaggtcttcaaa

SEQ ID NO: 38519 - DNA, 1279 bp, Homo sapiens
actgccaagcaaccaaggactggggacaaaatagcctgggaggagaagtaaaaccaggaaaaagtttaaaattaggtgcctgacatttaagggaaaaagtccaaagttaatcaaggatgaccgcttattgcaagattcaaaacctctaaatgacaaaacttctaaaaaaggaaatgatgatagcacggggaaccctgctgatccatctccctgcccaaatacttctccattcccaacatctgtgcagccatgtgcagcagagacaaacagcagcagcactccacccccaagctttgagaaccgcagagctgtggctgacacagtggtcctatctctgtgaagtacacaaaccataccacagccttattttctgagaccatctctatgtaaccagcttccctaaatgctgtggcccaagaggctaacactttggtcagtcatggggcaatatggctgctcccacatggcatccaagtccatgcttagagactgaaggggagccagccttggtaaaccaggtctgtggtcatttccccacctggcatttttgagctgtaccaagcagcctaggggttcttactgcaagggcacgctcaaacctgacttgtccagacaagcagaagagttttgggctcccaatcgagcacggtggtcagtctgttccagtttgtctgggactttccaggtttgaacactgaaagttctacagccaggaaatccctcagtcccaggcaaactgggatggttggtcaccctgaagtcaagacacctaggctttggcacctaaacatcagtttcctcatctgtaaaatgctgggactggccagtacagcttctgatgttactgccacatctaatagtccatgattcactctcatgctcctgaccttacccatctgcagcccaactcccaaacaaacttcacttgatccaagatcgagttcatgtaacctgataagctaatcattagtgtgttaacaggagaggattatagggttcacagttgaattttaacaatggctcgggtggaaggcatgtgggtagctgagtcgttctaatggtgggaagttcagctggggagatggagtgtatggctctgtgccatctgagagaaagatatttttaggcaggcaggttttgaggcagccagcctgagagagctggtttgatgggctgcttttagctgcacagcaggaacaggccacaggcagggcagtcttgtctgacttgagccaactttcacactatgacctgaataaaatcagcagttgaagccaca

SEQ ID NO: 38520 - DNA, 1836 bp, Homo sapiens
ttttcagaatctctggcaagcagatggcagtttctcagaggcaataccccatggccaaacccataagacctccaagcatctgcagagtcctgaaatccaagtacaatcatgggcaacacaacaacatttcagttcaactacggacctcttatatgatggtggtttcatgagatttgaatactgtatttttactgcaccttttctatgttaagatatatttagatacacacatacttaccattgtattacaattacttacagtgttcagtacagcaacatactgtacaggtttgtagcctgggagcaataggctataccacatagcctaggtgtgtagtaggctataccatctaggtttgtgtaatcacactctatgatggttctacaatgaagaaattacctaatgacacatttttcagaacaaatccctgtcattaagcaatgcatgactgcattctggactatgacccaaatatgactggacatcagaatcaccttgggaaggtttcaaacatacagatttacaggctccacaccagagatctaaatttagtaggtttggaatgaggcctgaaaagttctttacaaaccaccccaggtaattctgatgacaagcttggcttgggaaacactaccccagccacactgactccatgaaagagtcagacctggattgaccttggtagtagttcatcacaagccaaatggagggaagtaaagggcccgttataagatgccctcaaactgaataaatgtaaccagatatcaagacaaaaaacaaagcagaataaaagaaaacttgctttcataagatggaaacttgtgactagtttaggcctgcaaataaaaggcctgcacttgtgtcccatgcattacgtgtaacttgttttcttccctccagcctgttcacaaggaaatcatggcatctaaagtttgttttactaaaaagcattataaaataaatcataaacaatatagcactttgatatcttagatctcaatatgaaatccttggtctagggtgtttttagtttagaagtttgagaattttgaagacagcaaaaatggactttgcaaaatttaaggagacaatattgcaaagataacaagatccaaggacactctcttccttctcccatcaacctgaactggtttattctagatttaaactatgaactttaataacctagacttcaatttgaccctagtgttcagtggtgaaagtacataggtgattatgtacagtcaataactaccctatctcatctgtcaagtagaataaatagctaaaactggtaagttgataaagtgtttttattttggagagttaataacttactctaaagtagattttaattactagaccttgctaacaactgacatatgaattaattactttaaatcactatcaagttcaatctccatacaagtttcaaggagaactgcacagcactcaaacataaaggaaatattaatgacataaatgatggaacacaatcaagtctattattcattagtatgaatgaaaacaaaatacagtgagcgataaagacagactagaactaatatcatttgggtttacaaaaaccatctcaagtccaaacatgttcttgtccaaagtccttgcctcatttcaggaaacaaccccatgcctcacttgtgagattagagtaccatgttttctttctttccacatgtggaagtggggtaaagagatgttttggccaaaaaatacattctagacccaaacactagagatatgatcaatctccaggaattttataaaaaggtaatgttgtatttctggataaaagggaaaaaatgagcacaaaaagg

SEQ ID NO: 38521 - DNA, 1048 bp, Homo sapiens
tgcatgcatgtagatgccccagttcacgcatccataccctgtgcatgcctctgcaaataggctatccttggctacctctcaggctgaccacacacactagtggcatggtttgcccttgggaggatgggtctggaaaagaagtctaggcaggccctggaagtgggcttggggcatttgagcaaggaatcctgaggtggtccaagttatccagagtgtggtctagaagggagcaatgtggtaatgtggttctgagtggacacatcccctaggtgccacagtctcctcaccctgtagtaaggggtgcagccagggagggtaaaagcacggccttctaaaagcctaaaggcagtaccagcaagagccggtatgtggaatgtgagtattagcataagacatggaatcctggcacacacctcaggcctgcttcagcaggaggaaggaggctggatcaaacttgtccagacagggaagatggatcatgctcactcaccctggaggggtcacagaagtttatcaattcctggcaaaacggaacagcccaatctgggagagcctgcccagatctaagtgccagtttagttaatgatttaaaggggcatttaccttttcgccttatggagaaagtatctggaagattctggtgttatttttattggggccactgaactttctgtttgtgctcctccttatgaaccctgctccctcctcctccactgttctcacagtgccaagggcccatcagtcctcgcttgcttgccttcctctcagccagttaactccataaggatttcagcaataatcctgataggtgccctcacgcacttggttcttcatccattcatgtcttccaaatctccatccttcaatgaagtccatcatgtactttctgtttctgctcccaagcaaaagatattgctgaaaattaaattaaaaatgtaaaaatctgacccaagccaatatcagctgactggtcccagctgagcctttactactcccaggtaattctctgatttttcaaaatttccttccttccacagtcctcactttt

SEQ ID NO: 38522 - DNA, 1218 bp, Homo sapiens
tactcacctctactctgtggagtttatttgcttttggggaaacacaataaagtactaagtcctgctataagacagggcacatgaagccagcacctggcttgcacattcaatttattcttcagtcattcattcatttattatttaacgatatttattgagtacctatcaggtgtcagatacgtgctagtgctggagagtgaacactgatcgagacagatattcttgtcttaaaagcattaatagtcaagtgggaaaacaaacaaaatagttagaatatgataagtgctatgatatgagaaggttatgggtgtgcatagcagggacaaatcaaagtcagaggtaggagggaggtcaaggaggacttagggaagaggtggtgtttaactggagatcagaggaatgtgcaggaattagtgaggtgtagggaaaagttgaagagaattttctaggaatgtgagacagtccagaggcaacagagtacagtgaacccatggaacggacagaagagaggaaactgtggcaaatgaggtgggaaaggtcatctgtaaacagatcttaacttgtaaatcaagtttacatgtttagactttatcctaaaggcaatggggaagctacagatggctttaagcatctgtaagtgatgcttacacagtgaaagacctgttcagatttgtgatttagaaagaacacatgacaggataatatgtgaagtattaatggaatgtattctctccactcatttctctacttgggctctgggctgcccatctgctccttgcctgccaccaacatacacatacatagacaaacatgcacacaccccacctcactctttcgccaggagagtggaaagcaaattaatgattgtagagattgtctgctgctgagagaaatctagactctacattgcacaatttaaatacaaagggctctgcactttaactcagaaatgaaacaattaaaatgaaaccaactcatacaaatgtgtaaatgtgaattggtttttcacctctatgctgtgaggggagaagaaatgatctgatcagaaagcagatgtgcagggcaaaaggaaggaatgttcctggattacttcgtggcattatgggggacatggctgcccctttctgagatgaagctacatgggacctgcatgtgcacccagacagcccatccccacccttcaaagctagcaggatctggtactttagacagcacact

SEQ ID NO: 38523 - DNA, 1829 bp, Homo sapiens
tctcaagcaccaaagaaattgaagaactttgctaattaatctgtgggatgtgagttagaattgattttaagaatgttgaatgaagaagaagaggacatgatttgagattgggttgaatttactaatagggcttacaagagattctggattattctagtttgagaagctaggaataattctgtttgctctgctaaatgttcattgacatttagactgaggggtgagtcatacaaaataaagttgagatgcaaatctcttaggtaaaatgtaaatgaacaaaattttaaattttaggagacaggaatgctggattagatttgtcatatctgacccaaccacccacctcaattttgtcttccaaaaaagggtctagccagttgcagtggctcacacctgtcccagctacttgggaggctgaggtgggaggatcacttcacccaggagtttgaggccagcctgggcaacatatcgagaccctgtctctaattaaaataaaaatcataagaaggtccagaaaacactctttacaaaggccttgagaaacaaatctatgagggaagggtcagtataaaagtgatttagagaacgtttcacgtagaccagcgatgatgctgaaaaaaggctacagttgaatttggcttactgagtttcagagggatggcaggatcccagagtgacatggtctaggtagcacatttgcatggggctaagttgaaagttagtaggtcagtgtgaaaattagaatgctctgactcatggattcttgggaggtgactaactgatcatggagtccccaggactgaaataaataagcagtcactaaggttctacttgatttgtatagcaaacaagcaaacaaacaaaacctttatgtctagaaaagagagacggtatccaatttccagatatgaatgcgttctcagacacagttaaaggaaatctgagtaccctcgaggaagtgcctacttgagtctacctcctggaatacaaagggacttgtggccatttattaggacagttgtgaatgatgaagcagagatagttcactttcatctggtacggacaagaatatagctttaccttcttgccacaggattacatcaccttttggaccctgggtcaaaatgaagtcagcagaaagcttcttatttcctcatttcacatgatatcagattattcatcctatacaagtggggacaaaagagtagaaagcaataaataccttggataccttgaaaaaaatacatgagcgctcgagtgggaatttttcaagggtccagtggtatacagaacatgtttggctataattctaaagtgagagataaactgttgtacctgagctccttaccaatatgaagaggtactattttggtggacctctttggatattagaggcttgctactaggtcccagtggaacacctaaccctgagacaccaagtgactttgcgtcgtaattgtctatcaggatccaggtgttaattcaggctcataactcaccaggcctggatagtcctgaggatgagtgagtttagtgagcacgttgcttgtattctcctgctacttacgtctgtcacactgctgtccctctctagcttacgtgtgagtgtctcatggggtattcactatgtccaattgatttgagaggaaaaaattaaaatcctggtttacagatccttttttcttggcttgaagtgggttgctttagcatttatagctcactccaagacccagaaagaccaggggaaaggacaatccttgaccgggcatggtggttcatgcctgtaatcccagcactttgggaggctaagatgagaggactgcttgagg

SEQ ID NO: 38524 - DNA, 2047 bp, Homo sapiens
caatggccagtgtatgtgagtttttgtctaagctaattcttatgcaagacaccggctgaaacaggtgaggagcacttttcacgtgctatcttccagaaatgaattcaatctgtaaataactgagatgtcttcacagctcttgggtaatttttgtctgtagcaataagaaactttatctctattaaagttaggaaggggttaggatccagtaatgaatgaaatgagaacttaagttgcaactcagtttctgtacttacttgtgatctagcattaaacacagtgccaggcacgaaataggtggtgagaaataagaaaatgatagagctatttgctctaatggttagaggcaatgatggtcagctttgagttactttggtgaccccgcagggaggaagagcacaggtggaacattagaatctctttcaggaaaaggatgccgctggatccatcaggtccagtagcactgcccatttctcctgctccaaggcatctgccctcgaaagcccccaggccacacccgaggacaccacccagggttctaggacacctcgagggcggacgtggtttggctctcggtccagctggaccgggctgggccaaccgggagtcagctcgaactcacctgcttggcaggtgcgcgcttcccgaggcgtgacaagggagcgccggcgcggtgggtggggggcagagaatgtgaagctccagacgcatggcacccgccgccaagtcgccgcggtggctgccgggatgcgccgcagcgaatggtcgcgccgggcgccgctctgagtgacctttcacccgcgcccagcggttccgggcggcagcacaaggcggtagccatggcggaggcggcggctgcagcgggtgggactggcttgggcgcgggcgcgagctacgggtctgcagcggaccgggaccgggacccggacccggaccgcgccgggcggaggctgcgggttctctctggccatctgctgggccggccccgggaggctctgagtaccaatgagtgcaaagcgcggagagccgcgtcggcggccacggcagcgcccacggccactcccgccgcgcaggagtcgggcaccatcccaaagaagcggtgagtagcggtatgtggaaggagttagcgtcgagggaccaggccgggcctgtgctgcaggagggcacaggcgaggtgggaagggaagtgacacgggtgggcggaaggcatcccggtccctgaaagtagggacccacctctctttcgagagagtggactagaccctggattctgtcaggaagggggcgggatgggatggtggattttggtcactatgtgagggtaacaggcttgaagaactctcgttggagaagggtttaaaggattcctttttcctgagcttttagtgccaggaattcattttttatcttgaattaatacttttggtgctgaggtcttggaatgggtagcagaggttctatttttctccgaggagatataaatttgtactagatgatagatcataggaatctctctcattcgcgaaagcctgctgtgggggaaactggtggtgccctggaaaaaggtgctgactggtttctgtggggtaagttccacttgcttaggatcaagatgtattgactttgagggaggaaaccgatgaatggtaagaagccataaactgcaaacactagctagtggtttaaggtgtggtggtatagctactgagctctgtgtaaccagaagctaaaagacaagagtctaaccgatgagggatgtttgtaagagatcttgactttcgatgtttttggagaaatctttttttttttttttgtatttttagtagagacagggtttcaccgtgttagccaggatggtctcgatctcctcaatctctgatgaaggctattaggagaagctactttctgacgtgtggctttgtcaccgtggataaatggataaaccgagagtgaaaaaaataagtagctaatgtttaaagtgtacttttaagtgtgccaaagtgtgctaaatcctttgtttcttcccaagctatgaggtatgtgcggt

SEQ ID NO: 38525 - DNA, 398 bp, Homo sapiens
tgtaacacaataggcgagaaataatgaagaattaaactaagatgatggcaatgagaatagggaggaaatgatgtgtgtgagagttttagaagttcattaggtgacaccattaaagtttaatcacactttaaaactatgtaactaaattaatgccacaggagtttggagactgaatgacaatagaaaagggatgacacagtccagaggaatgtggacatttcagagggctgaccaaacaaaacctgctgtttacttatcacatggtctcctatgaagttggcaccaattacttctttttcttttcttttttttttttttgctatggagtcttgctctgtctcccaggctagagtgaagtggcgcgatctcagctcactgcaacttcctgcctcccgggt

SEQ ID NO: 38526 - DNA, 1168 bp, Homo sapiens
attagtcagaactgctcaatggcagtttttacggaggttataaatgttcaggtcaaaagaatgattaagaacgccactaattgtttagtctacttgcttataatgtcacttacaaatgccattttaataaaaagcagtatattaacgtcgggcatggtgactcacaccccataatcccagcactttgggaggccaaggcaggcaaatcacttgagcccaggaattcaagaccagcctgggtaagatggtgagaccccatctctacaaaaatacaaagaaagttagcctggtgtggtggcacaggcctgtggtttcagctactggggaggctgaggcgggaggattgctttgagcctgggaggcagaggttgcagtgagctgagattgcgtcattgtactccaggctggacgacagggcgagactgtgtctcaaaaaacaaaacaaaacaaaaaagtattatttaacatctgccggaagctttggtagatattttccagaaggaatacagctgagttaacctcttgtaaatatttcccaagagggtatcctgaagcctgtaagagctgatacagagcaaaggttatttgcacaagtgacctggcttaaaacttaacatcgtttggcaaaattcgagcttattttggtagttatgttgaatgaaatatttaccctattttgagttcctagctaggaattctagtgatagtagtaataggagttttaattgactaagtcctaatatgacaggaaccatgctaaagcttatgtacattatgtcatttaaatctcacacaacagctctgaaaaatgagtgatactatatgtacattacagttgaggaactagaggcttagagaagttaatttatctaaggccttgcatttgtgaaatgaaagagatggcatttcaactctgttcttgctccagagtccatattctttcctctatgctggattaccacatctgatgttcccggggagatatctacttactattcatcaagttgctgtctttgtcatgctaagtttcaaagtttttgtgattaaatagatcatgatcaaatactttgtcatatagttaagaaggcattagtttatgttgtacttaataaattataaaacatcattctgtcaaaatgaaattcataataagaaaatgtaatgggtg

SEQ ID NO: 38527 - DNA, 422 bp, Homo sapiens
atacgcttactcattgaaaaaaactgctactattccagtaactgcagttacttttgatgagagagttttgcctcctgggtgagattcggaggggtagatatcgtcttgtcattcactaagaaaactgttatatgattgcatataacatttgttcttgccagcatgtttgaaattactaatcagagatttggccaggttgctgaccagattcttgttgttgacctcagtgggactctccaaattctatttatagttgctgtgtcagagacctcatcctataagcaggggaatgctcaggtatcccaggaccttagaatcaagtaatgtgaactatttaatttgctataatcacagaagttcgcatttccaactcagattgattacctagttgggttttacattttttctaaaggtgcttgaac

SEQ ID NO: 38528 - DNA, 1180 bp, Homo sapiens
gggtgcagctggcccagctgctcatagcactcggccgccagcgcgaactcctgcaggcggtagtagcagtagcctagcagcgacaggccggcgcggctcctagggctccgctgcagttctccgcccagcagctgcaccgcctcggcgtagcgtgcattgcggatgaggcggtacacgaccgcggtgaactccccgtcggggatctgcgcgccgctcaggccagccataaccaccacggctgttatgggtgcggttactatggcaacagagcaaccggaagcggaagactgccggtttccttgtcgcaagaaatctgttaggaacaaaaagggaccactctcgtcagtctctcaatttcagcttgatcttcaaatactctggactgcggagtggcggcattcaggaggggaaagactactccgggccgttcagagactgaatctactcgtcccggcatgcaccgttccagtggttccgcggcgcgggtcgtagccgcgctgcatgctgggagacgtagtcccggctgtacctaccgaaccggcggcccgtgggggtgcagggtaactctccttccctgcctcttaaagatgaggggcgctcactgtgtctgttatggcaccgtggtctctggcgcggcggaggaaggtttccggccccatgttcctggcgattttgagcctggtacacggtgtggtcgataataatgctggcttttggtttagtttcagtaaaagaaccgggatggcaaaaggcgagttatctcttggaattaccctggaattagagcacgttcttttttgcactaccccgagggcacagtttgtaagaacggaatagagcggcgagcaggaatccttaatttggtggtttccagaggttaatgaggaaaaaggactgtgaatcttgattggtactgggagagtttcggttttaggtccaagtatctcccgctcttttttcccgtaacaacaaatattactgagtatatattggcgtttacccttggccatccccattgcgctggagttccaactttcactactaggtagaaacgttggagaaatgcatgacttcagttttttccaagaggggaaaatccaagacattaaaatgtgctcctttccctatgcatttttactcttctctcttaactactaaattagtcagccagtgatgtgtg

SEQ ID NO: 38529 - DNA, 1144 bp, Homo sapiens
cggtactgctccagttccgggtgcagctggcccagctgctcatagcactcggccgccagcgcgaactcctgcaggcggtagtagcagtagcctagcagcgacaggccggcacggctcctggggctccgctgcagttctcggcccagcagctgcaccgcctcggcgtagcgggcatcgcggatgagccggtacactagcgcggtaaactccccgtcggggatctgcgcgccgctcagaccagccataaccaccacggctgttatgcgtgcggttaccacggcaacagggcaaccgggcaaccggaaacggaagacgacgggttactttgccacggaaggaatctgttaggaataaaaagggaccgttctcgttagtctctcaagttcggtttgatcttcaaatattctggactgcagcgtggcggcagtcagaaggggaaagacgactactccgggccgttcagagactgaatcttcccggtcccggcatgcatcgttcctgtggcgccgctgcgcaggcgtggccgcactgcatgctgggaggcgtagtccctgttgcaccgacccgactcgcggcccgtgtggacgcacggtcactcgccttccctgccccctaaagatgaggggcactctctgtgtctgttgtgccacctcggtctctagcgaatcggaggaagatttccggcaccatgttctggcgattttgagccttgtgcattggtgtggtctatactaatgctggcgtttggcttacttttaataaagtagagatcgtcagtacaataaaaggaccttttaataaaaggagcgggatggcaaaagggagttaactccttgaattcccttggaattagagcaggttcttatgctaccccgagggcacagtttgtaagaacagaatacagcagcaaacagaaatccttcttattttggtggtttccagaggttaataaggaaaaagtgctgtgaatcttaattggtactgggagaggatctgtttttgatcgcagtatctctccttttccatgacaaaaaaaaaattactgagtatatgttggcgtttacacttggttgtatccattgctgtggtcctccaactgtctctgccaataagaaatcagtatcttttgtcatctcccatgata

SEQ ID NO: 38530 - DNA, 2294 bp, Homo sapiens
aaataaactctctacttatattaattttgccacagtttctttcttttaggttgacattaataatagtacctattttaataggactgctttcactgttgaatggcataatgtatatataaaggtcctaagtaagcactcaaaaagtattagttgttgtttttattactaatagtggaaggtgcataggtcatctttgttgatttacatgcagataaatagtacagggcatttgtatcatccctttgaagttataacatttgtaattttagatctctctgcccactccaacaagcatcatcttttatggtgcatgttttattaagttttctggctgagtgattcctttttttataaggtactttacattgtcaaagctctttcataaaattaatctcttttcactgccacaaggatcctaggagattagaatgggtgatatgcctatacccctgttgctgacaaggaaactgaggcaaagagagatccgactctcaaagctggtgaaattactacttaattatcaaatccttattcactgcagggactcagaaacaggcacagaaatcatttcagaaagttgctcagcagtaactggaaaacgttttcagtgagttggaaaatcagagtgaatcattaacccccaggctcaggttgtgaaacttagaaattcacattaaggattttgtttgtttttgtattttaatcttgtgaattctgctttcatatgccatttgaatgacatagaatcccaaggacacacaaggtctttagaaattaaagtcataagtttttgtggatgttttgaaagcctttccacatttccatgaatctcatatatttttttccttttagagcatggcaagaaatcttgcctctaggaatgagtcagaaacctgtctccaaaaggcagggctctaccctgcccagcctggccctttcctagagtgactttctccctctaggggaggaaagcagtgagcttcctttttggtttcttcaactgtatcatgacttttaggttgagtagtcagggcagaagaaccaacaataatccagacttccagaaactaattgtacggggagcctaatatcctcttggctcacccacccctctcctgccattgctgctacacgcagtgcctcagcggtcctgcggatcacatactttctgccctggcacttcacacatgacttcatgtgtgagaacagggatgagacagctgcaggaatgcccagtcatcaggcacacacaacatggaagtacatgagagttaacatcccacagatcaacatttggttgatgaggatggtgggtggcggacaattttgaagtgcgatatatgagacttctcagatggtccctgcaggatcaagactggctgaccatagtggagaacaacaaagaaatgtgtccttcctttcactggcttccctccttccccatttcactgtcccagcccctcactcttattcttggtgtcatttccaaaactaaactacctgaatgcaagcctttatctccaactttgctttgggagaggacacaggggcctcaagctagtgtttaaactgattacagaacacctggaaagagtcaacattatcacataatatatccccaattaaaatgacaatgatttcttgattcttccattagagagggaagcatggtgattgaagaaaaagccctgaaagaggaggtgtgggttccagttttaccaataatgagttatgtgacctaagctacgctatttaaccatttggacctctgtgcctgatcagcaaaaaaggagatgaattggattgcatcatttctaagatccttccgattccacaattgcacatttattaaataaaaacatcggggcgacagtttgtagtagctgctttccctctcattataactctagggattgttctggctaaaaatatggcaatattttaatgcaactttagacaggcaagtgaatcaatcctctgaaagtctagattagagaatgggcagctattcagaacctcaaaaaacaataatgctgatgaaaagagaacaagccagcttctttgggagtcagcaaacattagcaggggctgcagcattaagataagaacagagtaatgagaaaacgagttgcaaccaacttcgttgactgcatgccagtggtcactcagtgattcgtcaaatccctaacagagcttgataaatggactctgagtgttgatatttttttttctctctttagaagttacttggaaagatggcttgggaaaattcttctactttgaggaaaataaca

SEQ ID NO: 38531 - DNA, 954 bp, Homo sapiens
atttcagaccagaggcatggaacaaattaataagtcattaacagggttcccagtgaataaaatgttcatcattttatatcaatttgcctgtcctacacagtagttctttttttttttaatttctaaaggaacaaaaccgctttgttacctacacatgaacctgaatacttttgcaaaacacaatgctgagtcaataagtttattttccacccgtgaagtgattttagggttaaaggttaggaagctggggcatatatttataatttgcttgtcctgttgtacgtggtgccaaaatttgttcagcagtgacacacaactatgcatttccccattcccagagacaataggcttggaaaaatacacaatcacagatttaaggtcacacggagaacactattattcactttaacagcacggtatgcaaggtggcagtcataaaacaggcccatcctgatgggagatgctcttttccgacagactggttttgttgctatctcttttaggaaaaacatttattttgtggtggggtgtgtacctcagtattccctgtgctagaagaaaagaagcactttcaaggaaggtgggtaaggttttttcccccttttctggaaaccagctgagaaactttgccttggagcgccatctagaggaagcctcagcacacacacgctgtgctttcttagccttatgacatgacccaggttgaatccaatggttggtacatggtgagtttcttttcttttctttcttttttccccccagattaatagagaattttggttctaacacaacccacagacaggaaatatgagatcactggaatggaattttaatcactgataagatcaaaacattgaaaggcttttagaatcttcaggagtgccaaaagcatgagtgcccattggtggtaagaaatagggcatcattttaccataggccgagtcacattccaga

SEQ ID NO: 38532 - DNA, 1491 bp, Homo sapiens
cagacaaacatgataattgactcaagggttccagcctgtgccactgcaggaaggactgagtccctataaatcattagataaggtagtgagagatttctatgcctccagatcagatagagatgacagctcctgttcaggatgaagcagttacagaagatgaaacctctgtccctctacaaccttttaggattaaggaagagtgcacagtctctgaggagagatgaaaaaggaattcagcaggacttgtttcacaagatacagaccacaaagactgctgataaaacaggatgtggtaaagaagtctgccaaaacctgccaaaaccaagatggctatgaaaacaacctctggtcattctcagtgctcattatacactaattataatatattagcataccaatggaaactccaccaacatcataacagtttacaattacaattacagttacaaatgccgtggcattgtcctgaaactaccctatatgatctaaacgggagaggatccctcaattctgggaactctcagctgctttcccagaaaactcatgaataatctactccttgtttagcacataatcaaaaaataaccataagtatagtcagtcaagcagcccatgctgctatctgcctatggggtagccacccttttattcctttagttaataaagttgctttcactttactctgtcactttactgctggctttcactttactctatcactttatactttattgctggctcttgaattctttcctgcacaagccaagaacccatgtgacctcccaagctgagttccaattttgaggtttgccctgtgacatctttggcttatgaaagcaatctgattaagatccagcttaaaattataatcatgtaagtcaactctactacatagttttgagcacagaaatcagaattcatgctatgaattgccctaggcttgtagtctgaacttgttctctccctatttgcaggggtcagtggtaggatttaatctgtttatacggattaactgctgtatagattacctacagcaattcttaagacaggctgtttcctttcatttagtaaaactttgttttcttaatttgtcaatgcttagtgtgccaacaatggggggccagtatagtttggtctttgagcataggggctttgtgtcagactgctgagctcacaatcctggctcactagacctgtaaccttggcctaattatataacctatgtctcagtttcctcatcagtaaaaggtgagaaatatatgcacttttcaatcatatttcactggccagagcaagttacagcactccacctgatttcaaggaagtgaggcagtgtaatatgatcatgggcccagataggagagaaccagaaaaaaaactgatgatgagcactgatggtaaccacaatggtttgggcaatcaaatagcaagttatgttagaatagcgtttaaagacaattctgggagggcagccaagatggccgaatagga

SEQ ID NO: 38533 - DNA, 532 bp, Homo sapiens
aactgtagttgaatctcaggaaaaacagcaagatctatggctttttaatttaccttatttgcatctccctctatccatctctggggtagctgtgaaaatcagcagcctagcagccacttgcagaggaagaatgagtttggaactccccaaaagctctatccccagagaattgtcactatttgacctgtttggcagttccatggaaacctccattcacagaacttgtctttatttgacctgactcagggcttgtttattgagaacagcctttacccccagggatatttgtggggaaaagtcagcagtaattgtttaacatggcaattgcttcaggtggtgataacacttgcagctaacaagaagctgagcaaaaagcttaatgagataagcttgggaatgagatgctcccagaaggctttgaaaagcttgtacatattcatagacatctagaacgtatgcaacacacacacacacacacacacacacacacacacacacacacacacactactgtaagaatgtctgggaaaga

SEQ ID NO: 38534 - DNA, 1194 bp, Homo sapiens
taaatttctccaagttttgacaaatacagttgtataatcaccactgcaagcaagacacagcgtggttccatcacaaccctctacccctttgaagtcaacccctctctccatctcctgtccctggaaatgaactgatttactttctcttcctataattttgatgttttaagaatgtcctgtaaatgaagttatatagtatgtagcaaaggccccttttaaacttcatgcatttgataaaaaataatttactttttatttttacttactggtttctatttcctgaatttaaaggcaataatggatataaaaatcaaattactcttgagtattacatcttgaaataggtaattacccagagggcctttagaacatatagacctttaggacttcacttctgcagtactgaatcagaatctctcagtgtatgttctgagaatttagtttctactaaactttctaagcctgattctgattgacccattagatttgggaaacattaacctgacaggtattcactagatgagatcaacaagcagattttaaatgacgtgtggttatggaatcaaagttcagaggttgggagagtcttatctaagtgaccttgtccttggtggctaccacttgctggttgcagggcctcaaacaagttacttaaacttgatgaaccttggctttctcctttataacatggggggaatgcctacttcaaaagattgtttgggggattaaatgcttataaatcatttagcatactacatggaacacataacagtcaaataatggaggttgctcatattttagtatcaatatcttcatcattgtcatcatcatcatactgccctgagtgctttacgattctttctccatgtctgcattttggttaatttcactattttttaacccttcctctagaggcaaccaaagagaatttttgtagcaacacagctattattcaaggcagtaaaaagctaagagaaattcactgattgcttgcaatcttcacttctaccctgttatagcctcaaagatgccaatgagaacaagaagtgaattactggaaactctctcagtcttttttccaagcggatgttattggccaattatggacaaacaagagggaggaagagaaacaaagagcaaaaataaagtaaaaaattaggctgtctgtacagctaagatacatctaaaatttta

SEQ ID NO: 38535 - DNA, 458 bp, Homo sapiens
tttttataacaaaacccttaaagcaaaaatcaaaaaaggaggttaataaatttgacacattaaaattaaaatattccacaaatatacctgttgagagaggcaatccacaaaaccaagccatgcatgtcaggactttaaggccctagttcagttctcaggattgtatttgcagtgagcaaacctgggagatgaagtaacatctttccacagacaaacatcaggcttgataccactccacagaaaagggatatatttcccaagcacagtgttgtaatacgacctcttctgtaatatgacccagtgcatgtgcatgcccatacccacctgttgcacctgtggaacttggagaacatggggaaccagcaccattgttatggtttacaatataaggtttacatttgtatctacaagtatatgctccactgtttttagccttacttcgatatttaaatacattc

SEQ ID NO: 38536 - DNA, 1350 bp, Homo sapiens
gagtgtctgaattgtctaactctattctcatgtggcagtcatcttctcttcactgtctgtggcactgggaataagacatgaattaatgttggaagtcaaaaggatgagccaagctgagggccacttagagcagctgtggaaagcctggtcatatgacaggtatacaggcagcaagaaatgtccattgaaactgagtcctctgaaacctttgtgaggtcttctgtagtcccgttatttttactttgctcaaaactcatcagggtttctagatgcatcaagatatgtgtgttatctgtacataaaaaatgtatcacttctgtctgcaaaatttcagtattatatctcagagaggatggcaaaataggcttgcctgctaactgcgttcaaagatccacatacacatgctcaaatttttggtgagatgagtctgattcagttgtattactcagcattctgttaagtggccttcaatactgtcatacagtctaaagcaattgatagttttagtgcctctattacatcagaaaatacacaagaatgacaatatgagcaatctactctttttcaagaaagataagcaattcactagagatgtggaatgctgtttcctaaagcaatatcaatcctggatgtggttatgatgaaaagctagtagtcatagcacagtatgaacaaagtccagaaagaatactctgcccagagtcaaatctttctatcatactcagaggcgagctacaaataagaaaggaaataaacgctcatttcctctgtaaaacagaggatactttttctgtaaattcctttatgcacagactagggactgatgccattgacacagtggggaaatgactccactcactgacccactggggatgcaatcctaacagttatacttatgtgttagcaaggatcttcactgcagttaatgaatgtcccaattttgagagagaatagcttttctggttggcaggaatcaagaagtgcatgctcagttagtcactgctcctcatctgaaattccttcaacctgaggttaggagcatttatctaaataccaggagtccactggaatcctccagcctcacctcatgccagaaagagtggatcaatgacacattctggtcaagacaaaaagtagctggaaattaccatcacatcatagcactgaaaaaaaataaaaacgaaaaaccaaaaaactccttgagaattcccagcttatcacattatctggccatgaaagtttattcatattccaatattttccatcagatgcctcaaatcctttaagaaacaagatggaaatgaagggagagaagggggaaagagaatgagagagaattgactatgtgac

SEQ ID NO: 38537 - DNA, 761 bp, Homo sapiens
tgagagcatgttgggtttccttttccacttgaaactaacatgtttaccctgctgatggctttggagttgctaaaaaattatcaatatttgttgtttgtttcataaattaaaaacctacttgctcagtcctatcaaagctgactacagataatgctatatttgagcctaaagataactagcccctctatctgtccaatctttctaatcttaataacagaaacagttacgatactaagaaggcacaagtgagtcacaggaccatttttcccctgacattcctcttcttttcctcttttccctagcttaccacttgtgcaactctaatctagagaagggaacagggaagtagttaagcactttgttctctttccaatattgacttagagaatgaagcattatggtccccaaaagacaccaaagacaccaaaatgctcatcttaacaccggaattctggagcacacatctttttctagcaactcacaaacacatactaaaaccacacattgacatattaaagagaggaggagggagctgtggatgccagaccagccaaagtgtcagtgttaaagacaaagtgtcttgacagagaaatacgtggtgttattgggtgatatattaacttcccacaagccattgggtgttaagaaaggaccaacacatcaaagatgccgtagtaacattctaactagtctaaactcgggaatttaaatagcaaaatttgtattgtaaagagcctaaattaatgtgttcctggatgcca

SEQ ID NO: 38538 - DNA, 1809 bp, Homo sapiens
taggtcctgttcacgtggatggccttggagcgggcaaaactcttccttagctctttctgagaagctctccgctgcaggttcccatcgcccctgctgccaccggcccagctgggactcaagggaaccccaccacagtccccgccaccgggaaggggctggctgtgggcagagccatttggtccagtgccaccaccaacgctgctgccacctctgcaggtgctgtgagccaagctgctggtaccagccaaagagggccttggacctaaagccccctgaccctgactgtgcctctgcagccacttttcaaccatctcctgcttccccttccgcatcaagtaatcttcaaacaactctgggtgcctgtccaggaaagtttccacctccccaaagtccaggcgggaggctgccatggtcccagacagctttccttgcctgtttacacgtgaaccaaatgttttcctgccccgaggcctctagctgttcctgcacatgttcacccccaccagtattcccagttcagcgccacctcccctggagattattcccagcagtggaatctgggagatgccccttccttctctggctcagagtggctggcgccgaccccaccccgtggtcctgctactcctgctccgcacaggtgcccagcactgagctgccgccgctgccccggctcctgttccggaaacccgagctatcgctgctcctgttctggctgccgccgctgctgctggaactgctgctgtaaccggatgagtggaccgctgtgacagggaggtagggcaggacacgcccctgagtgaggcacggagcctggagggaggagagaagaggagggagccgcggacgccagaccagccaaagtccacggcccaggctgccaggcggttcctggaagagtctctggacggccggaatcggcgcctgggtacaggactcctgattggaacacgattagaagagggaaacgcaccttgttccttccccgcttcttgctcccttacctccccaaccctccctactcaccgcgccccttaatccgttagcgtttcgaggaggcccagcgggagcccagtgggagtccgagatacaagtgttgatgttttgcagggatctgaacacagaagcggactccgaggaatcgagagtgtcgttcaccctcagagacaggcagggttatttttctgggatgtgactgtggattgttggttcccaggattcctgggacttgctcactaacactgcccagcgccttgtgggtgctcagtaaatattaatggaatggcatttccccgaaaatagcaaataaagtttccgatgtgagcaattcatgactttaaccaaattcatgtacctggggcagagacagattacacagagaaagggtgtaaaacacagtacagaaaaagagtttaccaggtagaggaagtaagtgctgaagagtctggagtatttaattaacagcagggagaccagctaggagacagtaaaccaagcatagaatcctggtaatttggagctgctggtttccaagaaggtgagtggtgatcaagatttaaaaagaaaaaaaacaacgtttagcatagtgcctggcacataaaaagtgctcagtaaatgttagctgttgtattacttttgttattattattattctaaggtgacgatgtatggaaactttactgaatgtagctatgtctctggtcacttgagtgatctatcagtaaagatggttagtgatatgttgaaactggcttgtaaggactcacaagtgcctattttaaaatctctttccaattctgtattcagtca

SEQ ID NO: 38539 - DNA, 1569 bp, Homo sapiens
tctctcccactgcaagaccccattgcagctgtccctggacctatctccatggctccctttgtcaaagtcggccttcctgtaccatctctaacgagtgtcatgaataattttttctttaacactggaaagaatccttggccttaggggtggggtaaagccagcgttgggaaagcctgtgcattaggcagcgctgttctgcctgcagggaacgattgcacaactgataacttgggcctaggctcagctggatttgaggatttgagacttagactgggtcagggtcccccgcgtcgccagggggcgctgcaggccgctccccggaaggcctcatcctgcgcggctggacagcgcctggcgccggactcctctttctcccggaagcggagcaccgagccggcaaaggcttgggtgtgagacagcagcggtggcagacaccgcagaagcaaagagcagtgaggctcctgcattcgggtggagcaccatggacgaagctggcagctctgcgagcggcgggggcttccgcccgggcgtggacagcctggacgaaccgcccaacagccgcatcttccttgtgatcagcaagtacacacctgagtcggtgctgagggagcgcttctcgccttttggcgacatccaggacatctgggtggtgcgggacaagcacaccaaggagtccaagggcattgctttcgtcaagttcgcccgcagctcacaggcctgcagggccatggaggagatgcatggccagtgcctcggccccaacgacaccaagcccatcaaggtgcgggtgcccgggtcggggtgccctcgggggaaggagtgggcctcttggacctcccttcacctgctgctctgccggggtgagggaggagtggaacatccgttcccggcagctgaccagacagcacctggcttggggacaggggctgctttgaggagaggctcccctcccacgaagctgcgccgggttgcagggaaggggacgggatgcggagtgtttgccccacgagagcggacccggcagccgcggccaccgggtgacagaacagcagtggctgggcttcccctctccctcgccctcactaatccaccagctcttgagttcactgccaaactcgtcctagcctactttgagtacttttctgaccttcctctctcagatgcccagatttccatatataaaaaacggaaaaactctacttttcctcaggtacagatgaggcgttaacaacttgacagaagtactttaaactggggagggacctctggtgttggacgttttcctagtaccaggcgaaagaatacatgtacagaaagaataagtgcaggtgtttaaaacggtcactgttacatattcttcacattttgttattttggaaaattgttttgaatgagctctgtttctgaaagtgttaatagcatacatttggttcttgaccctttctgttactgcaacttttctttgaaagcagaccaaagtaaactgccttaagaagagccaaatcattgtgataatgacacatggcaggaaggatcattttgagggttatttgacataatatgtgctgt

SEQ ID NO: 38540 - DNA, 2267 bp, Homo sapiens
ggtgagattggagattcaagagaaactgcatgtgggaaggagtgcataaagtcgactatgtttcatagcaaatcattttgtcagcacagggcacaatgaaatgccatcacagttgcctcattagtaagcaatatcttccatttttgaaggcaccccagcatgttctgtaatagctcccattaagtccagtcgatgtcctctggactccccctccgcctcccacccccagatgatgatgacacaaatgtcttgaaatattgacatgtccgcagtcactcgtttacagaatgtctgtacaaatatttacattaccccgtccctcccagcaaatttgcctttagattaatctgcacaccgaacgcaggccgggagtggcttggagtgtggaagggtttaagggtgtggaagggttgtagtgaggcgggactgactgactttgatcggctttgccaggggcttgaaggaaccggctcttcctttcgcagaacccaggtgtttctctgggcccgggaagtttttgctcccgagcgagtcagggacgggagcaggcacgcacagtcgcgtaagtgtatgaaatgacgacctcagaagggcgcccagggacatgggtttggcagccccgagcggaggccgccaggcagccgttcctttcggaattcggtctcccgcagtgctcccggctgcggcgctcctgggccgagcgctggagccgttctgggcaaccctcccgagcgcggccggctcacctccgccggactgcgcggggcgagggctccgctactgcgcgcaggcccgcggatggcaactcggggtttccactgcgggtgatctcgggacaccacgggttcccacggaggccgggccaggggagagccctggctgtgggaccccgcgtgaccagggcgcagggcgccgggtccttagcccatctggcggcgcagggaggggcgcccggtagggcgggtgcgcagcatgagccccagccgcttgccgctccactccagccgggcggacgggcgggagccgggggcggggaacccggagcgccgccccgccagcgcgccccgcccgtgggagaggaggggctgcagcgcagcggaccactggaggcgcagcacggtcgccgccgccgctgtcggtgctggagatcgcggctcggtgcaggcggcgcccatgcctcctctcctccactagcccgcgcgccagtccgcctgccggggccggctctccgcctcctgcctcccgtcgcagccgcgcagccgccgcagagtccgcggcgccaccgctcgccctccaggtaggtgtcctagctgcaaagggattgcttggggcgggcgccaaggtgcccgcatcgcggcccgggggcattgtgcgcctccggcgggccgaggaccccgagggacgcgtgggtgggcagccgcagcttcgggtccccaggacatcgccgtccccctggaggcgcccccggccgatagcccgggctacagggaagtgggggcggcggtgtcagcccattctcgcggccgggatgggagggggcgtctgtatcgcggtcccggtttgccgccctccctccccctcgttgccagggaattccggccgcctgccactagcgctcgcattccctcgcgcgggccggcgcccctgctccccgcaggctgcctggggattgaagcaggggcagggagaaggactgatgtaattgtcagcggaaaaccgaaccggcgcgggtgagagcgcccgcgcccgcgagagctaacgcctacgccgcacctttcagggaatcggggaagccgagaggagcggctggggaagttgtgcattgggttttattgtgcgcgtgcactgcggactgccctcgcggggcacccctgcccacccgctgctggcgcccctgcagccctcccggcagcctccgtccactcccccggccagggccaagtctgccttccctggttcagaccgggacagcgtttgcattgcagtcaagacgtgcttcccctgcatcaagccgggagctgcccgcagatcgtgtcgccggggatgctgggggaggagggaatgggagacctgaggagaaagcctggagaagtaatgacacaagcggattttctccccaaagcttctgctgcgtatagacacatctgcaaggcaccttttaagctgtttttgaaagttataaccagatactgattttgtgacaattctatgatatacctgaacggttgcttaaacatagagacctaaagctaggggaagcattacat

SEQ ID NO: 38541 - DNA, 1183 bp, Homo sapiens
aggaaacacttggtggtcttaaacactcacagctgaactctgccttttatttttcccccttaaccaatattatttgactcctctgacatcatctcaaaagtacctgccttttctttcttcactggttcccaggaacctttctatgtagttgtctagctgagcagcctactttccagcaaaatgtaatcccaattcccacatctctcttggctttgctgtttcctcctcctctttcctcctttcccagtgaatcagcagatgtggatgacgtcatctttgtatttggcagtcacacgggtgttaaatattgccctgccaagagtcaagtgtggcgagcctgcttctgcagtttttgctcttatttaaattggtggaagtttgcattgaacaaaaaaatttgaattgtgatactttagttttaaaaaaacaccaaagtcaaccctggaattagatttgaattaagagtcccttataacctgcagctgaatcaatggttgatgcagtgattttataccatcttgtagtgcttttcaaaatactaccagttggccaaaatgtgagcaggatatcgatgcgttaagtttttatcaaagaaatggtggatgacctcacttaatcatctaaggcctgtccaaaaaattaaaaagctgtaaatttaaaattgttttcacaagacagctatgaagcaatagtcacaatatatatatacacacacataaaaccttagaaaatgcagccatatttttttcttatgtaaagtttatttataacatatatttaatattttaaaattatatatttcatatagtagcacatttttataaatatatcatttataaaatataaacaacttgtatgtaaaaatgtataaaatcaataactctgtgtagtcggttgatagcagacttctgtacattctcagtatgtaatttgctgtagttaagaatgagcactgttcacagttcttagagaggccctgtgttcccatcccattggcctgctccttgacatgggagtggaagatatccagaggttagtgggaagctgggaatgactccttcaaagaaggtaggacagttttagttctcaagagtgaaatggcacatatgcttcatttctgtttcacttaatcctaccacgtacctgaggaagtctcaaaggcatctttaacttctgagttctt

SEQ ID NO: 38542 - DNA, 569 bp, Homo sapiens
aagagtgaatatcaaaactcatttacgtaacaggttttgaactgaatagccagagaaatctcatctgtgaacacaggactgcagacagtgggcagctgtccagtggtctggcaagaacttactgttcagcacagccctggagcttcatgtaagagtgaagtcagcctccacttggcgatccaaaaagcatttcagttactgccaagtgccatgttaggacttgtcaacttctgcccaagtagtatcagactgctgatgtttggatatacttttgttaatctttccctgtcttggcacttgggggttctgttatgtatcagactatgtaatttttgcattttggtacttggatatttagtgttaaaggcatattagagatgatgattgaaatgatcactgtatacgcagatcttgaaagctcttgatccaaggccccagaggcaaacagtattttaagtttgcagcaggggaaagacaggatcagctatcttatgatttatctaatttggaagtatattatcagttacctcaatgggaaggaagcttttaatgcaccaccgttagtagct

SEQ ID NO: 38543 - DNA, 430 bp, Homo sapiens
gtactgttctccacaggacctacatcattttctattcccaccagcaatgcacaagggttggttcaaggacatttttaacccaagtcattttgtctgctttagccaactcctcagaatgccttgactcagtgcagaaatggttgttttgacaggaaattgctccagagaacaggacatgtactgttgaaatcatatagtgccttagtaagaatttgtacacacctagggatttatgagtcatcatttaaggtcacaaagtagggcaaaatattttgttatgtcttattgttgccaaaaagtcttagcactgtgctgacaattggtatctgttagcagtcattgaaaccatatttcccagtattatttttctgttaaaatatgagctatgacattatctaatctttctttcaaaacatgttggcaaaggcca

SEQ ID NO: 38544 - DNA, 2128 bp, Homo sapiens
gtatgtggggaagagaaaattaggaagagaatcagatgcagctgaaaagccctaacgacctgagatgagaggtctcagtttcagagcctgttcctcacagctgtctggcaaaaagagaacttttccgaactgaaaagcaacaccaagtattgactgccaacccactcggtcatccaggttaactgtgtatacagacctgtgcaggttatgtcaccaacggttactctgaaggtgaaagtgggcacgtgtatttgcacatcagatctttcacattcataaactgggatgttcttggtcttcatgccgtattcgtgtaatacctgaatcggtgttttccctggcttagctgttatcatcttccccaaactgcaaaaaccacaaaaaggtgtgctttgcatgccaaattggagattgaagcagaagcgtagaggccagttttaaccgccaccgacggtgacgagggaggcgccgagttccccggaggccagggccagagctggcgaggctggggcgcacctgtcttccggccccgctgcggcagtcactccgcaggagcaggcggggtgagcgaggtctttagagagagcacttgaatgcgggtaggagagattctcaacagaacagggctggcagcagcgccgcagcctctcagggaaaacctgacgatcccttcccgggcgcgccgaccgagcgtcacctccgcccgccccgcgcgccgccagggaccacgagaggggcggggcccggccgcagaccccaaccctcgccgccgagagggcggggccgagcacccacagccgcggaggcgtgggcgccgggcacggctttacccagaatgcctctggagggccggctccccgcgccccggccctgccgcccaacgctcccggccctggggccctgactgcccgcacgctgacctgaaggtcccactgtcctcgcgctccagcggcggggcctcggcgcggtgcctgctctgggacatggcgagaagggacggctcagcggctggaggaagagcggtgcggagcgacgtgctcgctccccgggtcgctggtccccgggaggagctccagcgccgccacctcctccgactcccccgcctcctgcttgcgttgctccagcgagggggcaggcagggtgggggcggagccttggtgccgtagctccggctacgccccctcgctgctcctctgcgggcctccgtcccggcccaactccgcccctgtcccttccagggtccgcccccttcccgcccggctccgccccgctcccgcgtgggcacaggcattgggctcccgggggttctccgcgcccgcccctgccggccctgaccagcctgtagtaactggcccctaggccgcagttctttgtccttagcaggaggccgtttcttgccgggagagagggattagagggattgtccggcgtgggtctagggtcgttgaggcctaaagttaagcctttgtggggaggacggattgggggctgggtcactttaagaaaaagattctaaaattacgaaggcagaattccagggagtctcccgggcctggtcctgaagcttgagaccccggatatatacgctccagggggctgcggtgcgctcttcgggtccccgagccctgtgtttaggaacacgcggggacgtccaaacacccgctcctctcccgccgggcgggctcctttgtcttctgggctttcgtcgcgagatggaacgctgggtcagtgcatcccagcaaaacacgttaggagtaaacgaaggcctttccggggacctgggtagtcggttgtaatggcgtttgcctgggatgcagcacctttggtgggccattagatgacgtgtcgcttctccaggggcttgctaggcactagcagaaatgctcccctgtgcttactcggtgttatggaagattgcttgcacaatgctattcgtacgaaaggatattattaaaagtgatttatgggcgggcgcggtggctcacgcctgtaatcccagcactttaggaggccgaggctggcggatcgcctgaagtaagcagttcgagaccagcctggccaacatggtgaaaccctgtctctactaaaaatacaaaaattagccgggcgtggtggcatgcgcctgtaa

SEQ ID NO: 38545 - DNA, 870 bp, Homo sapiens
ttaccaactttctagcccactcaattcagacccttgctagctcttttcatcatcctatgaggcgtgaattatttgccctgttgcaaattcttacagtgctgtctgaaaaagagatatgctagtgtaatctagaaactggaagagcactgtagagacaaataattcgggattttaatgactctcttgcagggagaaaggcaattgaacaggatgactcacaaggtttatactgaaaaagcttagagctttttctaagcgcttagattattttttagtgaccagctctataaaagcagtgatcagagcccatgctagctagacctaaaaagtaatagttgtaacacagatgtatttaaactgtgataaaaaaattagactatacacatgaaattggtttgaattacctcggctttagagagctgcctgtcattgtccatgtctatttgtttaaatgtctcaatgctccgtggtcctttggtcacagcataaagttcaatctcaaaaatcaatgtagcatccggtggaatcttgccttctgctaagggtataaattttaacagtttaacttatgtaaagatatagttcaaatatctattcatgaactgccataaccatattatattatttcatgttgataagaattgctatctgaatactcacaatttttaattttttctcatcttttataacttttttcggcttttcaatagttttcttttttgtttttttttctcttttttttataaatacttttttaggaatattttttccatatgtttccaaaccaagtcaattcaaaggacctatgggaccactatttcttgattaatttaagtaaaaatcataaactttttattaatgcatggatat

SEQ ID NO: 38546 - DNA, 1669 bp, Homo sapiens
cctctgagtaataagccatcaattaaatcagagtaggcaccaggtggaatgagggagcagggcccaccagaagtcaccagggaagtaactgtttttcttgatagaaagtggccacaacctataaaaatcgtgcttctgaaggccagaattaaatctctttattccatgtattcctccgtaaagactcaatacttctggcaagggaaaaatgtgaacatccttataggcagaaccttgatttaattctggaggtcccaagggtaatggtggtggttgatgtgtgtgtggatgtatcgtatttttgataatttattgccacaacattttcaatactttaaataaaaatattcagtttattagagaaacactgccatataatgtgattttttttaatgaataaagggctcaacttttaccgttaaaaaataaaaccccaaccaaccaaccaatgaggcttccgcttggtggaggcaggcaagattttgtgcaactggacgcacgggcagctcgcagcatttcctacctgcagtagaatttcgagccgtctttagccaggtagccgtcataatgggcatttagtaggtctcccttcttgcttgtcttagagcagttttctggacgatgcaaaacttctattttcacttcttcggtgctctcctctttcttttgtctctgagcagtaaaaaggccccacagataaaagaaaacaatgaatctgaataagaaatgcatggtttttggcatcggctccagcagaacactgctctccctcccgcgtgtcactcgcgccccgtggatgtcccgcggccgagttccgacgcgtggcaggcgttgtcctgcgtcacaaagggccggggcggggccatagatgcggccccgccctctcatggccccaacccctccgcctcccgcagcgggctcagcgcggttaacgctgtttctaggccctcgggctggctgtcctcagtctttaagatcgcaacgcacactcgctccgcttcttctcgctaaacccgcgtattttacagcaggtttcctcagggttcggtgacaacattcgcattttctaaaatgaaactggcataagacgaaataaacagcctgggatgtcgtagagtcagggaatatggttgtcatttctggaagcaaaaggcttctaagacccctagggaacgagcagatagatactggggggagggagaggcatgctggaaaaggagcgtaaaaaataggctggcggtggctttctgggtgcttcggaggtgtccttgaagcgcattctcaggtcggaatcttgcattcagaggttccaggctgagtcgcacaacctgaaggccagcccgatgcaacgaaactgcggtaccgcaactcctctgcctggctgcaggcgtttccgagagccgacctccacaattcagcatcctccgctggcttgcatttcttttccccgccactcggggccgcccttgattcgagggcctctggtagtgcggggaatgttcttttgacttttttgtaccatcccatgggatacgtaattgtccacatcagtcaagaaaacttgagtattgggcatgttgtcccaatctcacagctaatacgcagcagggatttggtcaaatctgtgtgacaacaccacttcaccaccaattttagtatgaaaaccttt

SEQ ID NO: 38547 - DNA, 671 bp, Homo sapiens
cttgaatatgaggaaaatacgaagcaaacagaaataggaaggcttttatgtatttttgaagaaaaaacaggattttatgtaaaataaaaacaggatttcatgaagaaacaggatattatgtatttctgaagaaaacccaggaaaacccgagagaactaagtgcccgcgggatgagtgtgcgggcagctcctccttaggtaggcaccggggctgcgcgcgcagcggagctcgaaggtcttgtcccccgggggcggtcagcctgggccttggcggccaaggggaaacttgggagcctcgggactgttggccaccggcccgtgggaggagtaaaggcggccctggctggcaggccgagggtgtgacgcgccggcccgccctcctcgcgcagcctccggctaggcggcgaggccgcaggccgcgcccgctccttcagccccgccgccggggaggggtttcccgggacgatccggcccctttcatccaggaagtgaaatcgacgtcggggtcaatgaaaacaaacggggagcccagggggaaggaaggcaggcgaggaagaggcagcgccggggcgccggagggagcagccgggctgcggaagcgcgagcaggaggccggtcgcgggcgcatttttgccgttgtcgcggccgccgccgccgaggcttacccgggaa

SEQ ID NO: 38548 - DNA, 1040 bp, Homo sapiens
gacgagaatgtcaaagaatggagaagttgggtaacctgccccaggtgaagtaagttagtaaacagcagttcctagatttgagcggggccctcagggttttgaatgcagacatgtaattgcaacatgattcggctgatcatgtagccagggtgtggggtttataaaatagacgtgaataaaaaaaaggggcaggatgacagtgaagcttgctcatgggttttgtggagggcgtagattggaaccaaaaagcacgcctcggcttggtgctccctgtcgccctctgttgacatggggagagaagagcgggtctgactcggaaatgacgccataatgctgaggaaccactcctggcgttgcggaaggtggggtgtggggccggaagaccctccccccgcgtcttcagaggagcgctgtttctggaggagttaggggaaggaggctgcctggtaagccaggaaaggggcttctggccgttctgttggagcgcctctgactgacttcccccatgtgtccgtgtggccacaccgtgctactttcagaggcagtgggcttttcgctaagggataaaaagaagtaaaaccttgcctttagcgcagctctccttcactgggcagattgctctccctccccactctcccaggcccaaattggatctcagcgcctgggagctccaactttagcaagtgcgaaatcctgtcttcggttttggaattttcatccgcacagactatatcagccacggataggatatgtgagaataccagcatgtcaaggctgggaatcatccttaggcatcacctagccagtcctgcctctcattttaaggtaagaataggcatttaacattgtaagatgatgtagtgggttctgttggcatcacttagatgcccaggaaatgtgtattcttccatcgatttctcgattgttcactgtttggctgcgttagtccacggagaattgtcctggccaacaggcacccctcttcacttgggaaggtttatttccctcttccatccctcctcagcccctcagcttatagc

SEQ ID NO: 38549 - DNA, 912 bp, Homo sapiens
cttcataatcacatcattggtaacaatgggtttagatcagagtatggtttactcatcactgttagtaaggtaacttaattgtcatgctcacgctaaggagtacgacactaataataccactccgtatgtcagctaataagataacgaaataacaaacatgttaagactagctaacacatgggagcaatagccaatgtaaatttgtataaagtgagaagtattcaatcttctacctaacaatgaagcctagacctgccatcaatatcccagctggcaggctgagcagtttcatcaacatcaccaatgagtcaccagaactgaacaaagtgaccaacaatgaggactgggaacaaagccaatttgacctaaaatgaagtcatcatttttgcataactctgctgggttagacatgtgcgaagaacagatgccaaactgccattatatattaagcttacacaggagcaaacaaatgataaaagaaaaaaaaaatcctcaaacaaacaaaaaaacccaaaaaaaccaaaacaaaatgaaactaaccctgccagcgtttcaataattccctgagatgggctaaaggaatgtgggaggttgtgacatatataccaattacaaatgagtggttctttcagagacttgcaagctgatgttaatttatgacatagaaacagcttgtggtttcaaacacactgcagtcacttttttcacacgtttaccttaagtgagctttgaccctatggaagaaagttgctttagggcattactggattttcattcataactctatgtacagatacacatatgaaagcagcagcaaatttacagatgaggagcaatgatattcattatgttaaaatcatacttggcctcatgtgaaacactcaatttacaagtaacatttatgaatcctgc

SEQ ID NO: 38550 - DNA, 1110 bp, Homo sapiens
tgagttgatggcagaattactaacaaaccagttcctttctagcaaagtcttaagaaaaacattctaactactctgaaattcagaagaaacagatattgagtattgatatttagttattgagtataactaaatatctaaagtagttagtatctaagaatctaagaatagattcacttgtaagtcagttctaactttaaaaaagtatgtttaaaacatacttcagactgcaatgtaacagggattattactaatgcctataatacagcattcatatttaggaggaatgggcatctgttatgcatgagcaagactgggaataggagaagacaagattccttccctcaaaagagcttactgggtacagacataaacaactgtagaatgtgatagcaccatcatgaagactgaaataaataatcacaaaagttcatactcatagcagtaaagccccaaaggactgagaagatgattcaagtatagaaagaacttcctggatgttctcagaagcagtgaccacataagacaagagggagcagttgaactttgccctgaacttcctggcatgtttgactaggaaaaaaggctgcaccattaacctaaattgttccaggaggaaaaggtgataaatattgtcaatctttaatcaaggttgaaatgtcaactaggcaattaaaaagaagtacaagtctagatttctggaccaggtatgtaatccagaacattggtataaaataaaaactctaaggatgagataccgagaaaagagccaaaagcattctgaggacaggatctgagagagcacatgttcagcaggcacatcttaaattagggttatgcgactgtactcacagttatttcagaggatagcatcttcaaggaaggagacactgtctaggaaaggttgctcaatggtgtaaatgttgcagagaaaagggtaagggattcagacggagaaaaaaaccattcagtttggtaactgggaggccattgctgactttcaaaagaacagtttcagtagagtgctgtgtaaaaccagactgcaaggtgctgagtagtgagtgatgaggatgtaggggcactggatgtggatttctccaagaagtctgtcag

SEQ ID NO: 38551 - DNA, 641 bp, Homo sapiens
ctacttacatgccaaatgtttacaccagttttatcataagaaattcaagagtgtctcatttattaatcacgactaatgtttgatttctctgctgtagcagtaaattatttattatctatatttgtgccaactatgtatcttagtatctgacaaaagtaaacacttgaagtgagattaagactattaattcaacaaaagtctacagtatcaatggattatataggatgctataagctctgtactgttcctgcaaccaccttttaaaaaaatgaatagagaatttttttttaaatctttgagagaataatcctgaattctgttatttcatattgtctacagaaatttaattactgccacaaaatgttttcttccttttgcaaaccagctcatagttcatataatgactctcctggatgagtcatctgcaggaagtacaaggttttttttttgaatctgctaaggtaaagactttgaagtataaagttaaaagctgcacagctggaagcattctgggaaagaactttaaaagtgactgaaaccactggtattcacttatattttaacccagctacacattagaatcatgtggggagcttttaaaaaatataaatgtgagagccccagttcaaatcaactgaatg

SEQ ID NO: 38552 - DNA, 463 bp, Homo sapiens
tcaattattccattcaattcttattcacaggggctaaaatgtttggtaaatgcaatcaattcatttttctaatgctggggaaaaactagagtgggcccaatttttaaggttaaatttagtccagaatgtttgaataaatattcaacaaaacgatttcctggaatttggaacataaaaacagcctatagagttgtgaaatgctttctaggtccttggggaattttttcacgtatttagtcatggggcaaagtattacgtataaaagcttcctggtcctagaacaaagacgtattttactgctcaaagctaaaggaattagtattgttaaactaaaatagcataccaatgaaaccagctaggtattggcataacttaaccaaggtatgtaaccaaagataaattgtaccttattatgcattcttccttgggaggaaaaattctcacattaataagatttagccag

SEQ ID NO: 38553 - DNA, 2136 bp, Homo sapiens
cagaaaaagtatatagatatatgtgtgtctgtgtatgtaggtatgtataaggattaggattttgagtggcaatttaaatttgacggtttgccaagctatgctgggatacatagtgggcatgcttgacacaagcaaaacgtgaagtaagagacgacctgtcaaacagctgctatctagttactccctcggcagcactcccaacttctcccgcgatgtctgtgtgtaagagaaagatgtcaaagcaccaagaaaaccacgggggctgtcagagcaacagccaagtccaaaccgtgcatcccagggtgaaatcccacccgtaccctcaagagctggtcagactgcggctcttttctaatatgagtctacctaaaatagaaaaataaacacaaccacagaccctggccaaccctctctctcctcccctttgtgactctcccaaacgctggagggatgttaacctctggcaggcccgtggaagccaagccccgcgacctgaggaggcgtccaggagcctcggcgcagccctggggcctcgagcccgtgtcctccacccacccgacagggccggtcaccggtcacacaaaggagccagtcgcgggcgctggacgcgggactcgcccgagagcagggagccacatctggttcctgcacgctggcaaaagagacccgctggaaaataaggactaacgcccaaacctgttgcacaattcgggtccctttcacccagaaatgaacaagggcgctcaggaacggaaaagcgcgcggcccggtctctgcgggccgcggccgcacccggcagacggcgcggaggcaaaggcggcccgcagggctcccacctccggcgctttgtctgtggcggcaaggcggtgggggcggtcggggcgttgggagcagaggcggtggcggggcgggggcgcccctccttcactgcgtagcccctccgccccgcggcccgcgcaggggaagaaagccgggcccgctaccgccgccgccgccgactgcaccggcccaagccggccacccggccgcggggcctgcgcgcttctcccgcccgggccgagcggcggccacactcacctggctggcgctgacgctagcggccggcggctccggggcgttggggaagacaggggaacgctagcgaggtgcgggcggaggcggagggcgcggcgggaggaaggcgggctgggggcggagcgggcccgggcggcggcggcagcagcggcgacggctgcggctccagtcactcgcggcaaatcgcgtcccggcccctccgtgcgtcaggcggggagcgggggtgcgggtggcccggcgacctctcggcacccgcggcccgagccgcgtccgcgcgaccccgcgcgcgcccgggtgacggcggtacagcaacccgcccggcgcgggaaggaggaaggaggcggggcggggcggggcgtccaaccgggcctggggctgagggctgggcgcgagtgggactctggcgctccggacggaccctgccgtccccacccctagccgaggcccaggctccccaggcgggaggcagtcttggagagtggaagggtacctagatctggagtcagaagtctgggcttaagagagggtccgttacttgacaccctggcaggtcatttatttcctctggcctcatgctggagttcgaaggttcgagtacaaagtctccaagagctgctcccaagtactcactgccaagcggtggtgtggctgaaggatgaaggcagatgaaagggaaagggttgcggtgaggaagggctggattcagggcatttgttttgctttgaggatctttccactggacagtccaaaattaatccacaatggggctccctgataatggctacttccccatttttaccaacctagttatttttctccaagtatactgacttaagagtccttgttttcattttattgcgcaaatcatttgtatgtcatttcctgaattcagttcaaaagagtcatcagcaaattcacaccagatcagagcagctgtgtggtcccaatttcaagacttccatattattcactcagccactcacttcagtatcacctaattccgttgataaaatcttcctattccaacaactaagcaaccaaatttctctccactaaagtttt

SEQ ID NO: 38554 - DNA, 1240 bp, Homo sapiens
attcattgcaagttgtgtgcttttcaaagcctcacactggaaaggtgatttttgtgaaatattttattacccactcaaatgttaaaattataatgtaaattacttctagtctcatcattttatattaaaaacctatacttaattacatttttctggtttgtgaatgttcctttaaaatcctagcctagaaaaaatccttcaatttattcatgatgatggtagaaaaacacaattatatttgatcagaacatttttacttattgcttgcattagaaaatttgaatctaaaaatatggtattcagagctaaagaggtaaaaatacttgattgtcaaattcaatctgcatagtgaaatactcagatctcattgaaaaagtattagttaagttacagagaaagctctttggtttctgttacatgatatttcaatatggggctgggtcctagatattagtaagacagaaaagaatgttaaaaacaagcttggtccaagtcataaggttctctgttgtttttctaatgtgtgccagttatcagattgaatacaaaggtcaatatttatcttagccatcaagtaatgtgttctgctctggactctaacactctaggccagggactaaagtgttttcctcctagcttcaattctctggtggtaagaaatggttctcttgtttatctacagttttttgtttttttttaatcctgtgtttttggacaaaatagggacaaaccacatttaaaaataatctctacccatgcccaggctccttccactctgtcactccttccagctgccctggagaggtgtgtacaactcttctgttaacgagcagcttaatggcagctcgtgagaagtctcattgcataaagtcggaggaggcactagcaacacagaagcagagttgatttggttgtgggataaagtagaaaatggaaagaattgccttttgtatcagtctaacttttcctctccttctgaataaaacattattgtgtaacaaagggcttttaaacaatttctttctttcttaagttggcgatttgacaaatacagattgtgtcatcctgggttaaagccacttcttagggtgtggagttacttgattccggcactgtggatcagtgtgctcaaaacatctgacaccagctagctttatgcctcattaatattgtcttagatttagggggaaaaaaggaatgaagagtaggtttctctttggggtctggaagaaggggagcc

SEQ ID NO: 38555 - DNA, 1873 bp, Homo sapiens
tactaaaaatacaaaaattagctgagcatggtggcacgtgcctgtaatcccagctactaggggggctgaggcaagaggattgcttgaacctgggaggcagaggttgcggtgagccgagatcttgccactgcactccagcctgggcaacagagtaagactctgtctcaaaaagaaaagaaaagaaaagaaaaaaaaatatataatgtctcatagtagtaagtgcactaagaagaaaaataaagctggtcatggtaaagagtcagctcaggcctatctgaagaggtgatattgaaacctcctttgcaaagattgagacagagatatctaacatggctgactccatcttgcttctattctcacaggctggctgtcctcactcagtcctgggtgtaggccaagctaaccatggcaggaatttagtttacagtttaactttgaagcaaggatgataatagttcctccctaaaattgaccctccctgccttgttttgtaagtctactgaaaggtgataagattaagagtattaaaggggcctgaattctgctaagatataggtgtagttaaacgataaccagccattgtttcttagcttgcttttctacaatcccttactgctcagaagtcctgtggccagaagttacaagatttgtgactttcccaatctttcttatagacaacatcactgttgtagaacctaagatgggttttttgagatgtttttcagacttttcaactgactgactccactcagacccatgactcatgactcaaccagtcctgtggtcctgactcagaggctgactcagccacgaggacagttttccatacctctacgatttcattgccaaacaatcagcatttcccattccctagccccctgcccatgaaactatccttgaaaaactctaacctccaagctttcagggcagctgattcgagtaattactcccatcctctcacttggctagccttgcaactattaaacttttcctaccacagtactgctctcagtggattggttttatctgtgcagcaagcaagatgaacctgttaggcaattacaatatttaacagatatgtgaatgaaataataggagttctgggagaaagagtgttccaggaagaaagcatagtaagtctaaaaaccttgaagcgggaacaaacaaggacaagaaagtcagtgagactggggtctgattgcaggatgtgaggtggaggagttggaggcaccagatcacatacagcctggtagagcatgagagaaatttggatgtaacataagtatgtttgctgagtaggggagagagatgatctgattcctgtcttcataagaccattttgcctcttgcgtggagaatagactgtgaaaggataaacatgaggagatcagtcaagaaacgactgcagttgcccatgagagagctaatggttgcttagacaaaggtggtagtggtagagaattgagcagtggtttcagaatatatttgtatgtagaaccaactagacttattcattaggtgtgggacattaaagaaagagaggaatcaagtctcattaccatggttttagcatgagcacttgaaaaatagtgggtgatgtcatttactaagatttgagataacagtatttaggatgctaataaaacttcctggccttttagccagaaaaacctggctatttctaattccatttttgactgattgagtcatcttaagcaagtgatttatgtgattgggaccttaatgcttacatgtgcaaaatactacccttttcttattgactttaagaaccaagaacactgtaaaagtgaagtgagggcttcaggtggaaaatgcaatggaaaggtaatagttgtaagaagtaagctcagat

SEQ ID NO: 38556 - DNA, 454 bp, Homo sapiens
tcacttggaacagatttcctttattttcctcttgattctgtatttccttaaggtttctggaaaagattcactttttcttctagtctaaatctcttcttctgctgtttattattaaattctatagttatatttttatatttaaatgtcattttgggggacatgatttagatgatttagttgaatagagactttaattggaataaaaaagaatgccccacttgtcactttatctgattttgaaacagacactgtcaagctaatgttttgagtatttgccctctgatgcaataactacaaatactcgagtcatttcaatgggatccaaatgtgacagtaatgaagagggctttcagatacctttttaaaaagtataaagtggtaaaattctcaatttttgttctcagcattagtacaatgctctaaaagctagataaaataactatgatgttaattt

SEQ ID NO: 38557 - DNA, 985 bp, Homo sapiens
tgttgttggtttttataccgaagtactatcacaatcacaacaacaaaaatgctatctgagaagacacattttttcaagtaatggcaactgaccttctatttgagatcaaagcagcaggcctatttagacctctggctctgtctttaggcctctcctctgcagttcacactaagagccaggctaaagggatctggatacagcaactctgaggtcagtgcacccagctgctgctataaattctagctctagggcacaaaatgttttttctcctagtttcagagaatttcaattcctgctttcaatgtctaggctgtggtatttaagaaacaaaaggagggaaaagaaaagaatagtggtttatacaaattatcctttttaaaaggatatttcccccatcccaagcctgtttaatttgagaaaacagagttaatatttgctctgctagtgctttctactcccactttggcagagaaaaaaggtttctttagcttaaatattaaccaaacacttcatagctattcaaaagtaggtgcccatgttaaaaataacaaaaaaaagtaataaaatcccagaaagcacaacttgggaataaatagaaacagtaaaatctgctctaaaccctttttgcatatgtatcccaaggccaccagaattacaatgcactatagagtgttcataaaaaattctagtaaagtatgatagtcatggtggccatcatagaaaaggccactcttggtcctctatcagcaaataagccattctcacccaggagcggcagagatggcttccacctggcagccaaggttgctgtgcaaacagcatgaaagcccctgttccatccctatggaaacctggtatggggtgcctgatctggccatgccaaggccagagtgagcagagactgtgagtatggggtaaaattggagctacaatgggaaaaaatggtgagggatgatctggagaaggaagaaagagcagtgagttt

SEQ ID NO: 38558 - DNA, 1234 bp, Homo sapiens
tttattagttatgtcatgtgctgtaaagttaggtctttttaaaaataaaaaatttagattaaaagctaaatttaagaaagttacttttgaactttttaacaattgtgctatgtgaatttttgaagttaaaaaaatagaaatcaatactctgtaagggaaaaataaaaaacggatgagaaagctttcaaggcttcataagtattttaagtaagctcagaggaaaaagacaagttgtgtgtcagcagtgccaaagttactcagatctaatgcctatgtggctttggataaagtcttaattttttttacatttcagtctctgtgaatacgagaactagaataaaaacaaactcaccaaaatgccataaaaataaggttaattatgagttctgacataacttgataaaaagtatagcattattattataatatctatttcattttctctttccacagaagggtatccttgtgaacccaaaggaatgactttcaaaatcactcctttactataatgctgtttaagatccgtaacaaaatctttactcatgaggaacgggcaaataaaaattaacaatttgagggtgatgatagaagtatgactcaggcctgaattaaggggtttgaatcctgcacataaactgcattttacaatagggaaaatataggtaaaccacaatctatttggggaaaaacaaaactgtacctttctgtggttaaaatacagatcagaagtgatactaatcagatagggagtattgtacttgctcagaacaataaatgaactcagtacaattaaatgaacttttctgtttatccttctcaatatttttaggagccagtgcaaacaacaaagtacaaagtctatggaagcagaatctaaagtatccctgtttggctctgagcaagatatttatctgctttatcctgaataaggagcagcgtgggctaaaaaatatctctgaataaacaatgataaaatctgctgggtaactactaaaataatgaatattgaagcactggcattacagtcaaatcaactgtagctacttacaggaaaagaccattaaaagccacaaagcctagaaactaactagatggaagcaatactaaggaagttaatctgaagtcatacttgtacattgaagaaattatattcttcacatagcatagattgtgaacatttataagtatggacacaacaacaactaactactgccttctcttaagattctgaaga

SEQ ID NO: 38559 - DNA, 1411 bp, Homo sapiens
cacaaatgttgatcattaagatgctcatatctcaataaaatccatatcataaattttataacatttataaacttgtaaagtgtttggagatctgtcaatagctcatataatttaaataacactttatcctaaagtccaataaaacataaattcagagttaaatttaatgaataggatttgatatgtgcttaaaaataataaccaacaattttgaacaattttctatgtagcagatgttttgttatttctatgcattatataatttgattttcattagaacactataaggtggactctattatttgcatgtcacagagaagattgagaaattttagtgagttaagtaacttgcccacttactgttaataagtgacagaacttggattgaaaccaaattttagtggctccagagccaaattcagctcatatttggtttaatgtggtttagaaatttgaaggcctggaatggaatctcagtgttaatcaactattagtcctaagaccttagagaaatattgaacattccaaacttcaattttctaatatataaaatagagccactgcaccatcccaatcattttcaccaaattaccatgaggattaaataaataatgtaagcaagaaaagtgcagagtgctctacaaacatcattttatcacattttaatttcttaacatcttataactcccagggtattctgtgggtccaaacactgccattaaaccagagatctcattagaaaaagagagtttaggaagccactaacgtaatcttccaccatagaaaactttaggcaggttgcccagaatggcatagggaaaatactagaaaaaacactcactctttgtgggtatcataataaatgaaagaaagaccagtgttatggactgagtatttatgtcccccttacccccataattcatattttaaagtcctaaccaccaacgtgactgtatttgtagacaggccaggaggccaggtaagaacgtgataaaggtcaaatgaggtaataaaggtgggccctaatctaatagggctagttcccttataagtagaaagagatatcagagcactctcttaacattggagcacacagtgagaagggggcatctgcaagccaggaaaagagccctcaccagaaactgaattgcctgaagacttgttcttggacttctcagtcttcagaactatgaaaaatttgttaagcaagtctatggcattttgttacagctgcccaagcaaactaatatagctggtatcatgttcatccgtcacattgcaaagagcagggccaactgaactctgtcgagctgccagctagggagcagtgtggtctgacaaatcacatgaggggctgacaacctggagttgtggcctatggaatgtaagaatgtcctaggcaaggttagca

SEQ ID NO: 38560 - DNA, 1836 bp, Homo sapiens
acggccttgtgttttctaatgaaacaaaagtatacttgcaaacaatcacagcaaactgggccttcctgtccttgtaacaataaataaatgagggaatccaattgctgcttcacttgcccccagcaccccagtcaccagccagagaaaagcattaaacgatcagaggtgggaaactattctgcctttccagctcattaaatcatacatcatttttacatgtaagccaccaggctataaatcacgtaagacagaatgagagctaattaaagggtcagctgagcatataatttttaattcctaggcacctaaaaactgagattgacaataaaatgtgataaaactcagaatcatttgctaactaataaagcagggattttcaagctgccaatttgctaagccaaatttcaagctgccaatatttaaagtaaactatgtggaatataatatttctatgataatgaactatcaatcatttaccctagcatacttcattacgatgtgcttggattttatttcttttatatttttggtaaggattacaaggtcaaaagaaatatcaacaaattgtgttctcatttcagattgaaattcactcctgacatagaaagtattattgttagttagtatttatatagcatctcttttctaaagcacattcaggaaaagcaggttagtagaaagaaattcacttgtcaaaaggaaaactaaaatggaataagaccaacatggccaaggtcactaaacaagtcagcaactgttttgaaagcaaagcctgaagagacagctgactcaccgtggttttccctcctccaaatatactgcttcatctaaaaggtattttgagggtattcgagtttacgcattttatatttgccctcctcacaacaaagtgcttgcatggttttaaaagaaaacactcattatcttacttagacacaacaataaatatcaagcctattttccttttaaagctctttatagttataaaataaggcgtgtaatctaacacatagagaacagtagagttagatataaacactaaggttatttaaaagaagaaaggtaataacgttctatcatcactataatttaataaccaaaaaaataagctgcattttcagagttgttgcattataattgaaattttatcttttaactttaatactacttcagaatcacagctaaaagaaactaaaattttaagtgcacaatatacctacaatttattaattctttaaaaacataaatctctgatatttcttattcaaggcccagtgtagaaaaaaaagtctttcactctggaatacagaggtgaataaaataagaattcttgtgttatacagatcaaggttccaatgctgtgcttgtttttaaatcctttttttcaaataaaatgataaacatttctctccatgatcaaataactatgggagactaaaagaaaccacagtctgagaaaaacatattcaaaagattacttggatcttccctaatcacatgtcccaagcatgaaccactgattacaacgctagtacttcagtttgtacaaaacaagaaagcctgcacagcaaatgctgcttatacaatagatttatctttttacccctcacaccacaatcttcatacacatggagcgcctaacttctaatcacatggaaggtgtggttactatccttttggttactattctttgctccacatcatcccagtatcattgttacaatacatacagctccttcccctctgcaactccaaaggaaatgcttgctatgttgccatttccaaaacaagattcctcgggaaaggaaagcacatgcttctctgggatgtaaagct

SEQ ID NO: 38561 - DNA, 1689 bp, Homo sapiens
tattttgtattcatgggcgtggggagaggggggatacttcttggcaatttatttcccctgaagaacagcactccctatccaggttcaccataaaaactgtgtgtcctccagagtctagggaagcatcgtcctgccagctctcccttctccccacaggcccccgcacataacagtggcgaaacagatggtcctccccctccccttctcctcgtcccttccgcagtcccacagtgtcctcccacccttccctgacaccttcaccagcgcttagtggccgaggccgcccgtcagggctcccaacaagtgcaaacttcggggaccttctctctgctcctctgcccccatctcatctgggttctgctgcagaactctcccacgaccccaagcttcgaccgctaccctcctcacacacctcggtcccctaactacccatttcccggtcattgagagaaagacaaaccccaaacttccagcccaggtgacgaggcgctgcggctaaacatagcggggcactctcctcgtcctttcccctctccatccgtccttgggaattggagcctaccctggggaacagaggagtatgctcctgtggcttccacgacctaatcctaactccagggactcgcaggagttaggattaggtcgtggaagccacaggcgcctgggcgccctcctctacaagtgggaccttgagacaaagtgcaaactctaccgggaggggggctcctggccattccctcgggcggcgcgcccaggtgcaggctcgctctgcggaggagggcgggggccgggcaagcagagggcgcccagtccgggggcgccggtctgggctgggcgcccagagcttacctcggcgcgcgggccgcgggcgcgtggggcagtggctcctccagccgggaagctgttgctcacgctccggtggttgctgcggtcccgccagggctgcaccggggcttcgcgcagacgttctcccgcgatctgctgcagcccaggcggtggcggtggcggtagcagcggcggcggtggaggtggcgcgggcgacagctcggcccggcgcggcccctgaactgtccaactcttgcccgcgccgggcttaagcgcccggccgctgcccccgcgctgagcgcctgcgcaccgggcctcgcccaggtgaggggcgtgtgcccggagcccgctgggcgcgcccggcccggcccggccccgccgcacgcccgcccccctggcctggccgaggaccccggggtttggacgtgccaacgccactctcgcgcgccgaagctgtgacggtttactaagcagagacttgcgaggcacacagagagggaatgaggcggaaccgttcgggggctcgttgacactgcagagcctcccgcagcatcgctgccttaaatcccgcctttccaggcgtgcgcgcacagcgagccagaggaggctccgtcccgacctggggtcccccgcggtcctcagcccgggggctcgggtccccgaagagatccttggcaatggcagaggtcccaaagcctagatgccaagccccgcgatggggcggatgcttccaatattagtcaacccagagtgaaactctcttcttggagatcgtcagaccaactatttgtttttcctctttgaccacccctgggctagcagagcacagctagcagcttcggcatatttggcggagccgggaag

SEQ ID NO: 38562 - DNA, 534 bp, Homo sapiens
accaatttcttgggaagcatcacctagtcttcctacctcaagtttgtagtatattaaaatatatattttattatttctcagggtcaacctatagtcattatttcacttcttgcttttttctttcctgatagatgatttgccccaaaggagattgaatccaaacaagtcacagggcagcaggagagatgaagaatgctcatgaagaaagaactgaccccccattggactttctcataaactgatgactcactcctgttgcaaacattggcttcactgagagtgcacattctgctgtctctatagctttgccaaaagtggccacaatggattggcaatatctttatttgctgagaagcaatacttttgatagtttacaaggtggctatatctaatagagtcataaacatctagggtcaaaattgattttagtaaataccaaattggaaaaaaaaaagacaacagattttttttctttggccttttaaaactctcgtttaaccatatatcttttcaagacaccatttcttaaatggc

SEQ ID NO: 38563 - DNA, 1403 bp, Homo sapiens
tgcagttaaactcagtgaaattaactattatatttccgttatataatgctgtgttgtaggacccagagctcgttagagaggtggagcctggagacccaagtttggcagttattacctcactggagatagttcaagttatggaaggatcaagaatgacagatgaagcgggcacatgagaagcgaagtgtcttcaagactaaacactagacactatcagtatttacagggcaaataaatgaaaaagaagacgctaatgaaatttaaaacaaatagtcaaagggatataatgccggcaagaggcataagagtgcaagtaattcaactaacttttaatcaactagatctcattaatcccactcccctgaccctgggacccgggcactaggaaaggggctttggcaagccccaatggactccagaggctctaagtataaaacgcagtgcacaagaaacaacacagcaccagcgttggtgcaggatttcagacagctccaggaacttcacaaggaaggtcagccggtccgctcaggcagtcagttcatggcagcccattccctccccacctgcttggacctagccgctctcacacccctcttgcgggcccgagcgtagcgagaagacccacgcacactccaatgccgctcacagccgtatcagtgagcccgcacccactcctgggggtcttttacttcccacccgatccggcgacccgccacccccactccgcgtctctgcctgcggggactccacggagttcgataattacctagagctccaccgcgccgccattacaccggacgtacgtcacttcctcttcccgagcaccgacggtaggaagaaggcgaatagtgaaatatttaaaaacttgacgctcaattggcttgacacgttatccctttaatttatttcaaataccatatcataataccagagtcaaagtagtcgatccaggcacactgtcttgttgccaaaatggcgacaaaaaagagaagttggcatgaactacaaagtccgaaatccagcgcctgtgctgacggaaatgaggaaagcataattgtagtttagcgtgaaatggcgcggtgtacgatgggaattgtagttcatacagatgcgcgccagcgagttaacatccacgctgctcactggcagcctagtagtgttcagggtctagccgaatttactttaaaactatttcactgcattttggggaaattttttttaaaaaagcagtcagttgtcactttccttgaaaaatcttaagagagagattttcctgagactttataagagtttgaccaacagttaagtgcctaataaattccaagatatccaggccataagaatgggagaatattaaatcataaatagagtgaaataatgaggaaaaactaattctatagaga

SEQ ID NO: 38564 - DNA, 4094 bp, Homo sapiens
catgcgaatagggagaacatgcatgtgcaaagacagagatgaaggtgatgcttctacaagccaagaaacatcaaagattgccagcaagccaccagaagctcagagaatggcatgaagcagatcctccctcacagcctcagaaagaaccaaccctgctaacaccctgatctcagacctctagcctctagaaccttgggaaaatacatttctgttgtttaagccactcagttttggtactttgttacagcagctctagcaagctaatacgtgctcctaacatttctgggaggaaataacatcacttatctggcttatgaacttctcttaccccattcatacccctggtaccatcctggttggcctcctcctgggtttctgtctcttacttctgccaaaagttcaacgaaggtggagaggcaaggtttatttgctgtgcccctacatctgcttgggtcttaaatcttagttctattcctgtgaagcattacaacagtgagcatggagctggccacatgcacataattgtgtcacttagcctctgtgttgttagttgaccagattatctagtttaacatattatgaacacataggacaataaggctatgataagaagtaaatatttgtgtggctgtaggcagcggtatatagtagctattatttacaggcacagaaattaatatggaagagaaatatattttgctatttaaaatagcattaaccctagacacttatgatcacttcattatgaagttaattaataaaagcactgtaacttttaggggcatcattttaatgatttatttatatggactttcacaattaaatattttattccctgtttatagaccatgattatctcttcacacagtagttttgtctgcttacaacaatgatttggattctcttgaactcagaccttgatgaatcattctcctagctgttctctgtaggaactgagtcatcacaaagagtatttgttcatgaaagggcataagtcagcaaagggtgttaactattttgggatcacctttctgaaaatctaagaaaagctaaggactcttcccccttaaaaatgaaaattgtttattttctatgtaattgcaagtgttcacaagaaacataaagtttataactaaattccctagaattctaagggctccatgttaagaattccaaaacaatatcatccatcctcattcatatgcctctcaggggagaaaagggctgttttccacccatgaaaagaacaggtaacgaagaactgaactgatagaatcagcatctcagaaaagattttttttttaaactaagtattcagattctctagtggatgtatcccaaggaaaaacagccacatttctcaggatggatcttagcaaaagagactattgtgcttaattggcaccaggagtggatttggtcacacactacttccagcttttatctctgaagtggtgtatattcagtggatccacctgtccagcatcagcttctctttcttctgatgataataccctatcttcccttttgagggcccagtcttctctaactcgattcatttggttcagttatggctgaatccatctcagctccagagtttggcacataattgaaagctggcttgtgagtgtattctacttcatgcctatagtgattggttcagggaaggatctttgagctaatctggggacttgtgacttacattcaacttttaggtcaaagaaaccctctcagggtagctaggctgttaggagttagtcctggagctgctggtgatctttttgtcacacatgaaagaaagcatgtctactagtaatgccatgagagaacagaaaagatccaggagatggcagcccagtcctgagggtatcatacctagctgtgtggaagagaaccactctgcacctttctccccagaagctcaacccaggaggctgacctgtggagaccacatagagtgcctctctggttttcagatggggttgggcactgggaagccacagcagaggtgaggtgagggatttaatcctctgggtctctctatagggttgtctcaggctggctctgtcagactcttttcaggttctggtaacttcttcctctcatatcattcggcttataggtggtaacagctcttctgctaaccctgggttactgttctagctcattttcattcactactctcatatcttcacaatgtttcttgtgtatgtaaactgttctggttattttaatataagcgtgccagctgtttcctgttgagacgcccaataatacaccagccttgcctgaaatcagctcaaccttagacatttcatatacgtgagcatatacattccattttttgtttaatccattttgtgaagtgtttctatcacttgcaaccagaaagagtcttgactaatacaatctctcttaacccccttgggccacctcgtgcattctacttgggaaataattgctttagaaacatgaacagacacattatgggagctaaaactcacttaggttggaatgtaattttcaaacaaatccatcatgccactcatgatctattaatccttgtcctgtagaattcaagcaaccacgttaaaaaatgtgacccctactgcctgtagaatttcaaccaaatttttatgcacacaagtttctagcacatgaaagtggtatgaatcagaccaaaaacatacttgttccaattaaaaggtgtgaaaagagcaaagagaaatggccttttatatttactcaactcagcagctgagcagttcattagcaaatcctgaaatgcacgtaggtcataagctccaggaatgtgaagactgttttataaagcaatcttagaaaggcaacctttaagtcaaaagtactattccctggtgaggtttattaattgaatcatttgtttacaaaaggtgaacgtggctctaagtgacagtactgtttgcacagtggcaccaatattaggaaagcttatgtgtaatgcattagtaatgtagaaaaagatgctgcctgagtcaggggtatttgtttagcacattgacatccagcaactccctgagcatgaattgaattaacttattaaaatttaaggtagtctttaaaaatattgctaatgagtacagtgaagtcaggatatttaccaccttctcaaacttgccagagatttaatgtgagtccttggctgaataatggaaaaggttaaaaaaaaaatggtgtgggagggtgttcagttcccccgttttacttctttacttcttctagaatcaaggtgaaattttactagatttgatttctggaatgaggacttaataattgttgtcagcaaatattttcttttatttcaattacaattccttgtagagaatgtagcaggaggaataaatatactgattaaagttatcctttaaaaaatttagttttgcctcatcactcaccagtcgttttaattttcagtaaaccagctctgaggttgaatgaaaagttaacacattttgattatttgactcctataaaatacagaaatgtttttttatatgtggagataattctatgcccactgaaagatgttttccctttcatagagaatgcctttgacagaccatgcaggtagatgtgactaactcatagtggactgtgtgtggaagagaagcgtgctgttttgtgcgaagagaagcaggcttaccttttctttttagagagctagatctaaatgatagcgaagtctagggcctcaaaaggaaagaaacctagatcattgcctgaattactgagtggaggtgagatgcccaacagttacatctaccttggactgttacatgagcaagaaatagaattcttattgcacttgagccatacatatttggccttcatgtttttaaatgtacatttggccttctctaatgaacacattataccttttaaatcagacaaccatgggccatctaagtctgaccccaccagggagataaaactccaacatcgataatagggcataattacccggctgaactagatccagacactgacagtgtagaaaatattcctctccctcattccttctgcatgttctaaggttatgtatagaagcatttgtt

SEQ ID NO: 38565 - DNA, 482 bp, Homo sapiens
caaatagaaaacaggtaaaaaaaaatgtgatatatttgtatgataacgtagtcatcttgcagaagcaggatggacttccccacccaaactttggatcaaatttctagacccatattgccacacacactaagaggttatgaaaggtttattactcacataatgagattttctggggaaagcaaggaagtttcccaagctggttaaaatgtagcttaagagtctagggaaagaagactggagtttctatggtggtaaactcctagccacatgagataacctttaacccacgtggggagtgagtgttcctatgtacacactaaggctaggatttttgtgccaaagaagtaagcacctggcttttttatcagcttgccaagatgtggggcagaagggtaagaaagagtggtggggcctgaaaattgtcagcagtgaaacatcaaaaatgagtcaggctctttactataaatgaaatgtttaaaaat

SEQ ID NO: 38566 - DNA, 2950 bp, Homo sapiens
tttttaaaaatcctcaaattatgttaaatttgattgtctgtccccaactctgatttgagcaaaactgtcctataagaacttctggatcatgcagttagaatccactaaattaatacctttagagacctaaggctcatttacatgcatttatacttttccattactagcttataaccaggtaaacttcatttttccttattctgtctttattcctgaggccacaaatcctgctatatcaaactactcccaggtccacagaagtgctagcttctttctcagcagtgaacagtcatatggctctttcatttacttggaatgctcactatgcttttttcacacttaattccttttggtctttcaggacatacagcataaccccctcagagaatcctttctgactcacctggtctggataagttgctcgtcttatttcagtgcttaacacttagaaccctgtactctagtgacttattttcatatctcgttgaggacaggcactgtgacatttatctcatcttttatggcatgtagtgattaatcagtaaatgtttgctgaatgcctacctgaatgaataaatatctgcattttgaggcttcccttgacattcattttattcagaattgacattattaccatgaatggaagaaatagtgtcggtgattcacaccttttcacagctggggaagtcactgggaacatggacaaatagttactgtggatttctgtcccttgtccatttaatgttagccacttatgtcatgtgaccataacaatgcttatttcacaaacaagaattgaatccctgctattagcctggcactaaggaaacaagcataaagatgtctttgttttcaaggagtttagaactgagttgaaatgaacattaaaacaatcagcattccaatgaaagtgtgttcaatgaggatatgtaatgaaagaaagaagagagcattactgtctacctttgggagaacagaaaaaacttcacccagagggtcacatccatgatgggttttccaagtggacagaagtggtacttccaggcaaagaaaacaggatggacataagtgtgaaagagtgaaattgctgtaacactcatggcttgactgagatttaactatttttcttctagctcaggaaaataccttgtgaagttggaataataattttcttcttacagcagtgtttttccatgggactgtaatgtattaaaagggtaagctggattaccaaagatttaataatttaatatcatggcttggaaatctgtctccacttcattcaaaggcaaaatctctttgtgatgagaaactattctcctaattcattgaagcctcccatttgcctctgatgaaggagctagtgctaatgtcaaatccatgagtcaggtgtagttgctatgagtcactgaaaggaatgacactagtcctcaaccatctgttttcagttgtgctgacagcaaggtctggatgaggtaagttgcagctactaggtcctgcatctgcgacttccacacctatccctaacctattctatgccaaaacttgaagtggatgatgtctaggcagagggacttgctatatattcttgatatgccactggtaaaatggtggctttgtacaaaatttcatgtttaaaaagtggcaaacaataaagcaaggtaccttgacatagcaagaagtgaaataatactgtaagtgctcagtggcctcaataaataatttctgagatccagtatctatccaagagatccactgtcattggtccatcagtccatagaaagcacctgaaatatcataagtattacataaatttttgttgaattaacatataaggtcactgggataggagaaatatgaaggcaaaattagctcaatatgaagtctttgcttaataagtagtaactcagttgccgcctcaaagaagtagggaaacagaaggaggcagtacacaagtgattcaatatcttcacaagtgctttgtgattcatgctgcagtaatgagactcccttatcaggaatcattgagctcctttgggggatggggaccagcataagtgagctttcctccactggggataagtgtgcccaacagcacattataaaggtattccagcatcctgtgtgcctactctttctaggtttctgagacaaccaggacagattttacaggcaaaacttgattctttggttgcctccagttatatgacaatcccaagcatcaccatgataaaacattctctttctgttttctcttttcttggatccttgcttcttttactcttaggccacagttgatctggccaatcataactagtactgtatgaactggatagatcagagtcaccatactgaacttgatttgaaataatgaacacattttcctcttgatttataaattctacaggttgtatttggggaagtggctattagagattaaatctgagacattggattgccatttttatcattgcctttctagccatagacacattaattagtgcagtgacaaggtgaattttgacaggctgcccaaaatggtctacattacttttggtagaagaagagcaatgagagacaggatacattgagtatttcagaacaaagtgttccttgatgatttattggtcccgaattcttccacatattcctttgggtagaagaattcagggatttgaatttgtgcaaagaacaagaatgagatagtttaaaatttttttaatagggtctgtccatgtcacctggcaagtggttcattcagtctgacatttcagatttttgcccctgctggatgttttccctgtcttgctcttttgctttccatttattcaaatcctctccagttactaagatattattgatttctcatggcctggtatgagtctatgaagctccctctggttattccagtttatgctattttcttttttaagcagatattacatttctt

SEQ ID NO: 38567 - DNA, 1035 bp, Homo sapiens
gtgatattcagagagagaatgaggataaagacttgggtgggagtcgggcacactattgcaggcattagtcgctttatcttttaaagtgttttcaaggcaattaaaatgtttctggtgttgaaatgtgatgattttcgttaatagctgggggataccatgtctaaccagctgtgtgtctttggacaaatctttggaccttcattggtcatttctttatctggaaacttagggatttgatgcaccacccttgcatcttctgttctctgagtctgcactctctaacaaagtgacagcacatccgcttgcttttttggtaacccaggctaagtcagcatgtgttggtatgtaaactttatgtttcagtcaaatctcaaaatgacataaggcaatgttttacaatataagatttagcatttattaactatacattatctcaccagataatgtataaggtcctgtctaactatgaggtaacatagttataaaattaatccagagtttctattcaaggacataacttattggtcgttcatactcacttagcgaggctcacagagcacatggaacatggagcacagccgtccttgttcctgctaactgtttcttcaacccggggcagagcgttaacaatcaccagtagcggtggaatagaactcggctttggcctgagactctcaccccagagaccatcacagctagttatctgcagactcgtgtttcaatgtttgttttgctgcagatgaccaaggacaaaggcctttggctctaacccttaaaacctactttaacacagttcctcttggaacaaagatttttatctttctatcttccttgtttaaaaggagaaaaatctgaacagaaaataaatgagaaagaagaagaagatagtcaagtagacccctccttgggtttttttgtttgtttgtttttctttttctctttggagaaatttgacacaggtgtgatgatatagattaatgtgtatgtgtttctgtaagacatgcctactgtgcattccatacaaggtgaaactaa

SEQ ID NO: 38568 - DNA, 3159 bp, Homo sapiens
aaccccacatgcaaataaaatgaccatggaagatttgacagaatcccaatgtcttccaagaatgaactgtgaatttttctgtgactatttccttaagtattctttccattaattgaatattgatcaatagtatggagtagtgagctcaaaggcatagttttgactagtagagcacatcttttgactagtgctttcttctgacagagagcagatgtgctattcttactggtgccatgaggcagttacatagcggtttaggcttgagtcttcccagccttgaacatgtacaagaatcatctaggtatcttgttaccctgcagattctaatcaatgggtctggggtggggcccaagaatctgcatttctgatatgtcctgaggtgaagtcaacgttgaagagtttagaactcttcattttgggagccagacactcttctcttcagtcttctaattgttctcctaaaaattaaccaattttaccagcccatttttaatgggctcagctatgacttttctgagttttgccctcacttaccagtatcttatttgagaacgtaggaattataagagcttaacctactcacccactgactccgcttctttgaaaaataagtcaattttggtttctctatctctgaaaacaactgaaaaaactctaggtttatggagaagcaagagaagctgagattttttccatcgcttcaaaagagaaccagagactattaaaatcactctaggacaatttaattgccttgcatggctaaggcaatgatgttgtttctaaatttttatagacttctccctgaacctgaacctgaacctgaagaacctgcctcacttcaactattctcaccttccacccagtgaatgtggcattgcctttgactctcaagctcctttggccataattcaatgctattttccctaggaatggtccataattactcttatcccattgatttattaatgagctccactctagtggcagagacttgaaactggaagccagcagactccctggctcctagaaaatgactgggcatctctcacttgatgatggttgaagcagtttgggagtttaaggacaagctattcaatcagaatttagggcattttcacaatgccaaggctacacacacacacacacgtgcgcacaaacacataaaatccatgactgagatgcccctctgctataatatgggggttgagatcattaaggtaaagattgaatgtaccagatgaataagcctttttaattcatctgaaaaagatctgcactttgaaaggttatatttctttatgttcaaagtcacagattgatttattgatttatttatttgggcatagccctaaacccaagatattttgtctgagcaaagggtaaatgggccacacctttctctgtcagcctcagaggaacccagtccaaataccacagctcatataacaggaatttgtttttttctagttgggattcaggtccctgctaaatcggatgtgatttgctttaacatgtccataaccttctgtcaaagtgcatgctaccttttttggatgtctggccaccttttgaagatcttttaacctttatttgtacttgcaagttaattatttctggggagctaaatgccaagattggcagccgttctagtaggacacgacctgaaaccaatgagaagtaaaaagaattgttttcctctaggagtaaaatgtagcttgaggatttaatctagaggaaaccttatccatatttccaacatggacgtcaacaccattgattgaataatagtttcccttgctgccttaggttaactagcccaagtttggtaaaaaatcatccttttcaccatactttaacttttagcatagacttttctggaactattttccactcctagctcctttctgacattaaggatttaaaagaaaatgagaggaagaaactttcaaatcatattaagaatctttagttctccaaagatattttatcatctttatgctacacacaggtttactttattcacatattccaatgtgtgaacatttgtttttatgtacaaaactcatgttcttacataatttattgctaatatttatgtttgaaatgttcgctaagaaaacatttaaaaatgaatatttgcctagtaaagtttgttcatttgggattttgttttgtttctttaagcagcaaatgaatcattacatgaaactctaatgcttgcctggtagaaggcggggtgtgggagaggctcttctttttcctcccacccctggggcaacctctaaggcaagtcttctgtattctcctccagaggctctgtagaagacagttcaaaacccctgccctgatacacgtatcatatgattccaaaatcatttctgcatagggtttcaggaaaatttctgttggtgaggttagacaaatttgtattgttacatgtgagctgtaataattcaatgaacaaaaggtggttccagagtatgtcatttttaaagtttgtcagtttttgcatttggcacattgcaagctaatgaaaattactgctactttgggagaaatactcaatgagggatgtttattacaatgacacaatgtaaggaacacattaaggcaagctatttctcacattttcattctttctaaattcattgcctttttatgcatccattcttgtttctacagaaactgatttgtagtttcaaaataataaatattcatctcatatggatttttaaaggtgactgatttgtaaaaatcaataactgtcttttgccagctcgtggactgacatgattgccttcattttcaaacataaaacgattgcattaaaataacattaagagacaaacattggctgacacaggaagagaattcttaaatgaaaactgctccagccagctttaatcagttctgatcatgctttttattatagtgcaaatgggctctattaaaaggaaagccaattccagatgatgatgcaaataattatagctgcctttagcctctagttagtggtattaactaatggtttcaaaacgtgagatttattttagaaagaacattttcctttaacaatgaaatgggaaattgggctttgtctatctaatgttaaatatacagataaaaactgaaaaagaaattagtctttttttgatattt

SEQ ID NO: 38569 - DNA, 415 bp, Homo sapiens
gtagctaggtcaaggtttcagttgacaccatcagcctgagaggcttctgtctttccatctttcggctctgcttcttctggcttcactctcagatagccaccctacctcatggtcacagatggcttctatcatgcccagaagcacatcctcatccagtaggagagaggactcgcctttgtcctaccattctagcaaaagcttatctacattacatcatctttgcttgggacagagtgaacccagtctctgtggccagggaaatgacaacaagggcaccagtgacaggtcagatgctctgccaaaagcaaaaatggttggaaccagaagaataattcccccagatggaaatcaaagtatagttaccaggagaggagtgaatggatcatggatagcatcagtagctgttttcagctgc

SEQ ID NO: 38570 - DNA, 1813 bp, Homo sapiens
tgggctcaaacaattctcctgccttggcctcctgaaatgctaggattacaggcatgagccaccatgcctgacccaaagggaagcttttgatttatcttccaacttgctcctcctcctcatccccatttcaattattgtcatcactattcactcagctatctgtgccagaaaggtaggaattatccttggtttttcccttctcctcattctctgcatccaatccatcagcaagttctgatggctttatcctcaaaatatattctaaatccatccactccactccatacccaccctggcctcccctgtccaagtcatcacctggagccaattaactgctctcccagtgtccacccatggtgtcctcctatactttcttcacagagcaaagcatttttttaaaccatatttagatcatgtcacatcccaacttcacttagaataaaatagaaaactcttgatgtcatatttaaaatcagatctaaacttcttactctgatttacaaagcctggcttctacccaccttgaaaatataatttcctgtcatctctcctttgctaaaaatgtaccagccatccttcatctcccacctcagggactatatgctctttctctgctgtgaacactgtttgaattccaggattcttttcgccctccatgcctctgtttaaatattacctccttagaaaggttttcttcctgaccacttcatttaactatggtcctcagccccctgaatcacctccattattttcttttacaacacctctgcccccgatttctttcataacacttttcaaaaatctgtgattatttatctaatttattcactttttaattagctgtctttctctgggctaaaatcttctttagggcagggatattgtctactttgcttatatttgcaaccccagagtccaacagtgttagtcacacaggaaatgataaataaacaagcagacagaccagtgttacgtggatcatcattgaccgcagtcttgtctatcactgcttattcacttctgtcccaagcattcacttgacttccattattcaaaataaacatttcaaaggtattttaagttctattacgttatcaccattgacttaaatttaaaaataatagaagtgtgttcactaatcttccaaatatttaaatttgatagcttagttcttttctccataaaccaagtgtattagtttgtattcagtgacaaatgaccataaaaattccagtgacttaatatgataaaagtttatttttacacttgttccatatcccaggcacatcaggaggggattttgttccacatagtcactcagagatgcaaacggacgaacagagctcttactgccttgcaaatgtgcagtgggtcgtggtgcctcctcagtatcaatggaagagaaaaaataaattagaaattgcacatacgtttcccttactccagaaatggcacaccatacttctgctcattggccagcactagtgacatgatcctacctaagtgcaggagccagtaagtgaagaacttaggaaacgttcctccctctgccactcctgctataccatccaaatgatacagatcacaatcttaaaatttctcagaatttcttgcctttgtatcacctatcaggaatgtgtatgtgtgtatattgctcagttaagtatatggcacttatttgtaatgtgattcaatttatgagtatttttaatagaaatgagcagttactatgcataacacatgtggaacaaaaccttgaaagatcatatgctctgtaatgtactttggaaattaatataataaaagcaatagt

SEQ ID NO: 38571 - DNA, 876 bp, Homo sapiens
acaaatgcagtactctgtactctaacctcttccctgtggcaatcttaatgaaatgactagtttccttaaattgctgtgtaaggacactgcttcgggaaggttttttcaccttaccctatcactttaaacattcagcaccatctaatcttcataatacacttcataattataacatatcgctataggtattgtatcatggtggaaagaaagaaataaaacaagcaaacaaaaacctcaaatactttattggcagttgctagaggtccgaataagcaatttgttttttctcattcgaaacacacatttatgccctcggccttgccccactttctcttcctgcaggattccacttccgatatcagacccagaagggctaatgccaaaaccaaaggattaactctgggctgaccatgagcagaggatgactgtggtgtcaccttgcaaataatgcctagagaaattttcagaatatctgagggtagttggaccagattgccaattggaatataagaaaatcagttcacataccagaagagagaggtaacaacgggaggaaagttggaacaggtgttgagaaactaagtttagctgagtaataagaatggaatccaggttaaagatagagtcagaagaaacagatggaacaggagttgagcagtaagcaatattgaataactagagcaggaacagtgtcagaaccagaaccaagagaaatagtgaagtcaggtctctgtagcaacagagatcagaaacttattttaaagaagatttccctggaggcacagggtcatttctaaggcatgggctggaagcttttatttaaaactttacatgtcttagaagcactctggttgttgctaggcagacaattttaca

SEQ ID NO: 38572 - DNA, 505 bp, Homo sapiens
ggtctttgaacaataaagacagagacagagctgcatcagagtcaagaaaggaggtgtgatggcagaaaaggagattgtaataatgggaagtgtgaaagcttaatcttccactgctggcactgctgccaacgaaagagcctctagaagctggaaaaggcaaggaaaacaatactcccctggagcctctagaaaggaagtagtcctgccgacactttgatttcagcccagtgtgactcattttgaaactctgacctccagatttgtgagataattaatgtgtgttgtttgagccacgaaggttgtgtaatgtgttacagttgcaataggaaactaattcaagagctgactggcagagggggcaatctgatattctctgcctgtgtcccgttggctcccagcaattcacaggaatgtcagagactgaacgcaagctaactaacccttttccttgatatctgtggatttctggttacttcgcttaggctgtttcactgctcacagtaaa

SEQ ID NO: 38573 - DNA, 3036 bp, Homo sapiens
ttagtcacacagcaattgaatgagtgtatgtccagcacctagcaacatatagccctcaataaagttaactgaatgactgtgtctttggaaaattatggaaatgtaacttactctttagagttgctatcaagcctttaccaaaagttttctattaggagaaatagtaagcaaatacgttggctcactcagtcttttcttctttcccttaactctatacatcttttgactgccattctcactccctttgtgaactgcacattctcacagcacccctgcccctggacacttgtgggagaggaatccacaaattcctttgaggctccatcaccggaacaagttctcagtagctggagaaggcctgggtggcaaacaggaagtttttgtattctggctactttgtgccgtggggtaaaaaccgcagagtccacctggagactgcaaaaagaatggtagaacaaacaaaactgtcactatctccacctaaagcttttctgggtggacattctgactcaacatcactcagaacttttctttccagaactggctcctcatgtgcaagacagaagagtcccgcagaaaagtgtcatgttttagctctcatcgccaccccccaaccccaaactcttctccttcacttttaagaatgttgagcgggacattttaaacactgttttggatttttaaggtttcaaataatccgaaggacacttccctttggcagcgacagttgcaagctatgagccaaaaagaaatagaggttgttcccctaatctccaaatacattctaccctcttcaattcccaggaccccaacttgtcccttcctccagcttacgcgaggggcaagtggcagctcttctccgcctgcgtgcctggcctcgtcaacaacacccattagtctcccgtctcccggggcggcgggggactcccaaccacgcgcccagggcccttgcccaggtactggggccccgggagccacgacggcccccgcgcaggcggatgggatggaaccagccctggggacgcgggtagcccaatgggcagcctcgccccggaggcgggcccaggccggaagccaccccgcggcacagcggccccgcgatacggtgcccgcgcccccgccttctctggcacaggctccgcggccaagggcggcaggggccagcccgccgggtccccgccgcgctctttgtcctggccgcgcgcgggcggacgcgtgcacccccagggtgaggggaggtgtggagagcgcgcacgggagcgcgcgggaacagctcgcgcccgccgggcgtcggcggcgcgcgcccctccgccaggcaagcagcgagcacgcgcgtcgccgccgcgcccgcccctcccccccgcgctcgcctcggaacttgctgactgcgcggccgggaggagccgagccgggcggcggcggcgggaggctacagcgcgcgggggtctcccgcgtcccctccgcctcgccgggagctcgcgccctcgcccagccgagctcccacccccgcttttttccgaaggcgctgggcggcgccaccctccggccggagcccggcactgcacaaccccctccgactttcaatgttccacactccccggccagagcctcctcggcttctttttttccctccccccccttcccccccccacagctgcctccatttccttaaggaagggtttttttctctctccctcccccacaccgtagcggcgcgcgagcgggccgggcgggcggccgaggtaaggcggcggggccggggggccgcgtggggggcggccggggcggcggcggcggtgggggagggggcgggggcgggcagctttgttcgcgccgggcgcccgcgtcgccggtgtccgcgagccgcggcggggccggctgggctgctcgcatcacttggcgcccggcgcggcgagcgctacccgcggcccccgcgcggccctccccacaaagggccgcggagctgcgtggccgccgccgccggccgtggctcgcctccgcgggcgcggaaatttgttgcacttcttggggctttgtttatttgtttgttttttctctgggtttcttatttttttcgttattttggacaaaatgtcggtccgtgatataaaaattgagcgaggaaccttggtggcattgggagctttgcagaaggtgcagtttgaattctgcttttcccagggtggcagctcggtcttggccggatgaatcttcgctgctggccgtggaaacagctagagcagctcgttagttgatttttaaatttccaagtgttgtgtttaaaggctttacgtgcactgaggaggaatcgccaccttaaataagcatatgggcgattaacagggtgtgttttcctctcggaaagggaatttggtagctttgaccaatgtcagtgtgtaaatatttagacgttattagtgacttttaaacatttttcagcgagatctgttatttacagtgtgtcatatgttattaatgcttgttgcctaagttccttggcaaatctgtttcatgccttctgagaaagtagacaattgatagattgtccaagagacggaaaaaaatgtgagtgggttttctaacttgagttcggcaaatcccttaacgctggcgttgtgtgacacatcacctcccttgtacgtacccctgttgtacgatgaaataagtgtgaacacttttgaagctttttcattacaagacgattttagatgactagaagaaaatgctgttggtttatttcctagatttaacattttctcctcctcctcccctgttctctttaaaagttttccaagagataacttcaccaagatgtccagtgataggcaaaggtccgatgatgagagccccagcaccagcagtggcagttcagatgcggaccagcgagacccagccgctccagagcctgaagaacaagaggaaagaaaaccttctgccacccagcagaagaaaaacaccaaactctctagcaaaaccactgctaagttatccactagtgctaaaaggtaatgtgtaaaagaaggatccagcacactt

SEQ ID NO: 38574 - DNA, 1322 bp, Homo sapiens
agcaacaatggaaactggacagctgaaaaatatgtagaaccattggcaacttagaaatttagacccccaaatcaccaaagaatattttattttttcaacagaacaaattccttagtagataggggcacttgtaatacacttgaagactttcttgtggttgatttcatgtgtgggttaactctaaagtaatctgcatatacagattattccttagttttaaatttgtcatctttataaagttccaacctaaaacccttccaggtattattacacccgagagtatacggatctaccttagctgttaaagtctgagggcccacccagagcgggcagatcagataagcacgtcaccccacaggaagctgctttcagttgtttgctggggcatgccttggtatcagtcacagatgttactcaaagatgagaccccttcagcccttattcaaagcccttttactcttctttgttccaattctgtaataaacatttatcgaattttagatactgacaaggccaggaatatatgtctggccagccacagccaggtaaacatcatacgcaaactaaaagacaaatgcagtcaggggagctgtgaacacgttcaagcccctgaactatgacctgtgctttgagttctgtgtgagactgaaaaagacaaacagaagagttgcctgttagagatagttttgtttttctggttttaaagatataatccttagatttgtaaatcattcttggtaagggggagacactgctttccagttgtctaccatttcacttacctgaactttttgaatgcacagtcctatacattctttgtcagtacattgattttaaagtcgttttataaaagttaatgactcacggggccatctgtgcaacttaaacacaatggcaacctatgcaggtggttgctgtgtgtcatatactgtgcctgctgtgtatatttcttctaattagtcatacatcctgaatcagttaaggatgactgtggtgagaaatacaaatcataccaggactgcttttagcctgacctatggtgaacttgaatgagtaaagtactccctggagagaaaattgctcactgtataggtaggcgtactcctttctttcaaggcaacaggatacatttaacaacaaggaaaaaggagtttatcaaatatatcctgagtaagaccctttggtggcgggttgtttttcaggctcaatttcttggcttctcagatctatcctttagaaaaaaaaaaaaagagtagtccaaaagctgaaattcatcaagaaacatatcctgttcatgaaggagtcctagtggaggatggaaa

SEQ ID NO: 38575 - DNA, 2524 bp, Homo sapiens
ctgacatcatttgtttcttgtatcatgctgtctcaccaaaatccaagcaactatctccacattgtcccaattgtttcctctattctccctcaccaaagtccaacttcaatgtgaaatttccagattaaatatcctttcacaattcattttcattcataacataaacacgataaataactttaagtatgaaagtagcactccaggaagcttagtcttttgcagtttttacattttggcaacaccaatcaagcacctctttccgtccttaccccaattccttggacactaaagagtctatattcaggcgactctttcaagtgtatgtttcagggtgcccaagcagacacttgttttctcgcgggggatgttttgtgagacttggcctccccacttacgttctatttttaggtgagggaggaggaggaggagaggaggaaagattattaacaaactaatcttgcccattccgcgggcagtagtcgggggctggcctgctccgcgtcgcgccgggcgcgccccgccctaccgcgccccgcgcggccccggccggaagggggcgtgggccgccgccgagggaaggcgcgcagacgcgcagcggccggcctgctccgggcgcgtcaggcagggggtggggagcaggggccgggcgggcgctcggctcccagccgcgctccctcgggccactagcgctcccgcgcgcgcccggccgccttcatgtgaagcgccggccctccgccccttccctccccttccttccctccctccctccctgtcccctcctcctcctcctcctcctccggcgcccgcttcagctccccggggccccctgcccggccgggcgctgacagcaagggcgggggtccctgccgccgccttgtctcgcgcagggtccggctggggtagcggagcccccagtgcggccatggaccggcccctgtcgtcgtcggcggaggcggaggaggaactggagtggcaagtggcgagtcgcaggaggaaggcctgggccaagtgccgcagctcctggcaagcgtcggagacggaggatctgtccacagaagcgacgacgcaggacgaggaggaggacgaggaggaggacctccccggcgcgcagctgccggcagcggggggaagaggtcggtgctcccggccgggctccggggggaggctggtgggctggggagagtctcgtgcgccctgggcgcctgccacgagttctgggagagcctcgggcacggtaggccgaggggagaggggacacttccgaccttcaaacgcgcgcgctgaacgaggcgcccccagcgtcaacacagacaactgggtgccatccgatttccctgccaagggacactgagacgtgtcgcttaggctgcatttgccgtggtagattttcctacttgggagggtccagggtgactccgccgtcgtagtgctcctgggtggtaacgtgctgtcccctctctctacccccaggaaacgtgcccaacgagaagatcgcgatatggctcaaggactgccggtgagtgctccctggtccgcccgcgtcccgggggagatccgtgcggacgggacgccggagcagagccactcgggccgcgtccctgtgggtcccgcgaccgttgtaagctacaaaccggaaagtgagccggcggatagcttcctcctctaagcgattagaaatggaagtgctgtgaccgctgattatttggtgaccgtgttgactttacagttaggacttgagctactcacgcatcgtgttagcatcagagatcagaaatccagaacagataatcatgccatatttgttctgtttttatttgaaagaattctcacatctcgaacaggatattttgttttgctttagttttggcatctgtacaactggcacggaatcattttcctttcaaatgtgttttagacgagtttaatttacctaactacactaaatgggctttaattttgtttctgtttggggagctattaaaactagctaactttgtacttatagtttacttcttgaacatggaattgtcagatggcactggaattctcagggaatagaacttttaaaagcattcagactgcataaatctgtttaattacatgctttggcaactggtacaaaaatgtttgataaaatacagaggagatgaatcatgttgcacgtaaatctgactacagcaaaatgtacttgtttcttattccactttgctagttgtaaaatcaggaatgtagcctttaaacttttgttggtgtttgctttcgagcatatttttgctttctcaatttagattttcttaatattttgttcaaatattagagttagggtagtttgttttgttttgttgtggaaagtgattcatatgccagtttgcctcctctaaagacagacaagatattggctaccatgatattaatgccttgttttgatgaatcgactggaaccttattgaacactctttattacagaactcgtaccctttattggaagtgtcatagacccttctgaaatatgatgacatatatg

SEQ ID NO: 38576 - DNA, 832 bp, Homo sapiens
cacttgagttaggttgatttgtttaatagatatttattcaagaagttatacttgtttgccttagattcatttggttttaactacttaaaactcttcttaaggttcaaagtacggagggagaagctcctcatgttccagccacttaccagctaggtcttacgaagtcgaaaagaggtaagtggaccagtatccactagttctgagcacattatcaaatattagttgatttggaaaaggggttttatgtatcagtatttgtagtatttatgagtgtgaaaaggcaaagaacacacacaggtaggcatgattcactattgtttgtagaactttttttgtattttttaaaagactttttaaaaattagtttgctaattagtttgcttattctggaatgacctcattacacaattgtgtgtgctctaagtattttacactattgcataagagctagttgggaagtgatagagcaatggattaagactaccttttacattgttatgactgaaaaatatactggtattatctatctttggtgtttcactatataaatatagctcctaggtataacacatgaatattcctctagcaaaacccaccaattttttagcaatagttaaagctagttaaattcaaactatgggtcgaaggtgagtggttgtagatactgttcctctcttaaattattaattattgaccaaagaacctttgaatccatccctttcacttttaacttgcaacaacaacaacaacaaaaatgtgtgatctttggatttacaaaacttttgagctttagagaaagggaaagaggaagaagtgaaaatgaccactgaag

SEQ ID NO: 38577 - DNA, 1082 bp, Homo sapiens
tgtgaatgagctttccttgtttgtgtttcccaagcttaataaggacatacatggaatttgtcaatgtgaattaacaattctattcatgttctatacaagtggctttctactgtttgaacaaccagtcccttttgctggatttaaagttatttacttacaaagaaacaaactcaatttgctccaattattaactaaagacctaatgttgatttatggtgcaatctcactttttagttccttatcatttaattagtctacttttgtaccgaataacagagggaacgtcaggtcttcatttctgatttactatagcaggataacttttttcatgctggtttatgtttgttttcctagtattttgctcactctatttagaagaaaaaggccaagccttacaatcgcttgcctcagggttgtgatgcaggactgattttccaatatcaaaggaaaataggctgctatcctagactaggcgctccacagtactccactctgaccttcgccttttaactgttatttgagaaaaaccaccactgccagcaccaccagacagcaacaacaaccttaatatgtcagggtccctggagaaccgggtatggtacaggctgggtattctcagatgagacactcgctgttcaactcagattactcttagagaaaaagaacttcctgtagagagaagaacacacaccctttgtataagatagttctcagggagatgaagggacaaacttttgtgaacttcaaagttcatttaaaagtaaacaatctaatagaacttcctgtcactggattagaaggaagttagggactttagacaaaagacaagggacaaaagaatttaggggatttcttaaatttgtagttttcccatgtttgtttgttttttaatgttcttaatgttcttctgctttcccaaaatgatcatcagtgataaacatacatcaaaaaagatatgtgcacagcatcctcccccttatgcctgggacatatgatccaagaggttttgaagatgcctgaaatcccagatagtactgagccccctatacgctatgctttttcctatacttagataactatgt

SEQ ID NO: 38578 - DNA, 2188 bp, Homo sapiens
caacaaaacaggaaaagattaagtcaaacaaaacaacttagtggttttgtaattttggaggcttttgtctgaagggagatagctaaagcttgacaaaggcttcctatgtgtgagtagaagagacagctcttttccctcttcattggggcaagcaccatagtaattagatttaaaggacaccaatagacttttttattagaaccagataactttctggtgtttctcaaatgagagaaaggcacctccatggaatgtctttcatccgttttcaaattctaccaagcccagttcttctgcaaacttcacctaatgtatgtgtgatctacagctgtggtttacaaactgaattcaggtggccaggcagggacccctccccccgcgccccactacccgctaaccgcctcccgccacacacacacacacacacacacacacacacaccccgcgcgcgcgcacacacacacaccccaccccaccaccccgacctccacatacattcccccgaccccctccagcagtgaagtctaagagcaccgcgaagtaatttaaattttcgagggaaagcacagcgccatctgtcggacatcatgccaattactcttgttaagttcctacctgacggttactttatactttgaactgctaggtactccttttggcctaaggacacagtgaaaaatgtaccgagaccttggagagccacgaaccaagaaacttcagaaacctctgatatctgatcaagagttaagagacgtcagaatcatcacaactgacaaaaggttaggaaaaaattctaaacatttctatttcctacagacttccccattatatttttggctgcctaaacagaaacagacttccatgatcaggagctgggctctggcagttaacattttattgccattttactggttatgaactctttctatgatatcttcgtatctatatgaatagataggtgatatgtatcagtatgtatgtgtttaaagagagattttttttccctaggcatgtctccatacataaatatttttaaaagttaaaaacatgggttccatgtttcgaaatggctaggacaggagctgtggagttctcaaatcctaattgagggctgtctcagggaaaggtgctgatacaaaaatcagtctcatcctaggtgacctctgtcagctttataagctctttgatgacttattattccatttataaaacaaagagaataatacagatgttattgaggttcgtgtttataaaatattctaagatggccagatgaaaagtgtgactcacaggaaatgccaaatctgaaataaatcatccttctgagtcacaacaaatacctttcaatgtgatggaaacttgatatttgaaaactcccttgattagattcctgttttcatcagctgtacttttcctatgaaatttgtttacatatttctttcctctttaccatgctttcaaattggttgacatttataacttgaaagaggaccattgaaaaattacttaagggagaccagcacaaatacaatttttttttccaccagggaaaggccatgtgcgtgtgtttaaatgtaattatcgtttcccttttgatttttgtcaatcaaggaaatagtgttactaaaatgtctgattgttttatctcatcactaccaacaaaaactgttccattacagtctgtgaggctttctattttagagtgttttctaggcaatatgtggtaattcaaagagatcaaagtaaatgtctccacctcaattcatacaagccttgataataatatattttcaaaacttgtccattctaaagtaacatttgtctactaagcccttttttgggggaaatttaaattagtgggaggagcttatacactatctttttcataaataacacttttcttgattattaagaagtaaataaaatgatcttcaattctagcacacagagataagcgccattgaaatgttggtgtgctttggtctagtcttttgtctatgcatgttttaatattatatactttttaaattttattaatctcattttgtgttacagtttcttttttattaagttgtgcaggtttgttacataggtacacatgtgccatggtggtttgctgcacccatcaacccatcatctatgttaggtatttctcctaatgctatccctcccctatctcctccccacc

SEQ ID NO: 38579 - DNA, 612 bp, Homo sapiens
agggaagaatgtaagatcttgtttttaactagttaaagtcgactgcatacagaagaaaggaaaagggtttttgtgaatcaaatccatggatttaaaaaagcaataggctgtgtgtgcctaatgtgtttggcagctgatacagtccttcatgacattaagagagctatgacacaccctcatcaggaatgtagtgctcagttctaaggatcagcttttaagagtcatcaactgctataagtaacaaggatgtgggcagaagctccaggcaggtagattttagcttagaatagaaaataattttctaattgttatttcatttttttatgagaggttgtttcaaaagtccttaattcactcccttttatttaaactgtgtaagctgttattgaaagtctgttaagacacacagaaaggatccttgctttgagtacgagtttggagtagatgttctttatgttcttccacacaattctaaacttgtatactctatttgtccataatattgcaacatttacttttcaatttatataagtattgatcttcttttctatggttgctgttaagcagaaggaatatttccactaggatgagaaatatgaacttgttactggc

SEQ ID NO: 38580 - DNA, 1182 bp, Homo sapiens
ttgttgtatttcagatgccttgtgctaaccatgagtcataaatttatgatatatattgtgcataaaaatgacagaagttgaagtttgcatagaaaacagactttttcattatcttgtgtaatattgtgtttcatgattatgcacagaaagttcagattatcagaaaaatgacagctgatgactaatacccacgtacatttctctggtgtttatatggtggtcagccctgtaatttacagaacagccaattaaattattgttggactgcttgaatcatgttttcagaaaagtggatttggatgttaggacaggaaatggctgactcatttctatcccaattttgtgtgtgtgtctgtgtgtgtgtgtgtttgtgtgtgtgtgtgtgtgtgtgtgtgttttactggaatgcaaatgccttctactgaagaaagcaaagtaagtgctattgatttaaacggaaattggaacattaaacaaagcagctgacttaaaaatgactttgtagagcagggcctattagtattgcattaccattcttaatgcatagccagtcagatttttcatttacttctgtaaaacatctttttcctcccattcttcatgatttcttgtaaagacttcagtatctagatatttttcttctaagtcaaacagacttctgatatgtcaaaaatacctttgtatgcttacagcattttaacactgaagcttttttttttctccaaggatggctatgatcttgatttttttttcaaccccttctcataataaagaaataaatacaaatacagaataaatcagagagcaaatcaacctggacaaataagaaggctaacatggattttggagggtggaagatgaaagtggcaataatggcaagaataagacgtacttcagatcaccaaatgaaacatgatcttccaatcagggaaaactgctgatcatggtgatttcctggaactcaatatgaaaggacatggactttggcggacaagccatcacggttccaccctcaatgccaccacttattagctgtgcaaccttcagaaaatcaatgggttgttcaccccacaaaacaacaacaaagaaaaatatattcaaatatgctggatgtatttgggaagtagaaatgaagattatgacccaagacgcacagttaaggcaagccacatatgcatccgc

SEQ ID NO: 38581 - DNA, 1212 bp, Homo sapiens
agttacttgggcatacaaatgtgtcctagacataatgaaaacttctagtctaccttcaaatttttagaaaattactacgtgaatactcatttgtgtaaatgaaaacgaaaactctcttttatgacctcaaagaacctcaaagaatggcaaaataggtttcaagtttcagatatgtaaacattgctacattaaactgtttgttttaaagtaacataaaatgtcataaacttactttttttggattaagatacattttgtgagagctgaaccatgataaaaaggagaaacgcctgatcgtcttaatttttatgtgaatcgactttaattaacatataaatgttttgaaaaatatcacagggcctcactggcaatgtcaaagctttatttcattttattaagattaattaattgttgaatcaccacatgtcccatgttttacttataaggccaaaccaaagaattctttgcatctatatcagcatccttagcttttcagacaggcattttaatctcttctgatctctgagataaatatattttttcacgtaattatgtaattactcaatagaccagagcagatcccatggagccactgcagtgtgtgctgtataaataatgttctgttctacccctgataattggccagtagagcctcctaggagagtttttatcccttgaataaacactacataggcaaggagggttgactcagtattttcttcattggcaatgaaacagaagcacttcacactcagtgcttattagatcattttaaaaagaacacagtgcttatgaccctacagctccctctgctggttcacaaagtttaaaaagtacaagtagaaaataatgtttaagaagtggaacccttgccgggcgtggtggctcacgcctgtaatgccaaccctttgggaggccaaggaggacggcttgagatcaggagtttgagaccagtctggctaacatggtaaaacccctatctctacttgaaaatgcaaaaaaattagccgggtgtgtggcgcacacctgttgtcccagctactccggagtctgaggcaggagaatcgcttgagcccgggtggcagaggctgcagtgagctgagaccgtgccactgcactccagcctgggtgaaaagaacctgagccccttaggagaaaaatatgtcatttttggtatgaaatggggttaaactaagggaataagcaacagaa

SEQ ID NO: 38582 - DNA, 2057 bp, Homo sapiens
agaaatctatgtcttcatcttggtataaaaacctgtctgtgatctggtccctgcttcatcttccagttttctgtttgtttttcaatttactttaagattttgttacagtgtgtaacaaaatggttacacactgtgtcataatgcttaacatcatagtctctgaagccaggttgcttagatgtgaatcctagctctcaaatatttgcctcagtttcctcaaatgggaaatagatataggagccactatcttgtaagattatttggaggactaaatgagttactacatgtgtgcttagaccagttcctgagacatattaactactattacatcaggctgcttctaatgtttgcctttgttcattctacttcctcttctttcctaccaagtattagcttagccatagatcctgtgtagttttccaagtttttagaagctgacacttgatttactccccgaaactgttaccaatcacaacttatttcatgttagggttgatgttataagcaggtatcctctaggctcggttttctcttttaaatatagaaaatgtagtaaatataaccacttcaattgttatattgctgtgggacaaaatgcagttcctgtaccatagcagtaggagatcaaggtaagagagaacaacgataactccccagtttctagcttgtatgactcagaatccagaaaatattgtagaagtctcaaatgcttgttgatacacacgcttacacaaaattgtaaatgttttaatttccttcaagtttcctactgcctcttcagtccgctagcctgatactgcaatcagtgtcgcttcaggcaacttctcctttctccgccaaatttcgcctttcggtctcacccacccatcacccagacaaatcctccaaagctccgtcttccctttaaaagactctcagggaactcaaccccaaaacccaccctctgggtttccccgtcaccctggcaacggaagcaggaagaggcgggcttcgccatccaccctccccgcccgcggcaggcgccggccgcattggtgagggggcgcgggctgcttggccagggcagttccctcagctccgggttggagccggagccggagccggatcccgcgcacaccgccacgtcaacctaaacctacaccgccctctccaccccaccgccgcagcgcccgctgggcccgcagcgggtctccccaggcagcgtcctccacgcctttcccacaatgctccgcgccaggccccgccccggctcgccgtggagaccggcgcgtgaggaacctaccggtaccggccgcgcgctggtagtcgccggtgtggctgcacctcaccaatcccgtgcgccgcggctgggccgtcggagagtgcgtgtgcttctctcctgcacgcggtgcttgggctcggccaggcggggtccgccgccagggtttgaggatgggggagtagctacaggaagcgaccccgcgatggcaaggtgggcatgggcccggggctagggctttgctggagccggtggtggcctgggccctccggtcagggaggggcggaatggctgagcgcctgaacctcccttcctgtgcgctcttaagacctggatattgtgttctcgctccccaccttcctcctccctgttattcacaccacccttcctctgcccagcgattccctctcagttacttacactttctccctaagtccgacctgagacttcagacaccagcaacacttaacagccctgttcccccgtgtcttcatctttacccctctcccctctcccactctgcagtgatggcaatgcgaaagcttgcgccttgcatttacctggcgcttccacctgcccggtagctcgggccacgggcagttcggccacacccacgctgagaacaacccctgggcgagaaacatcttatcccaaagtgttgattgagactatgccctctctttttctgatggttgttttcttgtttggatacttgttaatctctacatcattatatttttcaaaggtatatttttgtggaatgaaaaggaagtattagaaatgagctgaagaccattca

SEQ ID NO: 38583 - DNA, 1202 bp, Homo sapiens
tttttttttttttaagagtgtgtccacacataaatatgtatttactaggtaacaataacatgtaatcccaaagggagtggtgattagcattaaggcattctaaaatccttcattgtttgaaaggattatttgcttgtctaattattgacattagactgtgtgaggtgaaatatgtccttcaaaatgtgtctcaggtagccactacaaaaacaatagcgcacataacttaaactaataaaggagaacatacccgaggagcagagaaaaactgaaagtaaaaacttcaaaatgaatcttttttcttgagagtgggcatagtctggaaatgatttacagttgcaaatgttccagaggttgcaaaagccctccacccttgtgaccttcgaaccccatttgctcaccaaacccaaggtttctctctctctctctcctccttcttctttatatctcactatgcatacatatatatatacacagatctatatactcagttctttttatggtctctacttatttttagatcaatactatagctacattttaagttcttaaaagacatttctatgattgaatctataaactaataaagaaatttgacaagttaacaaaaagctaagctgagtataactgaattttgacctacctggttgtttgcacagggtgttaggattttaaatatctattttcaatggtaaaccaactctcaatgaaatttttgtagcttaaatcactatttgatcagaagtatatattaattttttcattggtgataatttagggtagaaagaggaaggagaaaaaaggcaggtcatggagacatagagaaactgtccgggattgggaattagtttgcagcagaaacagggagaaggaaagagccttcccagccagtttcatcagctatttatcatcactaccttcttccttctttctaactctgattagatcgtcctgatttgacaaattaatcatcctaaggttaggattagattccatgtctcattactatggcctctaggaaagacaagacagtctatacttgtgaatgatgcaataaaccatagctaatatctgcctgtagcctctatttatgaagcacagcttgataggaagagaagactggagctttaaaattgaattaaatgagcaaaaacaactctttagacagacgttctattctagagaaaaagatctttaatgtt

SEQ ID NO: 38584 - DNA, 874 bp, Homo sapiens
ttgctgttgatgggaattattaaaaaaaaacaaaacaaacagaaccgcttttggagaaacttgcccttatatactctcttataattgcctcaacaaattcaagatggttatactttttaaaaaagtttttcatgattttattagaaagcagtaactgcatttctggtaggcctttctgataggtcacttgagaatgacttttgcattattcatgcattttccacaatagacacttcatgtctttgaattattttagttggagtaggaaatgcaaacaaatcggcaaatggacttagcccttgaaagcttatgtccagctgagtagttatatcaatcacatcatgaaaaattccttttacctaaaaaactgctgaagttcagaggttgtaatttttttttctcagcataggacagactgaaaaagaaaatgaagaccatcttaaaatatctttggatattggcaaaaatttagggagctttttgatatgagaaaaatatgcttttgcctttaaggcaacatgttgcccattacgtattaataaactggattcaacaaagacattcttacccattgctaaaaatcaaccaactataaacagttaccacagttctgtttttgccagtgccaaaaagatttccaaatcttttcagctaaaaagccagcaaagatcaaagagttttcacatgagctctctatgtggcaatgagatacaagtgccatcttttagcacattataataatcctgttgtgcagtactcctttccaatgacctgtaaaaattatatattcagaaaggcatttttctcagcaaaagggaaaaagtacgaattaggaaaggtacatttaacaagctcaatgatctattataagtta

SEQ ID NO: 38585 - DNA, 1759 bp, Homo sapiens
gctctcaaggtcacttcctctcacacagacaggcagtgaaactcatgctgaggactcatcttctgtacacacttttaagaacttctacttccaaagatacaatgaagttaataaatgaagcaaagcagatttctagactaggcttcacatagggtggcttgcagcatttagaagcatttctctagacaccacacctattttccaactgtaatattctgtatagaatgcaaatgttcagactttgcttttcaaaaacgttgtatggttcacagctgaagagagaatagttgagagttgagtgatctatccttcaaactacaggcatgatattccttcacttgccagcaacccttggacctctgcaaggatgtgacaggaatagcacaactcactagagcaggtatcagctgctccctctagtcactttctgggtgctgtgacctccagcagcagaggcattcattctccaagggtgttctatgagccttattggtcctccctgtacgatcagctgcgaaagaactgccagtgcaatcttgagactagatgaggagttacactgacaggataaaatttcaaggcttgctaatccttgtgcatgatgacatgagatcatcagaccagcttgactataggaggcatttctgtaaaggggtaagattacagttaagtgtctcacagctcctgtcttttctatgaagtactgactctagctaggggtgagtcaccagaataaaatgatcatttatttcaggacaatgacctgagtagtcactttgaaatttttctgatggcctctcttctttgctcttggcatttcacttaaattttcagatttaaaaataatttttttgctacgtggaatgcctttttgatctattgccaatgctttcaccttttgtctatttatacaaggggctcagattctgcatcttctccccctgacatcccagacaagtgatttgtctcattgggagaaatcttagaaaccatgtcttcggggcagtttcctctccctccccgtctccctgctcctgctcctccctctccccctcccccactccaactctccttttccctctgccatgtaagaagtaccttgcttccccttcgccttctgtcaaaaaaaaaaaaaaaaaaaaaacatgtctctgtgtcatcactgagctgctgctattacaggtgtagaaatccccagctgcctgtatctctgatgcttctccacaggaacaaaaagaaacagaaccacttgttcccaacatgaagctaagggcatctgtaccaatggaggtctgtagcatctgtccagccactggcctttcctaacttaaagtaagattctgagagttacacagggtaggaaatttgactaaacagacagaaagatgaaataaacctagaccgtgacctcaaggcagtcccagaatcaaaggagtcagagataaataataattacattatgattcaatatgtactataataaaggcatttataaggtttagaagaaacaggatggcatggtaaggaaagggcaagtgatgtttgagcttactgtttacattatgttcaggagtttgccagccagaataagagaacattccattccagagacagggaacagcatgtggaaaagcacagaagcttccaagagcaattgtcgcaattgttctggatactgcaataacatttgaaaatacaagctttacatcttatacatttttgtgtatagtatataaaaatatagtataacatacatata

SEQ ID NO: 38586 - DNA, 2720 bp, Homo sapiens
tttttaagcagcacaatctccccgaacagttcaggtcaatgcaacctctaagtaatactatttaaaactgaattattcctaacctatataaatttataacctaggctccttggtaaatgcagaggggcttctttgtcatgacactgagctcctgccacataaaaggtaacaaactgagtaagcatgttgcagttactctccagatagcactgggtttagagtaataaagccttgcaattaggtgagcaaccagactttgtccttatccaaaatttatcatcattaaaccaggacactctttagaattagtgtctacatcaaattgtaaaaaataaatcaattttacactcaaacgcttggaaatgaatttccaaagaaaaaaaaaaaaacctttcttcagaagccctctcaacctacaatctattgctatgattaaactaaacggtaacattcacgatatattaaaaagccaacaaatagttatgaaggtatgacatcaaagacacattggaaactcgatggatctaaattttccaaatatctctttttctctttatcaaattgtttaaaacttaccaaccttgccttaaggggagagattttgttgttttgtcctacgataatgaatgtaattatttgttctatctttacatggacttttctaaacttccagtggtcttccactccttactgtactgaggacatgtaaaagcctttaaatgggcctattagctatagttgctcaaattatcagactatgctataaatcagcagcaattgcaacatttttacggtttttattttgtacagacaccgaactttaagaaatggtattggaaaatctaacatgaggaggagtacaggggaaagagtagaaggttgttattccagttctagtgactcacagcctagaagtatttcagaaaattggttccaccctcacttccccctcctctccaccttcaaaatgaaataatcccaaatcgtcaacacactctcaatggctttttatttagcaatctaaaataaagtggcaaagtggaggggatacgggattcatccaatcagcccttctctacccacattcccacaccaaaaaatggggatgtggggtgtaatccctgttcactgctgccatctccgtaagaatatggaacactcaagttttcctacccacctagaatttcgcccacccaccaccctccctttcctatgggccccatcatgggggcgggggcgccgaggaggggacagctcccggctcccagcggcgcccccaccccgtgcgaggcccagcgcccgatcccgccgccgggagccgggaaatggcttctctgccttcggccggccggcgaaccacagggagaggcgcccgggactccgcattaggccgcggcgcatccaggcgaccccgggccgggcctcgggcggcgacgccgagatttctacacccggcgcctcctgccgcccccaccccacggcctcccttgcccttcatccctcccgggcccgcccgcctccgccgcggcctccccggcccgtgcgcaccttcttgatgttgtagaggcgggtgagcatgccgacgccccggtcgttgaggatggtgagcttctccgccagcttctgctgactgggctgcagcactgagcgcgacatggtggtgctggtgccgccgccgccgccggccgcctcgcgcccagtcacgggcccgcggccttcgcagcagcctctctcgggcctcctcccctcccgcccgcgacctccgccttaggagagcgcgcccatggccctcgcgccccaatcccgcgccggcgacagagcgagccgcggcggactcctcggagccccttctcccgcagcagcccgcgccccggcagcctcctgccttccgcccgccgcccttccgcccccacccccggcgctctccgccccagcccccaacgagccgccttccccggctgctccactaggtgtggcggcggcggcggcggcggcggcgtctccggcggctgagaacgaggccgcttcccgcagccccggacgggccctcggtcacctgatcggcagcgccggcgcccccgcgaggccggacggggaactgcggccgacgggccctcggcatggcctcgccgccgccgctctggccctggccctggcccggaccgcccactacgcctgatgccgggatgggagtcccaagcggggactgagtggggtcgcgttgtgtgctctttccacttcgccccacaccccactccttcaagttcccaaaagttgcttttccgcaccacccttctaaagaaaccggcagaaactctgctgggaggcggggtgttttccaggcgagtttcgcttaagagtgggctggtggctccaagcgctttttcctcccactgcttgacaggcgctcgccgcagaacacagcagatgttgtgctccgcgaggtggggatcgcctctgccagcctccccagcccatcctcagtctccccgcctggaaccagtttgtgagagaggaggtcggaagtgagggtaactcaagtccttgagataatcacaatctagactttgtcggcgaggagcacccatccggaggagacgcagtaggtcctggcatgtggaaggcaaaaaataaatgtttgttcaatgcctaaaggaaccgctcccatttttttacagcctccaccctaaatcccacttcttcttggaaacattcttctt

SEQ ID NO: 38587 - DNA, 1635 bp, Homo sapiens
aaacttttttttggtaatcagaatcatcgttctataatttatttatctgttttacaaatttggatgcttacacaattgattttcttaattcttcgtatggatggacttgctgcaattcttatttaggatgtatatttactgtatgaaatgaaaatgtaggctgaaagtcagaaaataaataaattttaagctcttgtcaatctacatatatgagcataaattttaaaaaatatatcttttttcccagtttatttaaattgttgcctcacaaatacgcacaacaactttatctagtaaacgttcctcttgcattaacagcaaaagcagaaggtgtgaaggatacaggaagcgagaaataacttttaacgtctgctctagccctcctggactagcctaaaagcagacaggcaggaaaggctttgggacatagggtgatttgcaaggtgactccgccggtctctttcaagcgggagcgatacacaggtcagcccggatcgtccatggtcactgccgtaagtgacactaacagaatatatcagaaaatcactgcctttaaagaaccaggacatatcattcctctctccaacgaagtcttatattttaccattctgcgtgtattagaaagctaaatttaaacagcaacaataagaaatcttccccagtggatccctcgagcctttcgggaaaatgcaggtttctggctgacaggaagaagaaacagcatccaatcggcacttgtgtctcaatgaccaatcaaatttcgccttacattgcatcgctgggataaacggagctggacgactcagtctcttggtctgtggctgctgcggttacctggatgggcgagcacctctgaggctggctttgttacctgggcaataagggactagcagttcagccgttttctatgcctgctggatttgtttgtatttgttcccagccactgctcatgtaatgtactcccttaaccaggaaattaaagcattctcccggaataatctcaggaagcaatgcaccagggtgacaacgctaactggaaagaaaattatagaaacatggaaagatgccagaattcatgttgtggaagaagtagagccgagcagtgggggtggttgtggttatgtgcaggaccttagctcggacctgcaagttggcgttattaagccatggttgctcctaggtgagtatatcgacttgccactagatcattgagtccttttagccagattacgttctcattttccccctttatgcgtaatagtctgtattatcagctatcctgccgaaaagctgaactgtttccttttttggatatggaacttccattagccagctagagccgtttctgcctcacagtgtacccataagaagcatagatgctattctcgtagcacttggcactgcatatttgaattttagaaaagctttcttcccgtttctctaacttctctggagaataacacattgatgttgtgttttcttggcttataaaaaatacagcttgaaaaaaaaggaatgaaaaaagaatgtttgtatcaggcagaactacaagtgacaatggttaaagttatagaaaagttaatactcgaaatagtcctgtgcttgctggcctgcgcagctcttacagaccgtgcg

SEQ ID NO: 38588 - DNA, 2015 bp, Homo sapiens
tttggaaataatcctcatggtatggagcagagaacgtccccagttatacatatgtagcacattattttataaagttagtatttgagcaaaactaaacaatatatttttacacacacatatgcagaatatgtgtatgtgatttacgtatgactatgccctaaagaaaagcagcaaagtgaggggacgtggacggcagggatggcacatgcagaagcacgcaagattccgcggtgtggagggttcgtgggtgcgtataattatcttccattatttacatgtgtactttatgcgttcgttagctatatttttgtatgttttaatatgcaacaaaacggcgtatgagttacgctttaatgtaaaattgtctacataacacaaaatttaaaagaaatggcatacggatagtagaaaacatgctttgaggaaaaagcgtcatgtactaagtccagaaatcgacattgcaaagaggcaccaactgttttcatcaagctgacttttccaggtgctactcagaaaagctgaccgatgatagagcactgggtcaactcacgctaattatgaaaccgtgagtaaaataatctgtgcttctatgtaacttaagtacccacaaatcaggaagcattcccggatgaaaagcattcacagaaccatacgctggttcgccaccttcccggtgcaaaaaccctttcctcggaaattctcagcgcaaagactttgccctattccaaaatggctccggcgcctacaacttaagcatagcgcaggtccggaagttacgcaaccccataaggtagcacgccgttacccgtggggagcgtttccgccatttttgaaaattaattgggaaggtactggttttaagtgtagttgccgacgcaatggcagcctttgcagtggaacctcaggggcccgcgttaggtgagtgaaatattgcttttccttgctggcactgccatccatgctctgggcctggaggcgggcaagactgaaaggcagtcgtcaggctctcgtctgctggtttcagtcgcggagagggaatccttgggtgcccccaagttcatagtcggtcccctactcgacgcgtcgcctccatactgctacaaaggtggcgccgggaagctgagggccctgggagggtgaagaaaaggccgtctggcggtgactgagctgtgtttgtgcccccacacgccagccacgttagactggcccataccttaacctccttctgatacccgagacgcgatgctggttgctggattcccagctggttgctggtccccagaagcatccctgggaggaactgaccgcggtacacgtgggtgggcggtgccctgaagtgtgtgggtgcagtccactgcttcttgatcaccggtgcttccagttcctgttttgactcctctctcccgggctttgccaaaggaatcttgttattaatggaagcttgaatcgtgcaacatttaatcaaccgtgtggttggtaatcattgagatattgaccttaacagcaagctaggagttcgcacgatatttcccgcctttatttggggaaagtgactcttaagtattgtaggaggtatttttctctagtaagtcacgatctgaatttttttaaagattcattcccattattcattgcggagcctcgttgaaatatgtcgtctttgaaaaaaatctaccactttaacagcacgcggatttctttttttcctgctgagttttgcgacttgtgagaatcgtcgaaaattttagaacggaaaataaaccgtcttactgtcatagagacttacctgaaaagttaggttataactttctgagcttggaaaagagagcaaatgtaatatatatggtgtggaaagagtctttagatttgaagggtatgtaatgcttgccatgtttggtgtaaaataagttctttttgagaatagagtaacttgaactactttagtctgtcataaaaaaactaaatgcataatgtcaataatgcagatactctgcattaaaatttatatatagatg

SEQ ID NO: 38589 - DNA, 1221 bp, Homo sapiens
aggggtgggcctgggatctgacttttaagcaagcttcccaaataattcctatacccagcaaaaattgagaaaacatatgcctgagattcacctggctattcctcttatacttgtttaagcaaaatttgtttttcacaaattggccaaaaattgagtgtctgccaagtttctttatttactgtccttaaatcagtaagggactgaatcaatatgcttttctagcaaattgttttaaaagtaaatttattggaaattttattcacttattgtctattaatctatccatctatatttctatatcccactatgtgtcactttctgttcccaattttgggaaaacttcaaggaaaaacataatgttgtgaaatggtaaataagttataatagtaggtaagagctatgataccactgaggataaatgatcatggcagtagaaataccctataccaactttctttgagtgggaaagttaatgaaaaatagcacttttgagtccaggtaatggattcctaattctgtccagcccagccttctcagatttagtcccaaagaacactagtgtatgagtaaattcagggagccgtaatattgagagacttggccaatttgggcctgggacatgcctttctgcatgttatattagggaagaggtcattggcctcagccaagaggcgatgaccatgcctggagcaggagccaaagtcctagccaagtagggtaagagctatcagacatagagttgtgctgtggtaacagtggggaaagtaacggtgtccaactttgggatgtatgggtttcaactgtgacacaaggctgtggctatgttggcatatatgatttatgataacataatatatataatatatattatatccatatataaatatgtacatttgtgtatagatacatatttttccaaatgaatatgaaacacacagtaaatagtcgcagagtgaagtaaaaggtattcattcaacctaattttattgattttctcctgaaatttaaaaaatttccaataaactttttattctcagttttgtacatgacacctgatgatatgtgtccatcaaatcagaatgtacctgatatataagcattaatttccatgttaaagttaaattatacacttaaaaagaacaaaataactttgggaaaagcaaccctagaacacaaacttcactaattcagataatcctcttcattcctaaaagaatatag

SEQ ID NO: 38590 - DNA, 1645 bp, Homo sapiens
ggctcattccttaataggagagggaggcagagcaagatggctgaatagaactctgctgcaatcatcctcccacagagacatcgaactgaacaactatgtacacaagaaaggaccttcagtaataaccaaaaaaaatcagacaagccatcacagtacctgatgttaacataatatcaaagacagaagcatcaaagagggcagaaaacaatcttgtaatgcctacaccatccttctctcatcccatatcagcaccgtggagaaaagcttgtgctctttggggaggaagagttgagtgtgtgtctatgcaatgtaactcagtgctgacctgtcatggcgaaacaaaacatagggtagaattttgttgcagctcacagaggcagcatttagaccagcccagggccagagaggaacttttctcagccccagctcattaaacataagtcctggctggctccaccactggtgaactaacatggcctatggccaagaataaatttggatggtagtcagatcacaaggactgcagtccttgggcaagccttggtgctgtgctggtctcagaagcagtggcattggggtgcacattacagtgcaacactgcctgtggtggccaaggtagtatctacttcacctgtctaccaactccaggaagtagaggtcaaagagagactctttctatttggggaaaggagagggaagagtacagagaactttgtccttcaacttaagtaccaggtcaatgacagtaaaataaagcaccaagtagattcctaaagtttccaattccaggtcttccgcatagcatttctacccccatcctgggccagaatggaatgtgctgccaggaagggaagaacccattacaacaagaatcaccacctgctgactcacagcccttgggtcttgaataaacatcagtggtagccaggtattagtcaccacaggtcttgtgcaaaatctcaggaatgacccagtgccatgccagctgtggtggccacaagactgcccatgtcacccctctcccaactccaggcagcacagaatgtggagattcttatgccgatttgtgggggaagagtgggaagagggcaagatactttgtctgataactaagtaaattctctcttattttacccagccctactaaagtggtgcctgtaggagttggcaagaattagagcattcttgggcttagggcaccctttagtgctgatatggatgcagtgaccacaggtttagatcgcaacattgagtctactctgaatacataaaaaacctgctaaagaaagatgcccagacaaacaaccccagacagcaaagactggaataaatacctaactcttcaatgcccagacatcaacaaatgttcacagtcatcatgcatatccaggaaaacacaacctcaccaaactaaataaggtgtaaatggaatgactaagaaatgtgatctttcagagaattcaaaatagtggccttgagcaaactaagtgaacttcaagatacccagaggagaaattctaaattctgtcatagaaatttaacattaagattgaaacagttttttaaaatcaagctgaaattctggagctgaaaaatttaactggcaaattgaaaatatgcatgagtctctcaacaacagaaccaa

SEQ ID NO: 38591 - DNA, 681 bp, Homo sapiens
agtaaagaaattgaaccaataactgaaaaacctcctaacaaataaaagcttatgaccagatactttcattggtggatgtcacaaatttcaaagaattaacactaacccccctcagacttttccaaaaaactgaaaagaggaaacacttccaaagccatgatgccagcattacattattaccaagaccaaagactgcaagaaaacactacagaacaatattactgatgaatattgatgcaaaaaccttcaacaagatattagctaaccaaattcatcagtatattaaaaggtttatagatcatgaccaagtcggttttatcccgggaatgcaagcaagtttcaacatacaaaaatcaatcaataggccaggcacagtgactcatgcctgtaatcccagcactttgagaggttaagatgggcagacttctcaagcccgacaatttgagaccagcctgggcaacatggcaaaaccccatctctccaaaaaaaatacaaaaaatagccagacatggtggtgtgcacctatggtcccagctactaaggaggctgaggcaggtggatttattgagcacaggaagttgaggctgcagtgagctgtgatcacaccacttcgctccagcctgggtgacagaatgagaccctatctcaaaaaaaaaaaaaaaaaatcgatgtaatacatca

SEQ ID NO: 38592 - DNA, 695 bp, Homo sapiens
aatataaaatcaattcaactggatttctgccagtaacaacacagtaagatctcaccagaccaactaatgcagagaaagaaaaaaccctaaagtatctgaatacaatccaaaaacagctacctgaatgtatttgtgcatttgttatccccgatatgtaaaatcagtttcttcaaggaatagtactcattttttccttatgccctgaattatttagtttactatagtgtttttcccataataattgttcaatatatttatttgttaaactgaatactctgagctcaataaggttgattaactgtaactgactttagcagaggtactgaaatgactcttgccctggccagatcctacacactggttatataaaagtgtacttcaaaagatacaggtctgtaggcatggtctgacacgttacagtggacaagaaaatagctgaatcacctttcccagaattctctctttcatcataaatgtagcaacacttactacgaagtgggttatctcctcacagtgtttaagattcttcttgctcggggccagatgcaagataataggtcagtccctactacacagacataacaggaatgttttcagggcattatttgctgtgtcaatgagtacctttgaggtctatgggaaaaaattatcttaggtttaaatacaagaaataaaaaaagtactttatgaagcta

SEQ ID NO: 38593 - DNA, 2342 bp, Homo sapiens
aaatagtttaaacaataatcattttaaaaaataacagctaagcattgtacatttttaaaaaatagtattttcgtttgtacaaatatcaatgggtcccattcatcattcaagtaccttttcaaacaggatctaagtttgtaatgttaggtaataggcatataggctgaagccggactgccaagattacaattgctggctctgtccttaatataactttgggcatctttcttcctttctctgcttcatctataaaacgaaaacagtaacaactcccacctaagtgtcgttgtgataactaaatgaaatagtgtgtgtaatgtgccaaggaatttctggagctaccaagcacttaaactaagttctaactaagtttggttactttcacgttataaaggaatttttaggaatcacctaggcactctcctaaagtctcaaaataacttaatacagtacttctaaggagttcaagtgcctccttatctgggacgccatctcagatgctcttcaaatgaaagggaccctgcaaatgaaagttaactttttccattttttaaataatccttcgcaggaatctgaagcacgcgacactcacgggccattcagctccgcctctccagggaacaagaaggttaactgagtaacgtggtcacggagcaaccccgagtcgctgcggctgcttagtagtcactcaggatggggatggtacaggggaccattaactggcccggcaggaaaagtttcccggtgaggtgacgatggacaagagtcgccccatcgtaagcgaaagtggactgagaggaagcacaaacgcatggactcaaccagctcgcccagattcaccctcaggccttttgccatctgaaaagggcctatcggatgcgcgacatcacgagtgacgcgtagtcattttcccacgtcccgtccctgccccctcctagtgggacgcagtgggcgcgcacgcgcagctccgcttccgggagccgctcctcgctacccactatgctctgcgacatcgacctgtcgcaaaggccgcgtttgcggggccaatgagcgactcgctttccgtgcggtgcggcgagtgaggccccggtcttcctcctcgtcctgccgcagggccagaacccctgacggtattcagctgcgcgtaagtctggccggtgccatctgtctccgcaatgccccccaagaaacaggctcaggccgggggcagcaaaaaggcggagcaaaaaaagaaggagaagattatcgaagtgagtacccacccctcccccactcacgccgcgagccctccggaaagccacttccccgctccgggcttccctgggagccggctcgcttcctcgggccacgtgttcctcccttaggcctgtgtggcccactgccccttctccagcccctgatgacgctagctctctcattactatagtgacgctgctggcgcccccgcacctgggctttgcctctccgcccacacgcccgtgttcacccacccatgcacccgggtgcgaaatgacccctcgggactggcacagggttttatccttcgctagtcctctcagaattgaggagattttccaaggttatgtgtgaagaaatacgctgaacggtctcgggccagcgtctttctggaagaccgactcatgacgagtctttgtgttcgttatttctttacccgtcacccagggatggtactgttagttcttttgaaccaacaaattacgacttggtggctttttcgatccacctctgaaatgtttaaagtcccataaagaatggaaggactttccgtcacaacccagggtcttgaacgcagagcttggtacttacattctgaagtggattaaataggataacgccttaaaagagattaggtttcagtgtcactaattgtgtgaagtcccgtaacccagtttgagatatatgtgtgtgtgtgcgcgtgtatatatgtatacatctatgtgtgtgtatatgtgtatatatgtgtgtgtatatatattcgtttaacacattgagcctgtagccctttaatggccaaggaacgctattgacgttcttacatgttgtgcacttgttttccaacaactgaattgagtttccttaaaagatgaaccatatttgacattacgtaaacataccatacagaccccaacgaggtatttcttccctcgatttctgctattaatcctcctcataattaaataggacctcttgtactttggatataattagaaaaagccatgaccattttaccgcataaggtgtaaagtctgctcattggatttaagaaaatgcttaagaattttgctatacttggccaggttccaactttggaggagaactgg

SEQ ID NO: 38594 - DNA, 881 bp, Homo sapiens
tgaggacagtttcagcaacaaatgacttaaacattgaatctaaaaggaaaacatggctatcaaacttaaagtaactagaatgtcaacaataaaccttacagatcacctgtcccaataaaaaaacagaatgttgactttttaaacacacatgtatccagaagaattattgggaaattattgtatccatttctaagtatctctaagtactggaaatatgtattttgatatagattcaaaaaataattaatgtgtaagacaaactattttagaagatatttaaaggattatatttaggttggttaggcaaagaactgaaaaagaacaccctgcccttatttcaattctatttgctctgtgaaggagtggagctggccaacttaagttacttctttgtgcccaggatataactcatcccaagtagcttttgaattgcctgggagctcacaaaaggagaggggtccctgaaggatttctaggactatgaaatagtttgagtacaccatgctctctttgtacatagtatccagctgagttcaaagtacaaataggcacttagtaaacaatgttgacttgaatgaattaactagattttttttcctgtagcttaaggttaatctctccagagacaatatcacattgtttttcttgaaatatttctaatatgatacagtttaagccaaaatctgaatcataatacagtgaataatcatagtttcttagacatacactatttcaaaattctttgcccactgaaaagtaagttcagggagacccttaaacctccccttaccctagatactaaatttcactgcttctggcaagaacagatgagttaatgcattctatttatagttgattcatatacttctccatcatagaat

SEQ ID NO: 38595 - DNA, 3335 bp, Homo sapiens
ctgcccgccttggcctcccaaagttctgggattacaggcataagccaccgtatccggctcttttttttttttttcttttaatttgagacagagttttgctcttgttgcccaggctggagttcagtggcgcaatctcgggtcactgcaacctccgcctctcgggttcaagcgattctcctgcctcagcctcccaagtagctgggattataggcatgcaccaccacccttggctaattttgtaattttagtagagacaggatttcactacgttggacgggctagtcttgaactcctgacttcaggtaatccatctgccttggcctcccacagtgctgggattacaggcatgagttaccgcgcccagccataaatctcctttgacaaagtgtaggatacaagatttggaagtgttcctacagactctctagtccaacttctttggtactgacaacacaagaaaattcatcatttagtgtgtgggttgaggactttatccagccaccttccaagcaacaactccatatacaaaaaaaaaaaatgtgttttaaactataagagcttaaatgtgactcatcaacatctgctttcattaaatatttttctctcagagactaaaaccacttacaaagttagaataatacttgcaacttaacacatggcaaaggacaagtcttttatgccactttctttgtaattctctcattttaaatcttaaatgactttcctctatcacaggacttttgtgaggaatgtttgaaaggatctgttgactcatagctgcagaactgcttaagtttgctttaataagggaataatcaaacgcacatctaatttaagtggaaaaccactatattttgatattgtaacctgagtattagaggattaaaagaattccaggctgaggggagaaaactcaaagtttattttggtcatctttctttttagtctcccttctttcttcctaaaacagagaaattttgccctgaaactgcctcctcattgcccagagccttccgtaatagttcttcaaataacagggccctgtgctgtgtttcaaactttgcttactttatctgtacatctcattcctgctctgttctttctctactcagttaaaaaaaaaaggaaaaacatttcattgaagaacataatcattgttaatgtgttgataggctaacatcctgtttcaacaagataataatacccttcacccagttaaaatctcacattccagaaagtccctcaggaatgactaatctggggaattccagtcatggcatcagactcctgggttgaagtatattttagcagttcaggctttctctccttatcctttaaatgacactgtataaagagcttcctgtaattgactttgagcaaagtagactctggaaatcaaacaaccagttactgccagttaaacagcctaagaatccaagaggacaaaaagttttgtgcaaattaaaagttgtttcctacttgtaaattaaaagttgtttcccttcttggagacatcttcaacaaagctaaagcaaaggatagacgaaaatagcaatcaaaggattagtattcagactatatgaagaatttctacaaattaagaaaacgtaagcaatccaatagaaaaacaagcaaaagtgatgaagaggaaattcattaaaaattaaatgcaaatgatccacaaacatttgaaaagatactcagccccatttgtaaccagaaaaatgcgcattgaaaaaacaatgagacatggttttttgtgtaccagattagcaaatatttaaaagtttgatattatcaaaatatgagtaggaagtgggtaatccttagtttttttaatatactgctagtgagagtgtaaagtgataatgccatttgtaagtatctacaatgtttaaaatgtgtgctctttggaagcaattctatgtcttcctattcatcctagaaaatacttcacatatgcataatgaagtatttataaggctgctaactgcagcatcatttgtataacaaaatatggaataatacttctctgctgctttattctccaaactgaaataaataaataggtgctagcaccctcacattctagaggaatccactaatgatccccaaaacttgttccctaaggatatctaaaactgcaggcataatatggagagcgtgacggaacatagccttaagaggaccagcaaacaagcagagaaagaatctgagtctttcaggatatcattaatccaatggcactaaacttgggagccgttctactctgttctacctaaaaaggatttccttttttaaggtcatcaatgtctgttgcaggcatttttattaggtttctagccttctttgcccagtcatccactaacctctaaacctgataccttcttcatagacttttatgccccattcacagtcttcctctgcaccttaatccatgtcactctcccttggataaacactgacatatgaatcatgaagatactgaaagtaacactagataataaaaactatattttgagcccttattaggtgtcaaatgtgagacgctttacatacattatcccatttaatcctcacatcagttctaaaagccaggaaataatgtgaccttcattgtatggatgaggatcagacatggaaaagtttcggaacttgcacagagtcacccaactagaaagtggtagagctgggattctgactgcaaagctgatgtctgtaagcactgggtcgtattcctaacagtctttcctcactgctttctggacttcctgaagcagacttacacctgtaggcaagacctacccagactcacttgatgtggtttcacttccaagattttgatctctggaaatccacaggctgacttcaacttcaaatcctccatttcttcatcatcactgaacttgtttttaatcctaatggtgtttgtttgtgtcttgaactctctcttttcttcagcttatcctcccttctctgagtttatttttaatgtaaataatatgctaattcctgacagtaatacactcttcaccgcctcacagcatcccttgccatttttcttttctctcattcctgtcttagcatttttaagctcaatataaagaaaatatgctttctctactgtcactttctggacatttaacattcttagggaaaatgaatatgctgcgtctacagcaattaatatgtctaattttaactaagctctcattactgcccagaaattattatattcaggtacagtcaactctcaaccttccatgtagccctcctgtccttcagctcccaccctatttctggtaatttctcagaatataccaatcactttctca

SEQ ID NO: 38596 - DNA, 1179 bp, Homo sapiens
aatagaaccaggttttaataggcagcagacctgtaacagcactttcaccccacccccaagggagacttcaaatttgatagcttttgataacaaaacagaagctttacaaaagaaagcattagcattgtttatattctctcaaaacataagttatttgtacagatctatacaaagcttctcctaggtaagcactttggaagaaaggcaaataaatggaaatagatgcagattttttttttaactctaagggagaagattgtcaaaggagatttaacccacacagttccatactgatgtggctaggaaaaaatgtacaaaccattgaggatacattgagtgtggaatcatagactaaacggcagaagaaactatttaatttgttttttgtttttttgttgttgttttttgagacagggtctgactttgtcacccaggctggagtgcagtggcacagttacagctcactgcagccacaaccttctgggctcaagcaatcctctcacttcagcttccagagtagctgggactacaggcgtgtaccaccatggctggctaatttttgtattttctgtagagaaggggtttcaccatgttgccccaggctgatcttgaactcctgggcttaagcaaaccacccacctcagcctcctagagagctgggattacaggcatgagtcaccgagccgggccagaaactaatttatctttatttcttgatagagaaactgaattcaaggaatgtatgagaacctgcctagggttagtcagtggcagagttaggatccgacctttagcttgtgaaattgtgtcaacactttcgctctttctacaacataataatgcctcacaggagggaatgaggagtaattgttttatactctataagtcctagaacagaattcaatagcagctaatattctgttctcttcaggattaaactttttatttctttcttaattccaacattttcacgcagctagtagaaataggactgcaaagtctttttgttttgttcttgttgttgtgttgtttaaagtagtctagactgcaaccattggcatgttactggcatgatttttgacacatctgcatatcaactctaccatgtactttttaaaaaaaggttatgtacatgtaaattttatttaaagaggacgtatattcacgcctaaataaata

SEQ ID NO: 38597 - DNA, 2722 bp, Homo sapiens
cagctaattttttgtattttcagtagagatggggtttcactgtgttagccaggatggtcttgatctcctgacctcgtgatctgcctgccttggcctcccaaagtgctgggattacaggcgtgagccaccttgcccagccaaagatagcaggtcttaacattggttgtgcataggaaacaactgaggtgctttaaaaaaaaaattactgacacctggctcccactcccagagatttggattttattaggtgagatgcagcctgggcatcaagagttttaaaagctccccagatttttctaatgtacagcgaaatgtgagaaacactaaaaccctcgctactgaccagtatggtccatggaccagcggcattgttattacctgagagctttttacagatgcagaatgtcaggcctcacctcgggctgatgaattagaatctggatttttccaaggttcccatgtggtttggtttatatgtacattcatgtctgagaagcatggctctaaggaattcttgtcactgatcattttttctttctctgatgttagatagtaattccatagttaataaaagatgaaagaaaaataactcaactttcattctctaaaacgcaggagaaaagactttcatctgtgacattctgtagcatgataaaaggtgattgatgtgagatgagatccaaatatgtagggttgccagataaaatataggctagtcaattacatgtgaatttcagataagtgatttttttttttatttttagtgaaagtatgttccaaatattgcacagggcatatgtatactaaaaaagtattcattgttgatttgaaatacaaatttaactggacatcctgtatttttatctgctaaatttggcaaccctacatatattcccaggagcctctctttgctctctaggctctcctagttgaaaaaaaaaaaggaaatgataccataaatggccaagtggctgcccctaagctgtctagactgattgcctgtaatgttgtttctcatctagcccagacacaggactctgacttagggaagccaggctggtgactcatctaagtgggaaatttacttgctgactcaggaggacatagttcttggcaaacttttgccttagaataaaccaaaagggaaaaaaatatataagcaaacgttaaatacaggagaatgtattaaaacacttcaacttaaggcaacaggcaaattaattgtatattttctttcagttgattaaatgagattttcgtggtttcctcttttaccatagcttgtcctaaaaagtgatttttgataagagcaaaaggttttatttaaatatgaaaatggtagagagaataaagatggattgaagtcagttgggtacagagtataaaattcaacgctcactttaggaggaaagactgagatagctgacttgcccatggtggcactcagggtttggcatttttctgaagaattaactgctatttaagtcctctcagaggccactttccaagaatacattttaaatcagttttctcaatattccatgtagcttgtgtatacagtagcaaattcttggagcagagatgtaggtgtggcttgggtggaagccctccctttgcaagcctggtagaagaggaaactaaatttacttagccaattctgattttttcatatttgaaaaggttttgatgggaaaaacctgaacaaaataattgtggatatgtgcaattctgttgtattaataatttttttcttaaataagtccatagttgtttttgagtaggtccaaaatggaagttagataccaactctttttttttttttttcttttgagcttctgaatcttttcgacggaggttggacccttatatttaataactattagccatgatattaacaatcctggttttaggactggaaagcaaaacaacctgtttctagcaaatactgacagaaattttcatttcaaagcaaagcccataaaaagcatatcccagaagtttcataaacacaacaatccctgcagacatgatggagaagggactaagtattaagaactatggtgtacaggaaaaataaatacagccacaaaatgctttgtgactgaatctatcaagaaatgaaatctattttttctctgctttgaacttggtctggccatctcgcttgctctgacccaacaaaatgtggcagaaatgatgttgtacaagcaagcctaggcctcaggaaagcttgcagcttccacctttgctgtcttggagcattgccctgagaagctgcttcagctgactggaggatgagaggtcacaagaagaactgagatgctctgctgctaacagccagcagcattgccaaatacatgtatgaggctattttggaccttccagtctagccgtgcctttaccagaatgatgatgcttgagtgagcccaggagatgccaaaagagaaactgctagtgaacccacacagaatcatgataaataagaaatcattgtctaaagctactggggttgtcggggggaggagttgatatgtagcaataggtaactaaaaagatggaatgctcaaacttcactaagtttagtttcactaaaacgccccaaaataaattctaaaaaaaaaaaactcaggtctcgtctccaccccagaaatcctgatttagctaggcctggcaacccactttttatacaaagaccccagatggcagtggtcctcagaccacc

SEQ ID NO: 38598 - DNA, 5529 bp, Homo sapiens
ctatgttcccctggaactcccggtctcaagcaatcctcctgcctcagtctcccaaagtgctgagattgccagcatgagcacctggacctggtccaataaatattacaaattcgaattaggcatttcactttcatttatatacatatcctttcacaggattatttgatagttattaatgtatattatgattgagttttaatagttactttgggaaaacagaaattactgttccagtacttacttgtaagttgtaagtccacacaatgcacttaaacttcaccttgttcaacagattctgtagcacatgaaacacttgaaatatggaagagtcacttctctgggcactttgctcatttcgtctgctattcattcactgattggacattttattgatcgactactatctgcttggcaaggtgctagaaataagaacactaagaaaaaggtcaaggttcctgtcctcaaggccctctctctcagtccagtgttgtcaaggcttgatgaaacacaccagtggcaaacaagcacgcggggccttatttcaccggtgtgcggtccttcttccagctctgaaattatgtctatccaaacatcctaaatcaacaaatcagtgtttctaaatcatacaaccgcagctaacaaactgggaataaggcttcgattattctgacttgatttaaaacgatcactgccaattctttgccctgcgaatcctttctttgactactaagttaagctttacatacctcacttgcaagaggctatgctggctttctggaaatccgtaattaagttcagtgtttgtggaatggagtgtaattaacgaccattaattaacagggtttcgttcgtgagagcctgccaggctaagcagcagaaacacgagaaactgataaaaagctttcctcatttttaaacaacagtcgcacggaagttcccggcgggacaagggaacgtgggtgcccttgctactcccgtggacgcgggtagattgggacgctggaccgtatctccccgcccccgcccccacgcctcctcaggtgctcagcctgaggccttcgtccaggagcgctgccgctgacccaggctcaggagctgggggcccctgcacagacgcccaggtctcgggacaggcggcgactgcactcacggaagtacgctgagctctcccctgtagaagggcgcctctcctcccccacttcctcctccagctccacagcagcctcccgggccggctcctcctccttccaggtctcctcccagtgccgccgcggctctcaggcctgaggtgcggcgctcaccccggcagtccccagcctcagacgctgcgtggagcggcggagccggagggaagcaaaggaccgtctgcgctgctgtccccgccccgcgcgctctgcgcccctcgtccctggcggtcgctccgaagctcagccctcttgcctgccccggagctgtcccgggctagccgagaagagagcggccggcaagtttgggcgcgcgcaggcggcgggccgcgggcactgggcgcctcgctggggcggggggaggtggctaccgctcccggcttggcgtcccgcgcgcacttcggcgatggcttttccgccgcggcgacggctgcgcctcggtccccgcggcctcccgcttcttctctcgggactcctgctacctctgtgccgcgccttcaacctagacgtggacagtcctgccgagtactctggccccgagggaagttacttcggcttcgccgtggatttcttcgtgcccagcgcgtcttcgtaagtggccgcacttggaactggagccggccccctcccccaccgcgcgcacccacccagcgtttctccattgggattgatttccgagagatcccggcgtctgtctgtctcacccatcctacctctcagagtggtttatatcctgggtggaggaaatatttggggaaatgaactccctttggtacccatcacccagttacaccccgcttctcacctcttaaaattggttaggggcagcgggagagctttgaagcagacctgtgcttaaaaatcggggaaagtgggaaatcaacaaaggctggtcttgccggactccccgcctcctgtgccagtgtcgaggatttggtcaatatcatccccgaacttctttttctcctctaccagttaggcttcttggtagcctttttctgctttacaggcttaacgcccgtccttttcagtctccctaaacaagccctcccccactctttccgcctctgtctgattctgtttctccttactccttttgcagacattctgatgacttaaaatgaccatactgtcctattgaattcattgtgtcttatctctgggactgtcagacatttgcacatttgaggttgaacagatgaattgaatgtgtcatctgttctttttatagtgattcactatttaggtcattgttcagaaggaacaagggtgtttgctgagttttcactcgctgcaggtcatttgaatactgcagtatttaataattcagttatgttttcaagttgccaacgttccgcgttgcaagggccgtcaggatttataacagttattgccattattgtgttagaaattgtctccgactttactgaatgctgacatcattctcaccaccccacccccatgttagcgttaggagtactgttttaatgaatgttgactgtttttttaatgatgtttaaatcttgttttcaagagagaaactgttcttagggtgccttctaaacgcttagaccttgtaacaacatatttttgtttccatattttctgtataagatatcccttcggggtgaagtggaggaaaattttgacggttagtacgtggataggaccatcttctactacacacatgcctaatttgagggtggtctcaatggttttctatgactgttaggacactcagcagaatttagtcttagtgtttttctgaatgttactgagtatcattcattttggtaacaacctttgcagcaatacatagattagatgcagttaatggaaactttgttagtggagacattattttatgtagcaagcttagttttatttgttgttagcagttacagtgctttctgtgagacctggagcacagattttccaacatgataaaaataatcattatttaggcaacatttaccaatttcacattccatttagtcattttagtcagcattatctttttatttattgtttttaaccacaggggtgaataccaaacgttatctttaaacatttttgtttccagatactttcaagtgtataccttcatgagacagaacattttagttgctcccaagggttcaatgtgagatataatttgtagagaaattctaatgattttgaaaatatatgtcttcagtcaaaaattagcatttaaatacttcaggccaggcacagtggctcacacctgtaatcccagcaccttgggaggccaagatgggcagattgtctgagctcaggaatttgagaccaacctgggcaacatggtgaaaccctgtcactacaaaaaaatacaaaaattaaccgggcatggtggtgcacacctgtaatcctcgctctgcgggaggctgagatgagaggattgcttggaaagttgaggttgcagtgaatggagattgtgccaccacactgtggcctgggcgatagagagagactgtctcagaaacaaaaacaaaatcaaaaacaacaaacaataacaacaacaaaataaagttgatggcagtgttttacaatgttactgttaattcttcagcagtgctctgagtttagtgtaagataaatgagaggctgataaactttaagtgttttttttttttccatgaaaaatgcagtgatgttgaactcttcatgatatttgctactgctgattacaaaccagggtgactaatctttggccagtcattataatcaatgaatgtgttatgacctcacaggtttacatgacttcactcatagacctttaatgataaagtaaaattgaacttgggtttggttgcatataatattttgaaatattcatcagcaactttgttaccgatagactacagagctctaggtataggtaacttaaaaaatggaaaccaaccttgaatttttttcttttttctttttaaacaaaacgtatataaacacaggtttttacttactgagcttttcagatttaacaaaaatttatgtaaaattttgctgaattttctagaagggcactttaaatttaacaagcattggaatccaaggtacttgggatgccatttccaatattaccagttggatttattgttatttggtattaccataaacttttaaaagaaaaaaagccacataatgaaaaagtatttgtcaattcaagagcgcctttcttctgaggggagaaggatttgtgaggagcagtggttgtgacgtccactcctgttgctttttccagttttggtgtccacataccttggggaagctgtagaattattttatgcctaatttttctctttatagaaaattattattgaattatctgcatagttcatagttttgttgtgaaaattaatgaatcaatatttattaaagggaaggacaaagtactaagcaaaatgttaaggcggcccctcaaaaaatcactccagaaatgagtcaggttcgaagtaaaaattcacaaatatagtgattttcaaaattatgaaaaaacattcgcattctgtttttttttctataagcatttatttatgctatgttgtaaaacttacataaaatttaaagattgtatgcaggctaataattagagtcatacttttcttgtggagactaattggaaaaattaaaaattacatcctaggtttaattataatgatgacatcttattttggtaaacatattttataatttgctaagcacttatatctcatttcattctatagcccacaccaccggggggaagtaaggggaagcagatatactcattcttacagatgaggaggaaatggaggcagaaccgtttgcagtctagttatttgagtaggttggtgtgagtagagggtaaggaagggaaggatccgaagacagggtgtaaaattcaaatcccacttttattaattcaaatattgaatttttaaagaaaataactgaacaattttaaaattcattcttcaaatatatgttatacagttctcattttatgtatttctttattttaaaataatgctataatgaatgacactggattcttgcctttccccccattaaacgctaatggagccttatcttacagttggcaatgtgtagatgtgtatgccttagaagcagaaggtccttcaatggttctcagtcctaacttcatgtttgcaatatctggaaagccttttaaataaaactcttgccctggctgtatcttaaatctaaaagtagatctctgacttgatattccagtggcctggcctgtgaatcatttctcgttgactagcctgtcttaactcaatttgactaaaaagtcttcaccaagagatgttagttgcacctc

SEQ ID NO: 38599 - DNA, 627 bp, Homo sapiens
ggggatatggtagtccctgctctcatggagcttatattataaggagaaaaaaaaagaaacaaataaatattaaaatggccagttttgataagtggtatgaaggatagtaaagcaagctaagggagaatagggagaaatgagaaatgtatgatggtggtacactagatagaatagtcacaaaaagcatctctgaagaggtggtatatgagcagtggacctgaagtaagagagcataccaaggaatgttcaggagaatggtcatttttagaagaaaggatgactgagtcaatggttctaaggcaggaatgacttggctagttcaaagtacagaaagagagtcaatatggtcatagtggagtgaatgagggcaaagagcattcaagaactgggtcaaagagggaaccagaggccaaatcttgtcagtaatgagttttaaatctccataaacaggatgttactaacaagttaaattcattccctgtcaaacaaatatggaagttacataaatgtagtttacatacatcctttcaggctcaaactaatgttgaaagcaagacatagctagtttaccttgctttgcatttacacactgtttgaattttaagaacttgaaaaatgtcagaattg

SEQ ID NO: 38600 - DNA, 2600 bp, Homo sapiens
agcaggtggtggcagtgcaccacaaaggcaaaagctgataaactcgctgtagtagttgtacctagcaacaatagctaatgttgctcactgagtaattacaatacccttgacatttttgtaattgtaccctttaatgatcataaccacctactgagttaggcattattatcttcattttataaattataaaatagctttcagaaattaagtaaataacttaaattcataccataaatgatgggtttaaaattgatcctcatatggttttacaacagctatctcacacattcttaataactacatgatattgtcacagacatgtgactgagattcctaaagtagcatttggatcaagcatacggttttaattatataatttccactcaatcaacaacattttttttcaaacattcacctttatgaaactaaaaatggtttcaataatggaagtaggtgataattttatagaaattttctaggagaaacactaagtattaacttttatgaattatattttgttaattattaggtgattatttgtctttattcacactttaatgtatttcttatagaaatcctgtattagaatattctttgtgcagtgatcttgcagcccacacctaagcacagcatccctggactcaagcaatggccaggtgtgctgtgtgacccacagtgccatgccacttcacccaaaagggatggaaatctgcctcggttttcatttcttattttgaataaacccttttgaatgttaataattgggtattgaccatgcgtcaagcactgtgctgtcactacagatatgacagtaaattagatgacagcaacccctcgttcatggagcatatagacactaaggacttacataaacattcagaaagtcctgggtgctgtgcgagtgaacagtaggatacctaaattagcctgaaggggtcagcgataactttcctgagacttgaaattgagacttgaaggaaatgtttacagaggtaataattatctgccagcggccatgagaaagcaaaacacatagagggcaatctaaaaggaatttaatctgatccagtcatataaatagaattatggtttatattgaatcatttgcctttgatgtcatgaattttatgtctcatagtctaaaggttacaatcctgccttccccttccctccccccgccccatgtcctgggatgttggatagaagcttactataatatttgctgcctgaaaacatatcatgcccttgactgtaagaatactcatcctcttggaacttatttgcaaatctagggctttcaggtaacttaccatctaagaatccacatgctgctagactctaattaaaggattttattttattttattttattttctggcagggaagaacaaacacatgtaccttttgccttctctgtgtcagaaaatgtgccagatgcttttccactttttatataaaaatcataggaaattagttatttacattattcatttacagcttaggacactggtagtcagaaagtttaacttattcagtctcacaaaggtactaggtggcaaactacacctgcaaactcaggtctgtctgattctaaatcctacaaaagatacttgcctttcactaaatgttcactcttaattttctctctcctagcccaatggaattgttttaaaaagcttatcactactctttttattatcatttttgccttatctagacgttaattctagattatcctccctgctgatttgactgttaaaaaaatcatctactatttgcttgtgagagaagcaataaaatttgatgtatttttctattaataagagtaccttatttcaattaaataatatacttctataaaatgatgttatgatcttagcatcatgtgataaattgtatctcctaaatagaattttttcagatgtgagataaggttattataaaaattaattttaaacaaaaacaaaataaaactagataaaactgcaactagttggtgaagaggtctttaagtctagcttaaatatcaaaattctttgttaccacctaggtttggaagctaccttatagtaattttaaattctggcttaattactgataacttaattctggattattgattgacagtggcagcagccacaatttcaggaacttcctggttaaccaatattcattttctcagtccagttgaggaaaattggactgggacaaatacagggaacacttggatctatttgcttctcacttcccacaagtgagattgcctgttttttccctgttaagacttattttatcctccaccttccttgtttctgtaacctccagaatgttagaattttaacccaccaccttttgagaaaaaagccgaatgagggattgaaactcataatgttcaaattcttattttcaaaaaggtacattagggtttttactaaataatgcttcatctctaggaaatttttataacatgacttccccttgtggagccctcagagagccaagcttgattgaatctccttcctcttcccatcaacagcagcactctccatgcttctgtcactttgtgtactactttatacggaaataaactgtccaccctt

SEQ ID NO: 38601 - DNA, 490 bp, Homo sapiens
acaacaaactctacaggaattctgatagctttctatttcctttttttgaagtttactttttgcaagtagtattctcaattgtaaatccacaaaatattgagaataactaggatctgcaaatggatttttgttaataaacattctttactagatttccaactgtatttccccaatggagaacttgcataatctcagggagaggtttgagagccagatttttctcaggaaaagagtatttcctgaataaatacattgtgggaatgcaaatgtttgagcagtttcccaggggaggtttaaggccgtgtgactgcacatttgccacgtaccaaattctaacaagtcggcacagagcctgctttatctctttattaatgtccctgttgggtcccacatttttgggatgtcgagtcatcactataaagattattttggcattaaggttctttatatatgacataaaattaaaaagataaaattttgtaaatttggc

SEQ ID NO: 38602 - DNA, 2610 bp, Homo sapiens
ataaggatgaactagtccaggtttgaagtttggtaagaatgctgcatcagacccagttcaaggtggcttttatttgctatcacttccaaacagccaataagtcttagaatggatcttcaccaggtaagaatacaattgattctgtgagtgaagctctcaggagctctctcagtctattagggttgctgtaacaaaatatcacagactgtgtggcttaaacaacagaaatttgtatctcacagttctggaggctagaaaatccaagatcaaggtgctggtccaatcgttcctggtgagggctctctcttggcttgccaatggtggctgctttctccctatgtcctcacatggcctttcctgtcctgtgtgcacatggagagaaagaaagatatcttttctctaaggccttctttaaggccatcaatcctactgaattaggattgaacatttattatctcatttatgttaattaccccctaaaaccttaccttcaaatgcagtcacattgggggttaggtatccaacattttggggaaacacaactcagagcaggaacattcctagtgtttcaagaaagtgtctctaacttggttgcaagtttgtcttggaagtgggggtcactgcctttctatcagtaggctggagctgaagatacatcagccctagagtgcactttctaatgtgcaattcaattctttcctttccacatagctatagactttgattctctgtttcttgcggcattactaacctttaggcaggactggtcatatcaatcacatttctattgaaaatacagcaatcgccaacttcttatgttgtacattttatgataatttgcccaaactatggtgtttgtttattcgtttgtttttggttgttccttaagagtgaagtactggtctgggaaagtgactgttttctgtaagtgttctccaatgagaaagtgtattttttgctcacaataagaaggaaagacttggcagggaaaacagatcctcaccttcgaattccttctctacccttatttctcaactgtaattgcaaatcacatgtaagagagcagaaggcactgccctggaggtcaattcttgtaacctgaaattgagtaatatatttgttttctgattcagttagttgtgcagactaactatgaaagtacccagaaggcttgttttgaaattggagatctttttcaaaattgcgcacaataaaattcgcatactaaacattctaagggccctaatctaaatatgtaatatttaccacaagattttaggaaaatgatcagttattatcatgaatatgaaaaaagttggaaagacattcccaatggcagcagagagaaaacctggtaaatcctacccatattgtcaacattatctcttcacttttggcatcgtcccctgacttaatcacatgaatggaatggaaatattgcttctatataaaatctctactcaagtggtgtctttcagagcgtaaaataacttgatggttacgttctcttccttcctatgctttttaaatcactgtacctcttcctgtgttacacattatatatttatttgcttactctgtcttttctctcaaatgtaagctctttaaatatgggaatcatgtttgttctttctggtaccctctggaactcaatggatatttgtgaaataaatcttttatgaattaaaaattcggtaaaaattgttttattttgtattttttttacagaaagtaaaaggtcactggagaaatttaaaacaaatatataagctaaaattattttaaatggtatgaataaaagtgaatataatgggtaatgggcctcgagtataaactaatcctttattagggaagacaattattacttaactaatcatttttcctttcttccacctttgtttctcacaaaacctgtccatattctgtactcataaaatgtattctcaaaacttctattaaatggacagtaatggagtcacagcagcatctggccacaactgacttgccaaggagtcaatacctttacagactcaggctaactactgtctgtagaaaggtgtgtggtatagagttctacagagggccagtactagagaggctgctgcagtaaacttagttgtttatattttagtttctggcttagctcatgactgtagagtctctaatatactctatattctaccaaagaattccaaattgtgctttcaaggtcttattatataaaatgtttattgtgtctgaatgaattcagtccgacaatgaatcattaaaatgtgatgtattttatcagcaccttattgatgtaataattcgtttctttttacagttattacaagtgtcaataacagaaaaatattcacagaaatttttctgtttttttgcaaccatttgattataaataaattttcatatcaatttttctatttaaaaatatcgatagcatattcctcttttgatatgatttatatgatcatgataatcgtacaagttctatgtcaaccaaaaattttatttttcctcatctctgcaatgggaaaaattaaaaaaggtttaccaatgcagtcacctagaaattgaccattttatttatgtttgatgccatttacaaaa

SEQ ID NO: 38603 - DNA, 15694 bp, Homo sapiens
gtctagtttatcctcaaactgaataaacatgttttgtattcaacatgcttattcagagaattcctgacatctttaacatcacaaccaccacccattacgtcatcttcttttttttttttttttttgagacggagcctcgctctgtcaccaggctggagtgcagtggctcgatctcggctcactgcaacttccgcctcccgggttcaagcagttctcctgcctcaagcctcaagctgggactacaggcgcccaccaccacgcctggctaattttttttgttgtcgtattttagtatagacggggtttcaccatgtggcccaggctggtctgaaactcctgagctcaggcaatccacctgccttggcctcccaaagtgctaggattacaggcgtgagtcaccgcgccccggccacgtcatcctcatttataacccttaactatttgagcttgatcctaaacagaaagagtaagatccttaccttgctgcaaaaaattgcaaaataagatggaaaaaacatagtgtgtcaataaatcatatcatactatgatcaaaatcacagaagccccactgcatattcagtatagggggattaatgctgttaataatatgacagctgtgaactggaaggaaatagtattttgaagatagatccttggtaaagtgaaatatcaaaaacttctgaaaacttggaaagaaagctcgataaattaggacaaagaatgagcaaaatctgtgagaaattttatagatgtaagtcatataaagagatgacttcttttatgtaatacattttcttaaaagaaaataataaaccagccaggaggggtggctcacgcttgtaatcccaacgctttgggaggccaaagcgggcagatcacttgaggttagcagttccgagaccagcttgcccaatgttgtgaaaccccatctctactaaaaatacgaaaactagcctggtgtggtgatgtgcacctgtagtctcagctacttgggaggctgaggcaggagaataatttgatcccaggaggtggaggttgtagtgagctgagattgtgtcactgcactccagcctgggtgacagagtgagactccatctcaaaaaaaaaaaaaaaaagaaaaaagaaaaaaaagagaaaataataaacctttaattaaagaggcaacttaagagataggattaaataataacagatcattcaagatgcttcagattctgaagcacaagtgaccacaagcaatatattatgtaaaaatattcagacacattttcatatatcttctccatatttcataacatcacaaatacttaccacacacactcaaaaactgtaagacataaaactaaaaagttatcctaacatgtatacttgaaagttttcacagagcaatttgaaatatattctggaatatcagaaagccagaagtttggggataagaattatctatgatttgtaacacaatattggaaatagtggtctaatttttgagaaaattcaaaagtaaattcaagagacttttatgattaaaatgataaggcaagtgaggaagagagaggaatcaaggccacctacagtgagcatctgactttagcaaaggagtcaattgatggttcctggcactgacttgggagcctaaaataaaaaagaacgtagccctaggaaggtgattaattcaaggtgaggcagtttgagtttgaaggatttgtgaaacctccagtggaactatgaaataaaaagccccatatgtagctatggagctcagaatagaggtctctgctggagacaaaaacttgagaatcaggagacaaacgatcattgtttcgtggggtgaatgagatctatttatttaacaagtatatatagtatttgatgtgaagcaagcactctcctgaacgcttttacaaatattaactcatgtaatcctcatagtgactatgaggtgactgtgaagattgggaaggaatatcctagaagtgaactctgaacaaccaggagaaaaacaagtatgagaaaactgagaggaaatggccagcaaagcaggagaaaacttgggaagccgcagttacacaaacactaggggaagtgattattgccagaaattgtcatgagtcaacaatgtctaacgcacagagtgttccagagggcaaggggtaaacacatgcatgggatttaatgacaatggcatcacaagtaaccttctaaaatattttagcgtgagggggcagcagcaagtgagatggggtaggaacaggaacagaggctatgaaaacagaaatttaggatgctattttataaatctgtgctgaaaagtaacagacagaatttgaagagaaaaattttatgaaggttatagttgtatatggttaaaaagggagagtcaaaagctgtaagaaaagtaaaataaatagcagatgcgaacccaggcacaggtgaaaagagtttaactgtgggctgaataaaagatgtatttcccattaaaatgataggttttcttggtgggggatacaaatacatttttaaagtgtgtgtaatgaatgtgtgtttgtgtgtgtgtgtgtgtgttttgccaggggaaacaaagaaacagaaacagagagagagatgagaaagttgctgaagagcagataggaagacgaaaaatttcttgctgtgattaaattttgtgtacaagaaagagattgagattgtctttcagaatgacaagaagcagtagacttttaaaaatgtgaaggtttgatgttctctctaggtaaaataaaatggagcattaataatttagcattaaaagatttctggggctggacgctgcggctcatgcctgtaatcccagcactttgggaggccaaagtggctggtcacgaagtcaggagtttgagacaagcctgaccaacatggtgaaacctctctctactaaaaatacaagaattagctgggcgtggtggcgtgtgcctgtaaacccaggtactcaggaggctgaggcaggagaattgcttgaacccgggagatggaggctgcagtgagctgagattgtgccactgcactccagcctgggtgacagggtgagacttagtctcaaaaaaaaaaaaaaaaaaatctgggctgctggaatcccaactataaattaatagtaacttctgctgccttaaaaattcagcatttctcccctccagatacaggaatttaatatttgaatgattatatttggattttgttaactggacagagataaagaacaaaagaagcaagactttgacaggtgctggtaagaggaaatatataaatggtttaaatggtttattacttaatcatcaactaatcattttttctacatgtgttctttcaatgtttagaaatgtagataatacttcaaattagtaatatcacacttgggaattaaaaatattaaaatggctatgtgcacgttcatatttattttactagagaaaataaaattacattttaaacaatgtagatttccaacataattaaagttattagatatggtggcacatccatctaccgaatttaatatacactaagttaaactggcagtgataatgactagaagataatttgggaataatccacatgatacgaatttgaaatgctgtacacaaaaatagatgcataatttaagatcaaccaagtaaaaaactggtgttcatggagaaaaagatggtttggtaacagaaaatactttaggtcaatgagattatgaattcattttcatagtttctcttctacttaaaagaagtttagtcatctggtttgtttgctcatgaaacattctctgctacattagagagtgagaagactctttaatatgttcataaatccagctctcagagaaggttagcctacacccacctaaagaataaatcaccattaacccacattaatcatggtgattccattaactttatagtgtttggtttagatatctctatatgaactctggctaacaagttgagaggggatgtagctgcatggttggggatggggtgattttgaaaattctccttgctgtgaatgcagctatatgggaagaaccacaaggtatctcctccttctatttgtcctgtctgtaagtgacacttgttactgaagctgcaatcttgtaacattgaggcagacaaactaaaaataaaatttatctgctgtgtatgatggaaataaaaatataggaaaaacctggttccttgttgaaggaaccagtcttgaagcagcttacctctgtattttgtacctctaatgcaggctaataaatttaagctaattatttatgctacctgtgctgtggtggtttcctatcagcagccaaatataacctcacagttgttttgctgtttttgctttcacaaaagagctattaaccaacttaaaaatgttttttgattgaaggatgcttaggggatgagaggatatcaacaatataagcccatgccaaatccccatttcttatcattaaaactgacctgacattaaagcaatgcttaattttttaccataagagtgaaattttgggattataattttaaagtgtaaaatatttacacttaaattacacttataattttaaagtgtataatatttacacagattaaaataaaatatgggaaacaatgaagcaaaacattctaaacttgaaaagtaaattgatattacaaacacagagtgacttaaaaacaaacaaaaacaacaaaaatcaaacctccgttataattgcagatttgttgactaaatgtttactaaaagactggctagcttgagcccagggggcgaaggtttcagtgagctgagattgtgccactgcgctccagcctgggcaacagagcaagacttcatctggaaaaaaaaaaaaaaagactcgctaaagggaaatttctttttggatttggctctttttacaggaagtcatacttttctggagaactacttgatgaaaaatttcttaaccttacttcatgaatcaaatcacaactctttctacattttagattgtgaaaatctcactgataagaaaaaataattgtttctcttggccaggtgcagtgactcacatctataaaaccagcactttgggaggccaaggcgggcggatcacctcaggtcaggagtttaagaccagcctggccaacatggcgaaaccctgactcttctaaaaacacaaaaataagccggttgtggtgtgcgcctgtaatcacagctcctcggaggctgaggcaggagaatcgcttgaacccgggaggcggaggttgcagtgagccgtgatcgtgccactgcgctccagcctgggtgacagagggagaccctgtttcaaaaaaaagaaaaaagaaaaagaaaaataattgtttcactcttttaagtacaaaagtaattgtacatagttttttaaaggagggaagtctcttccaagaataaaactgttcactgtatagaattaatatttttgttattcatagtattaaaagaaaatcccttggagaggaaatagcaataccaggcaaaatgagtatatatttttatgttacaacacaatagcatatagcatatgcaaactatttatttaaataattttaaagctaaaatggagatgaggtcacacatttatacactgctagagctaaaaacaatcatagaaataagtatctgaaatatccagattttttaaatacaaaaactgaagctcaggaaattgattttttcaccccagagtcttacatttacatattggcaatgtttcaactcagacataggaatgtgaccattcaaggaaagggcaactgcaaagcttcaaaagacacgctattctcacaaatattttcctttttgtcacctaaagtaaatttcagattacttacaatctctagaaattaacatttcattaaaccataactaggaaatgtgtatttaatatttgagcaaaagttaagaaacatatttaaacttaattaaaacaaaaataaattaaagaaaattaattaaaacaaatttttatgtaatgttttgagccaaagttaagaaatttaattaaaacaaaatcatttttggtgtttatgtttttgataggtaaaaataattttctcctaccaaataacaggaaatattaatatttattgccaattaagagaggaatgtgagtcctggaagtggagaagtgaaactgagaggcaataagggggaagggggagaagagatcattagaaaattaagaacagggcaaatgtaaacatgtaaacacatttcttaaaatttgcaattgaaatctgaagagaatgtgatatactatagatctccactactaagaatacaacgaacacattgaaataaaaaagaaacacataataaaggaaataatgccaatgtttctttttatagtaatgaatagtattttaatatgcctgttctatgtatagttgtccataactactaaaactctctaaaaatgaatggaattattttgtctggactttatagttaaatttgtaagtttttttttttttttttcagaaaaagattacattgttttctttgaatgaattcacctttcttcatcaaaactactgatttccatactaactaaatttgtttaaaagcaaagctctttatggtatgttatcgtcatttccttaagaggggaaaaaaaacaaataaaagttagcattacatatctgaaccaaacggaggttttcaagaataaaattctgcacaactacaaaactagtagctccaaatgaaaggaaatggaataaaaaacgaatgcaagataatacaatgaatttttggcatgagaggaaaaaaaaagaataatatattaaatgtgtatttctctattataattaccatacatattaaaaatgagaatgatatagagagattgagaaacctgtggctacttttggctattttacctgctttttgtatttgctcttctaggtacctgttattgagtgagataagcaaatggtatttcaggaccaaaacatctgtttcctgaagagttgctcctttaattgtgtatctacctacctgtctatgtaactcttggtaaatgaattaatttgttagttaaaatcaatctattaattcataatgaatgggatatcttgtgggaggtacatgtgctttgcaaatacatggaaagacgagactttcctaacaggttctggaattcaggttgatattacctttttaaaaatttttaaggattaatagctaaaaagatcaagtcagtttcttcatttctcctgaaggcctgtttccatcagattttatctctgcctaggcaaatacattggagacttctcaactttctgcttctgatgatctcaacttgtggtatggcaaaaggagagcaaaatgttcacccaggtatgggaatttctcacaaaaatgttactttattatatttaggggaaaaagggggcaaaatctacactcataatacctgagactggatttctagaaccttttggtttcagatttatgatgaattagaaaacttcctgattagaaaaatgttatagtttcaaatattagctaaaatttttatctgtaagtacaataaacatgacaaataatgatcagtgttttcactcctattaaggagagtatttttagtaataaaaataagccttaatgtgaaaaagctaagaattcatgattgcttctaatgacaagtatctgggaggggtctgagtttggttcaagagaggaactacagctgttggtgactacaaccatctgcccagatgacatcgtgatcaactcctctgaatcactctaaaggaacgagaagtcctggcagctgagtcatgatcccccaggagccattaagaagttaatcttcagtcacttccatccaaacagaagaaaacccatgaaggatgagaactatgggtcctgagaatgacaggtaattggtgccactttattcacagaatccaataaatagtactctttgattcacatatttaatgctcattattgtacatttttataaagacaagttagtctaaattgccattcatctctttcttatcaaagtcctacccaacacatgatcatatcatcagaaatcagatattttcttgttgaatgccctacctaactcattcaattgtaattttctgggaatggtgaccagagatttgatatttttggaagttacatcaaatcctcattactttataagtgatttaaaatttatcacatggtacacttttcatatctttcaaaggattaatatataaaaaatatatagttaatgctcagctttaaagacattaaaggacagagttatacagaaagaaagatccagagatctttctttaataaagatattaaaattgaatctgcttattcaagtataatgatagaacagaaagagatcttaaaattgtttaatctcttccttggctttcaaaaatataaagtcttctttattggagatttctttatccatagaatatcttaattccccactccccaacttcctccccatgtgaagttttatctgtctttaaaatatttgtgttgtcttcttcaggatatatcattgattggcactttttgattctagttttatatactgttatccttgtatattaaagtaggtctcaaatatatctttcatggtggtgtgtaaggttctgagagagctggaaaaaaggtataagctcccttctaaagtgcaagtatatacttgcagagatattttttcacttacattcttggagatcatccatggtctccccatgtcttttacaaaagaggtttccagcacctattagggaagctagatggtcacttgtatcttccttatctctgtattagatgataatatcgaatgcaggtaagtggtggtggggagagtaatattgacagaatagttatatggcaaacattggcacctcagaaattttttgcttttttgagggctcttattaatatttgcaaactttaaaaagccttgaaaagagttttatccagagctcaccacatatagaaaaacagatctctcttgttatgggaattgaggctagtccaaattcccccagattaaacatctttcctcatttggcacattcttcagctgttccttaagaaaaaatcatactaaggaaagttaattctgggaagtctagaattagaataaaattattacactaaaaggaaagcccagatatctctttaaaaatgcttaatttttttgaaaactcacatcagcaccagatcatttctttaatgtgtacagatttcctttcttcattgactaaatagctttgctaaacgagattaaaaccacataactcaaatgagacatataagatcttgaataatgttcacatagctacaacatcaaattccagtgctaatataaattatgtctactacgttttcatttatttgggattatctgtttgcctcaagtggtgtaaaaaaattgagcaggaaccacctgaaacttcctttcacaacaagagaaagttgtaatttgtatttactttacctagctttctttatatgaatgtagccaagaagcaggggaggaaggacaattacaggaaattgtgataggaaactattaggaaaagcaatttgtaatttctgctaaaactctaggtaaataaccctgagcattcatagtctggcaagtgggaagtacctgttgaacaagtgatcacttgattgattttaagcatgtggagctcatttgtcatctaaaatatagaagagagtgagatattagcttcctgaatagctattgttatttagaaaaaataatgaaccaataaacttcttacataagatgaaataactgttttctagaaacagtgatcttatgttcttcattgtataaacacttatgtactcatatcacatagctcctgggatacaataaacaataaatgtatgtttatcttatttaggcaaactaaaagttacaggctctgtgcccttaaatttttaaatttatattcatcttttgttttttaaggtgttatgaaaatacaattttaaaagcccttctatttctaaccaccatgtattaacagggattggatttttccacccacctgaaataagtaaaaaaaaaagacaaaatataagaaattatattggtcagtggagagcagtgatttcatagagatgagaaacaagtgtttagccccacatttgtacatttgttccaccagactgagtggagactcagtttagtttctatatgaaagctcagggaggaggaactctacaagaacccagtggtctcgctgagtttgggagacaaagcagacagtctcaggaggtagttagggtatatagtaccgaacgtcagagaggacagagttacacagaaagaaagatccagagatcttcagatggacttctaggcttcagctcaatattgatctgttgcattcataagagaaaagtctaaagactgggtgaagcaccacctaaaagggttagaggggcccacacatgtaaagcagggaatattttttgttcccaagttgcaaaactctcagttcatggagcattaagtatagtactcaggtgtttgcaacagtagtaggaaaaaattaaccatagaataaacaattctctggtcttgcctaacaaagtttaatagcaagacaacaaaataggaaacagtttccaagtactttaactacatcccagaagagagctcaaggatatttatagaaatacaacatataccaacacccaataaggtaaaattcataatattaggcaaccacatcaaaattactagggatgcaaagaacagtagaatataactcataatgagaaaagtctaaatgacagaaatgacatcaaaaacagaattagcagacaaaaatattaaaaatgtaaagtattttccatatgtccaaaaaactagagaaaagttgtattacattttaatataaccattgtgattcattttctgagatgaaaattaatctttgaagcttcctaaatggactttaaaatattaccaaaatattcataataaacaccattattctggagacttaccctgtttctgagatttactctgtttttaagccttgggaaatgaggaatgaggaatgaagtgatgcttacagatgaattatcatagaattcaaggactggatagaaatagataagggtcaagaagaggagaagagatagactaggttggcagcagtgtggtggcagcacttgagggtgtggtatatttcgagggtgtcaaaggcacattgtgcttggtaataaaaactgtttacattttatcagtgtcctactgatgaatactttcacatttctgatgttgaaatagctttcttatgccctaataagcaatatataatattttttactcacatattgactgggtaattccttgcaataattccaagtctacacagagacctgtggtccatcacatggaacaattgggatagttgtactgcagcattggaacttctattatgggccatgatgtccttatattcttttgtttttgaagtaattttaacacctggttgttccaactaagagaggacatagcatcccaaatagaggcttaaagagaaaacagtggatttgacatgggcccatactttctgttattgtcggtttgaggaagaagaaaagtagaggtgaagaagttgccttcagcaactggtagctactggtagttgaatctcaggctgtggttctacttggcacctgacacttggagaagtgaagacagggagagaaaggtaatgggaagactgggcccccggaattgatacataacaccaagaaagcagtcagtgaggatttcagaaagccaggaaagatggtctattatgaagagaacttgctggaaacacttgaacacttccctgtttctggtgagatttgatatccagaaacacatgtctattgaattcaagtttctcctaatgcacattgtagcaatcagaaagaattatagtactgctatatttctataaaagatagcagaatctacctttgacactaatgcatgaaaatatatttgtgttttaaaaaggcagcctgccaaatttaattcctaaaatgagttaattgctatagatggtaaacaaaaaaggatggctggttgtagaaggcctttattgagaatagatgagttgtattgtagtacaattcttagatcatgtccacatagaaaaaaataaattgatgatataattaacccattttaacctatattataattcaatttaattaatttatactgataagatttttttgaaaatcctagtctaagtaattttcttcacttttcatattgtctgttcctttttattttttgtaaggatgtttactttgcattttttttcttgtattaggtagagatatcagttgaaagataccttaaaattttgtgacactgaatttaatcagccaaccattcctaaggaattgatagcatatttactatttggttagatggataggcactctggcattaaattaagtctctaaagttggcattttttctccattagtttgccatcctgcccacttacctcttgaatttgaaagatgtaaacaaaagatttctaaagattagaaaattaatttttaagataattaagctgttttgaaaattagagtttattacaaaatatgttatcattttatgtattattaatttaacaataagttttatgacagaagatttaagtcaaaatagttgtacaatcaacaagcaaatgataatcatttccttaaatgattatctgactgataaatggacaatcagtcagaccatcaaacaccagttgataacataatccatttggacaggaaccacatttccaaaggagttttgatttagtcattggtggtaaaacaaaagatatcagactgtaccttaaaaacaaagaaacaaaacaaaacaaaaacttgtccaattcagtatacctaatagagataggaatcaaatagtagtatatgtcattaaacttttccaacaagattctgtggtcacttgaagtagaaaaacttggttttccaatataactactcaaatcagtaaaaataaatattttaaagttttactcttattttaaaattacttgattagttatctgtatttacattaatatttttcaatctttgttgatccctaattatatttcatataattttattaagctgtaggccacaaattaacatttcaaactcagccaaatttcagggactatccctctttagtttaaggattagatgagatatggacactgtatattgaaataatcatgcactagaatgatagatttaaaataatctttaaaatgtgttagggagattttgcctccctaacacattttattcaaaagttttgcagtatctctcaaaattgtcacaactttccccctttcatgtaaatattatgcttttacacatgaaatatgactctctgggcagtatgtttcctgcttgagttttgccctttgtgtttatattatctcatgttatacaaagtcattttgtgactaatttccagagcactgagtcacagtgtggctgttgcttatcttttcttttttcccacatggtagtactcttggcccttatttttggtaattattttatactaatgagtgctttttcataattaaataattgtttctctcattatatttctgtggttgtttactgctgtattatatgctttcatttttcactagaagcaaacattttataacaggaacataacagtacatcatgtaggcatgttatctattgttttaatttacaaaattgcacaacatagacttgatcgtaagtattctcgtttaagtatctcagaatatgacctttggtctttggagaattgtaaaatatttccttagagagattagttaatgctggcataaaatattccatttagattacgattattttaatggttatacctcattttaaatatcatcaactaatagtattgaaagattatttgaatagaagaataacagtctctattttatatgttatgaaataaaatggaaaggtaaaccgaactttcaagaacttccaattaaccaagcacaattagtaaagaattctactacaatcttcaaattataaaaaagctacatacaccaattagttacaaaaatgtttatggtttaaaatcataaaaattgcacataaatttgcttaagaactaaatgcaaaatgctgagaactcaagtttggattgcagtttgagtttactctgtttacagggaagggctgattttcattttacgcaaataaacagtgatcctcccctatcagttctttgcctctcagcaccctgcttttcccccgagaaaaagaaattaaagttatttcttatgggctagacagtatattgccaggtactcacaagtaaaatctctgatgaaagttcttggaatgtttttttcaaaacggagttgaggttattttgtttttccttccaggtattgaagacaggatttatcttctctacttcttcttttagaagcagatcaagaaactggcgattgaagagtaactgaaagaaacgcaatctgatcttactagcagtgaaagagcgaggtaagaatttgactattatccagcctaaagtcgctgctgtctgttagagcaaagagggagcctcagagtcggcttcagagatcactggcagttgggaatagcccaacttcctgtttaggtcactgcaactctgactctatttagtctaaacctcttttttctttctttctttcttttttttagtggaggaaacagatgaaggaaacagcttacaccaagatttcagatacgatcattttgaatagctatttcctttactttccaggattgtttttgtaatcagttgaaaaagaatgcttttttccccctagagttagggtttaaaaaattacatatttattattacactgttaataagcttttttgcagtttgtttcttcttcaagttatttcatttgtttcacccactgtcaatgtatttattttttttaaaagtctgagggctaccgttggaggtctctcttagtgagacaatgtaatgcattatctattgcaggtgtcaggctttgagccctaccttagctacttgctaacttggctactcagcccagttatttgaattcactatgcctcagttcctttgttcctaaaatgtcgataataaaagtttctgggcttgatgtaagtactaaatggcttaatacataaaaagtacttaaggcaggacccagcatgtagcaaacctccaataattgttggctatcattatcgctgttttctgtatttctattattattattctacaaaatatgtaaatatttacagatgtcaaccagagtctctgctgtatgtccctatcattgaggttcatccgtactgtctctgtattggaattatggtcatatcagactaagatcactagagatctaataaatgggcagaatctactttgccaggaaggctgaagacatttggtcagaaaatgtaggagtttcttgcttctgcatctcagattctttgtgccttcaatttttcttgctttccttagacctctctgtaaaaggtaacctttcatcttgagtgtttttaatacatattgaataattatttggtggtgactggaacataaattatcgatttaattctcacaact

SEQ ID NO: 38604 - DNA, 744 bp, Homo sapiens
caaataaaattggaccctgtgtaggaaatgagtcaaatccaatgaaaccaaactgcaaaacttcctaaaggctctcactttactttagatagaatttggacattttatcttgatctacaggtactgaatgttcttggaccctgcttgtactcccaacctcagataatgccattctgctctttgctcactacatgtttgccacacaagcttttacatttttcaaacattgaagtgtttcaactaatgagcaatcctgggagcttcagttgctatgggtgtcatggccattccttggcaacctggaaagcctacattgcctgcattaaacgggtccttcctctgccattaccttattacctgctgcagcaagattactctgctactgaagttgccagcagtagcaaattttacctttggaccatggcttggcagagtgtccctcagacaacactgcaggtatgctgagaaaatcaggaagatcagattatttattaatcagtgttgtaatccaagagccattgtgccttagagataccaatcagacctttggttacagacacctggactatctataatctaatttccaaactagttagtcataaatagaacataggattctgagaggataactagaactctcttttggtacaagagatttggaaagaaaagaatataataagctaagtcagggaaaaagaagaggggaagtcctgagctgccagggtagggagagatggccatata

SEQ ID NO: 38605 - DNA, 595 bp, Homo sapiens
tcagaaatatcttccctatgagtgaactccatgcaaacaaaatatcttctgcgttaggttttggaagatagcagactgaatacagtttttgcctagcaaatgttctatgaatactctttttaatagtttgtctattgacatcaaagaaataaatctttttttaaagtctatttaaaattaacaattatacagccaatcctcattcacagattttatatttttgaatttgcctacttactaaaatgtatttataatctttaatcaatacttgcagggctttggcagtcattcagggacatgtgcagaggccaggatacacatgtccccagctaaggtcacacaaggcaaagttctgctttctttttttagctctcatactataaataagtgtcccttttgcaatctctttagcatcactgttttacatttttgtgggttttgtgggtgattttggtatttaaaatgtctcttgagtgtagtgctgaagtactgtctggtgtttctaagcacaaaacggctatgatgtgccttacagaggaagtgtgtgtgttggataagctttgttcaggactgaattgttgcacctgagttcaat

SEQ ID NO: 38606 - DNA, 396 bp, Homo sapiens
ttccacaaaacctacacataataagcaatgataccatggacccaaataatttacagtatcatgcattttacatattgtaggatcgtttcaaaagcacatctacttgtctctgaaaacaaaccaaaggtttttgtcctagataaaagagtaccaaagaaaatatttggcaaagcgtgagtcagcagtttcctagatatagccttttctcttggttagcattttgccctgtttactatcttttttgttcctaaatagctgcagataaaggaggcgtttaccttttgtataagctaggatgcttttagctacagaaatggaaactctaaaaagagcagtttaaacagtacataaatcgcttgtcttttttaacaacaacaaaaccagaagaagtggctt

SEQ ID NO: 38607 - DNA, 918 bp, Homo sapiens
agatgtgagcacaatgttttgttcatttttaatttttgtcatgagattagactttctaagattttaaacaaaggtagtggcttacaatatcttttctatatttataattttgtaactctcaattctggtggttttaatagatagaagtatagcttcatactttcagatttatcctggccttgtcttctccccagtgtttttctggactttttctttaatcactcttattccagtttgtctcagttggtttttatttccaaaatttacctttaatataagacttagtcctgaaaggtagcttttgggaattcatatgactcagattgttccaactctttttgatctgaacacaaacacaaacctttgcccttgccagtgagttggcttagaaaatgccctttcaattactgctgatctcattgacaacctgttgcctattttggtatgttaaacgggcttttggtatcctttattttctccaacactgatgccgctaccatgagtgtcttctgactattaatggcttactctcactcaattccattataagaatctttgagatagcttgtgcattaatttcctatgtcttataacaaattctatgccacatgatacacttggctgcttaaaattacagccatttattacttcacattttttgtgtgtcagaagtcccatagacttaccatacctgtgtccttggcgtagggtatcaccaggctgaaataaaggagttttctgggctgtattctcatctgtggactctactagagaagaatctgcttcagagatccctcaggttgtcggaattcatttccttgcatgcagctgcacaatttatggcaggatgcttcttcaaagctgttaaaggagagacaaaggctgtactttttgtagtctctaatgttaggcaaagac

SEQ ID NO: 38608 - DNA, 763 bp, Homo sapiens
aaatattactttagctcaactatgtcttccctttgatggtttactgtaaaatatggtatttttgttaagcatgtttacttaaaaagacactacctattcaccagaagattatccccctcctctagctccgggatctttttaatctttgaagaaggatttaaaggtcaccaaaaatccatatccttatttgcctacttttctagtctcagggttaaacaaatatatattttcaaagactttgtaaggtagttaagaatttgacatttaagatcaaaagatttttaagagactcaaaaattaatgtccctacaatactgtttaaatctattcatcaagcaaaaaaaataaaatcaattctctaaacaatttgtattgcacatatgagataaaatattgaccgatgcagctactcaccgctgggcctggtaggccgggcatgcctctctctccacgttgcccaggcatgccaacaattcctctctgcccggtcgttccagctggaccaggggggccatctggaccctaatgttgaggacaaactaaaatcagaaactatccagggtaaaactgtacccaaggaatttacaataagttgggtacagctttacaggtttttcagtatgaaaaagaagttctctgtttctcaaaatcatactgcatatgagtagtcataaattgtaatccgcacagaacctctaacattatttaaaggtgaaaacagctcatccgttggaaagaaactgaagattaatgtgaatactga

SEQ ID NO: 38609 - DNA, 796 bp, Homo sapiens
cttcacttgtctgtatatcacatagttcattaaatcttacagatctttgctcatcagtatatagtttctttattgtttttcttaatttttttataagattccactgtattaatctaacacaatctatttaactaattttgacctttacccattagggacatttggattgtttctaatcttttgttatcactaggatgtactttatcatctaaccaggacacttttaagaatgaaagtgaaagttattgtttattatgccaagaaaattgatgtaatttggggttttcctaggcaagctagaatgaaggtcatgctggctattaaaaataatattgtaatgagtaattgttacgtatacgctacatgcaagtatatttgtaagataaattccccaatatcctttttgagttaaaggtataggcattggtaacttgatagatactaccaatatcctttcatagaaattataccactttacactccacaaataatggacacatttccccacaggcaatatgcagtgatacccagtatgctatcaaacattttaattttggccaatctgataggtaaaacatgatagctcagtatagttttcattcacatattttattatgagaaaatttgacagttttgtcatatattgaaaaatcatttgtatttccttgttcgaatgattagctaatttcccttgcctatatttttattaggttattgatattttaattatttatatctagtatttctttatatgtaaagaatattaattctttgtgaattgagttgcaaacatttc

SEQ ID NO: 38610 - DNA, 908 bp, Homo sapiens
tcttcaaagaagttttaaaagttttactttatattattttttctcctggaaatctatttcattctttacctagccaacatgaaaagcattctgcatttaagagccaatgtaatacagggtgctgtggcactgaattacattaggaataagtattccattcactaggacaaagttggcatcattgtagataaatgtgttttctagatcttctctcaggcattaatggacttaaagggaaactgaaaaataacttggaggcactcatcatgcatatggtaacaaatgatcatcttaagtgattcaagaaattctcagattagacataaccaccaaaattcagccccaaatgcttcagatatttaagaagacaggaaattactgtctgcttctatctaactttagatgaagtgagtgagcaaaatcattaatcattaaccccaaaagccaccaaaaaagctgcttaattattctcttgagttgctgaatgctgaaagtgaaaaacactgcaactataaaggtgagtaactggatcaattatgagttggccctaaacattcttaccaaaattggtattgccacctccaggtgtttgtgaacagacaggacagcattccccagggggcgttacagggtcggcacagtccagcacatcctggcattctatcttgtcacagagaatggctccattgtcacagacacagatctgacaaggggcaggtttccaaatgtccctgtttaagtacatctggccattctgagtgcaggctatttcttcaccatatccttctaaaataagaaaagaaagaagaggttagtaatctgaaattatagaattgagaaaataaaaggtgagccatcttgtggattctaaaaaattctggactaagaagtaaccttccaaggagcca

SEQ ID NO: 38611 - DNA, 492 bp, Homo sapiens
atatgtgtcttatggcaatataatttcaagcttggtacaatgcaagggctttaaaatctctctgtgaagtgtattttatgtgaccctcagttgttatggtttgctttaatttatgtaattatgtatgaggtcaatatggaaaactagccctcactcattactggcaaacattcctgaacaatgtgtgtgccttcacgaatcaaactaacaggctcacagtctataataaggtcaaatgaaagcaagcaattgtgcaaacactaaacagttgtgattgtttactgtattacaatcgtactttagagatgacttaacaggcattaaattatatccagaatgctctcagatgacaatcaactgagcacacaaggcaaacagagctcctgctaattgccaaatatcaggacacaaatgcaactctcattctgtcatatcaatataaaagtccttaggacacagtgctgaggtgattgctgtttggaatttaatcaa

SEQ ID NO: 38612 - DNA, 1374 bp, Homo sapiens
tatctaaatattctatagtcacaggctttcaaagcagacagtagctctgggtaatgtatcacaggttttgcaacagaagtaactgaggtccagagaatttaagtcacttccacaaaatcaccaagttagtccatgacagagctgcaattatgatgcagatttcctgtgtcctggtccagttttaatttagaagcttttctttcaaattatttcaacaattcattcatgaaagtaacagcctgtttagtcaaggccctcatatctttaactgcatgtttctctctacacaagtagagagtcttaaaataccagaatgtagacaggcctgagggatgataggacttttttctaaacgtttggctcagatgcctgtggatatttgtcaccagtttaaacttctagctctcagtcaccttctgacccagagaaaagggataccatgctacaaacaggcttttagcgtttaactttgaatttgagacaagcttcctgatgcgagatgaataaagaaaaagtaataataatagtgattcaggcttctgccaggaagctacatttcacttgtagagagactacagtccagttatagcagaaaaatcacattttgtttttctatctgttctgtttttcctcaagtcaaagcctctattcttatttttttttttactatttaattcctattctggggctttgggagatgttctagatagttatataagcagtctattttattttgctaaataaaagatttaaatatgattttgaaaaaatacaactttaccttcttttatttctatggagagtcttatattccttttgattattattattattgtttacttcagagaagaattttattttgcatttagctaactgttcattacagtaaaagcatgctaaataataacacctttatgtaatataatatatgcttatgtaatagggttttacagctgactaagaatttctacagaaattatgaactctttcttttgaaccaataaggtagaaaaatataaagtattatctctgttttgtaaatgagaaaattaagaccccaacacatcatgtttataaagaatttataaggaaagagagctttattgcagtcatctgacacagggccagttgctatctggactctatccacgttgagttagtagaagttgagcaagctcaaacagctgctttctcttcattgactgctcaggcaaggtgcatgccatccctcacaaaaatactgccccagggctcaaataagtctgtcttgacatcagtaaaatatcattaaaataaacagatgtttcatatcttaagcatatttccacttttctcaaacaactctaccaaaggcaaatgtgcaaacaattgcca

SEQ ID NO: 38613 - DNA, 1364 bp, Homo sapiens
gttggggacttttttgcatcaagcatcacattccttacatttatgtcaattactattaagaaaaattatctgctcatttttcaaaaacacctacagagtaattataactatttgggaatgtcttttaaaatatggcttatttcatgtaccttgtgaaacagtcctttcatttattcacatattcaattatttccatactttattaaagtactttattcattttaacataaattaacaaagaaagtggtattaaaggttttaaattaaagttggttgttttggtgggggaggggagtaaactgttctttctagagtcaaattttcaatttctattgtaatttttctgtgtttttctcctcctgttttcttctactttctattcaattatttttgccacccttccaaacaacacatgcttttcatgccattacaaagaaactcaaaagttttcaccttttataaattacctcatattttaaaaacataaaacgtaacataaaaagctccaagtcttagaaagtgccccctctatgggactcctgacagattgttggatattcatttacaaattcgtattttcactttttaagctttttagaacttctgatctctagattaattttataaactttttgaaaccaaaaacacacagaagcagatatttgttctaaaaatatagatatatacatagtatatatacatatatacctgtatgtatgtgtctatatatgaaagtaatagaaaaggttaatgaatgtccaaagttttaaaagcttgagtttgatgttacatggttgagttgatgaaaatctacagtggcttattttaaaggagtacatgtctgtatttgaaattgcaaccctcaagattaaagatttaatagaggaatcaatttaaatattttcttatatactacaacagctatgcatttttgcttaaccataccatataacccaactgtaacatatgaaaattgcataggaaaaaaatgtggtcaccaggcaagatttatctttaaaaaaaaaaaaaaaaaaaagcttgggtctaaggggtaatgtccatgcaaatattccatgccaaataagatatatacaagacatgctgatttcctgccttccgccatccaaccgggaaccaccactgtcctgttaatcaagccagtagggtgggaaaataccactgtttaagaaatctggcttctatcagcctctgtcatggagaaacaaacgagactgcctcccagtaagcaaaagtgatcacattttcacaaatgaaaatggtaaaaagaagtttaaattgttaaagaggaaagaatgaggagccaaagacaaagaaaaatcaaagctatcagagttgctgcagag

SEQ ID NO: 38614 - DNA, 512 bp, Homo sapiens
tttgaatatctatatattctgaattttatattaattgttaacttttgtgtgtattacctatgaattttgattattatagtagaaggacatttgtactgataaaattgagagccagtattctacgataatgtgactaaataaactcttgagtcatttctaagaaaattacataattccaaaacaaacattccaaatatatttgtaatagcttcatgggcaaaagatgagttttgctttgactatgttttccaacaatggttggttggtttgtgttagttttccgattgcatgatgaggtctagcaggtcacacgactgaacttcagtatgcactcaattcttcctcatgtattgattaaagaccataaacctcatgtgtcaagacactgtatcagctttacccataaatttattgggcaggtaataataacaaaagttaatgcatatagcacatactgtatgccaggcattgttctatgtgctttacattttttgactcattaatactcccag

SEQ ID NO: 38615 - DNA, 2084 bp, Homo sapiens
acgttatagctgattgctcctaggctacaaatctgaacaacatgttactgtactcaatattgcaggcaattgtaacagaatagtatttgtgtatttaaacacataaaaggtacagtaaaaacacagtattataatcttacggaatcaccatgttatatgcattgattgaaagatccttatgtgacatgtgactatatttgagaccttggtaattttgtggtaaatccacaaatcaagaagcgaaatcaaaataggcaacataatatacagggtccaagaatatgatacgtgtaagtttacaaaggaaaactggagataaactggcaaaaataaacatgttgagattttaggggttcctaacccacagattctattcactaatgggaaaaggtaaaactcaggaaaccagagaccagcgccctgaaacctggcgggactggccgaatgtcagattagcccgagcagctacactgaacgctgcggaagatgcaccagaatcccggagtaggagccagatttccaaaggaagaaagctaggccctaggactgtggagattctgtagtaacctaagcgatgttcacaagaacagaagaacggctaatgagaggaacaaaaagctgtacaaggaagagaaagctacctttccacccaataactcaacgctgcgaccgagaaaaccagggacgcgagaggctcgcgtcatcctgcagcgccgacaccacagacactagaaagcgacgcctccggtgggacgactggaggtcacgtggtacactatacgccacctttcccttctggcggaaaaagccatagagtcaggttgacaaggcctgagagaaatatgtctgtattaaataattgtgtataggtatataataaaaactgattgtctctaaatctctgttttgctttcaccttttcttacaagtgtcttagtttgacattgcccacacaaaaggtgcctgcacggaagcggagtcctaccaccgagtctcaggcctagaagggcccgggggtgggttctgtgggctgggaacagccttattacccggctcaacgaaggaagttcagggcgggaccagagattggccattccgctactgcgcaaagatggtggaggaggagaacatccgcgtggttcgttgtggcggcagcgagttgaactttaggagagctgtgttctctgcagattctaagtatgaggggcaccgcgctttgtcggctgaggggcggggcgtgagtttctcgagggtcggggagaaggaattgtcagtcgcgttcggactcgcccgcctggcggatatcggctttgggtagagcacgcgcctgtgggggatccccagggtacctgggaggtcccgttaccactgcagattgggttgcgtcccccgattcctggacagtttacctgcaggtagataaaggccctggagccggtctccgtgtcgaggatctggaaggtgttcgggcggctggaaaatggtccaggggtggatgtgtatgccactacctttgcagtacctactctttcgtacagaatcatgttttggagtgactaaaacctaaaactattccgctttttctacccactcctcactcctgaagcatagtgcatgaagcatagtgcagtcttttcggaactttacatgaaaacagatgttagattctttatgagataaaaatacgctaagacttggtctcttttctcagtgtagctggaaaccaaaccactccctggcttcaaaatccacttcttacattatgaaacctttgtaagtttcttaatctttgcctcagttgccatcatctgtaaagggggacaatatttagttcatctcacgtggttattgggaggattaaatgcctcaatatgttaaaactacagacaacaatgcccggcacataatggctcaatgtatgtagctgtaatcattattactgtattgtcaggttttcaaataactttaggtagggtggcacttaataaaatcaaaaaaccctttctgccttagaagagtagagatagtattttatgaaagtttgtagcctccacaatattcttttttttttttttttttttttt

SEQ ID NO: 38616 - DNA, 1573 bp, Homo sapiens
ttacttcaaagtatggatattaacagatgactctgacatatacagtaagttattaaatatgttatgtttaaagtgtgcacaattttaggaattaatttctttttctcatgacttgtatccatcctgggaggacattttctactttattgaattctacaggatattgcttaatcttaatagatttaagagattacattttacatgcctttttcctcaaatctgttctttttaaatggcattcttgattaatcatgtgctgattattctgtttttttagggtaaagtaaaaggggcttttaccaagagtcctttcactcctccactagagggaggtcaaggtctccaggagagggcataaatttcagaacagtcagtattttgtagcagttctgacttaaagaagttgtggggaacaggttttcttgttttgtgtctttgtttcttttttattttatttgttatttgtgtgtgcatctttgtttcttaatccctactgcttataatgtccctcatttagcagtctccctttaacagtgggggatacaatccaagacccccccgccccagttgatgcctgaaactgcagatagtaccgaaccctgtatatactgtttttttcctatacatacatacctgagataaagtttaatttataaattaggcacagtaagaggttaataactaataatagaatgattacaataatatactgtaataaaaagtgaatatgtgcatgctctgtgtctgcctttctctctctttcaaaatatctttttgtactgtacacagctattttcagacctcagttgacccctaggaactgaaaccacagaaagtgaaccctcagataatgggaaactagggggaactactgtagcattctctagcatttacacaatttctgaacattatggcttatatttccacagaaaaagctgttggctggacctgtgactttgttggtagttatcacaagtatcaagcaactaactgttgtttctccgaagatggttctttactagcagttagttttgaggaaatagtcacaatatgggattctgtaacatgggaacttaaatgtacattttgccaacgagctgggaaaataaggtaggtaaatcttcgggaagtatgtagtactattttttaacttatttaaacaagtcttaaaactttagtagtcatttatgccctctccaaaagtagcctgaaggtcagtggggcaagcagctaatcaaaatgctggaaagccaaaaattctgagtccacaaactgtgccaacatttctgaaattcaggttaacatttaactcttggcctacatattttttctttggaatactttcatggatgtgctgaatggtaacagaagctatacataagcctcaggggatccaaaccttcttattttctgtgtattcccataaaaaccgtgttatgcgccaacctcattgtttccgagaggtgcaggggaaagtagcagcagcattttcaggtcctgcttcaggtagttgggcctgaggacagaatcagatgcctaatgagatcgtctctaattcccagcatgtctgatt

SEQ ID NO: 38617 - DNA, 2126 bp, Homo sapiens
cagagagataaggcattttccctacatcatacagcaaataaatgacagtttgtaatataattcaaatatctccattcaataactagaaaccacaacagtcatatagctaaccattcttgagcatggtttttaattctttacatgattttttgtatttattttccaatctataatgtaggtactactgtcattctcatttcacatctggggaaatgaagcacagagtggctatacagcctcttcgaggtcacacgcagctagtaaaaagaggcaggagtgaaattcagccagcctatctccccagtccatggtcttaaccactatactctcacccttgatttttctaccaacttccccattgtaactgtttgtgggtgctgtatctattagataaccataaatgacccaggtgtagagcaagtcctccaacagtgcaaagacaaaatgaaaccactagggtgtctttttgtctaattatcaataaccaggatcagcccaaaggaggcaaatgtacccccaatcccccaactagccacaattcttgtcatcacttgtggtcttttggttcagggcctcagtgctctgagaattcctaactctaccagcattcacattaattttactgaggcattctctccatgtacacagttgtttgttttatagaaatgtaaacacatttcaccactcactgttgcttaaataccttctatgatattcttgccaaatggcctggaaatttgaaacctcccatggtagctcattccatgtttggacaactttaaatgtcagaaatttcttcctctcattgaaactaaatctatctgtagctgccttttattttccctagttaataacttttaggtttaatctgatttttcttattttgagcatttaataaaaatgacagaccttatctccaggaaaaaaaaatttagacatgaataaaaacttgtacaatctttgcggaattgcagtgttctgaaggcctatgaatggtctatggactttggacttagaaactctcttttaataacagcccttcaaataccataaggcaagtgtgttccccccctttactgatgtactgtgttcaagtacttatacctctcttctctctccacggaattgcatctgcttagattttgctgcccatttcagcccacggaaacctttctaaatcaagttctatgatctaatctattcacttcccctccttggagttgcttttaggcttcatcagcatgctctagtcttttcaacacagccaatggaaagatatgggctgggaaacagctggaaacaaagcactgtagttggcaactagcaacctgcctctcaaagaatgtcattcagtgtaagtaggatgtgtccaggacattttttgcaaagatcatttactgcgaccaaagtccatgaatacacaaggaagtgtgcatatttaacaagcagaatataatcatacgcagttaactttattcccaatagagacctgcttttgttctgttttcttctaggttggctaggtcaggaattggactaaccaactcagggagtatgaaaacatgtgagccacatgattaagagcttaagtactgattgcaaaatttccttttatagtctagcatgtgaccttatgaaactcacatattttcccaggtctgaagaccccaaaacttttagccttcctacgtacatagaatggctacccagtggccattcttttggcttgaaagattctcatggtcactaatttaaatgccatgtttggtattaagggatactttagtagtttaatttacttgttttaaaataaactttttcatggctttgagggcaacttttacttctagtgttctagagttttatggacaagttcacattcaccctgtccatgtactccatagattttataaatgaagtcatatcccttttaaagtttatcacttcaaaactaagagttgtaatgaagccagcattgaggagtagaaagaaaattgaaaatgatctgtcaggggaccctattctgttattaaccacccaagaaattgtggacaattaaattatcctttctgggccccttatttctcatatgtaaaaaaagaggtcgtgacttcttctctaaggcc

SEQ ID NO: 38618 - DNA, 1536 bp, Homo sapiens
ggaaaagtacagcaaaaactgaaaatgcctttcatcctgagctgttttggcacaaacgtcccagaaggaagggagggaagaagatttgtagcagctgatcctggaccaagcctgggagcatctagtgctttccctcgctgtagatgttgccaaaatatacagtgagaaacataaaaaggagaacaacaacaacatgatagttttgtgtcctcccccccgccccgcacaaaatgtggtttaggcacacctggttctaaagtcagcctgagttagatagaaagggcagtctggggatgcgcgtccccgaggagggtttctttacacacccctgcgtgccatagaaccgggtcagaatcactgcttagcactgattccaaagttcagccatgaagatttgactgtgttcacaccacactacccacccaacacagaaaaggggtaatttttatttagcaaagatttcataacacaggcttaagcacaaagagctgtagtacttagaagtttgtctagaagatgtattatgtagattatctcagaatattttcgttatcatggtttattctgcattaactgacacttaatactaactagtggttctgcaaaatgtttaaaatatgttataatgctataatctcttaattttcttcccagcaaaaacttctgtttaaatcagattaaataaagattttaataaaaagacatttaaataagagttcagggtgggattagcattgtggtggaacagaaacacacagtctgccaagagaaaaaaaaacagttgaaggggtttgaactttgccctagatttcagtctatgaatttgcagtactttaatatggcttattttgttcaacctaaaaaaatccacaatgtttataacagtccaagagagtgaagtttttgttgctaaatatttagtacaataaaatattaatgctgtgctaaagttatatgttttcacttattcaagaaaaaactgctgatttcctgggtgcaagagatttagtaattaaaataaattaaattacaagaaaatgcataaccctagatattttttcacatgccatttgatagttctccagtactaatttgagtactgctgtgcgggggatttagaaagagcatacaaatagtaaccaaagcctgaaaattcctgacaatttttacattcttaacatagaatcatttttgttaagtgcatgtatcttgatttttgctcactcatcattatcaccctggccacttaactttcaatattaataaggtgcacattcactgaaaatgctgaaacacaatgatatgagatagtcatgcaatctcttgcttggaattacctaacaaagaaagctcaatgactaattcagaatttagtctattactaacattggctattttcactctattctttacctgagttctacaaggctaccttgcctgtaacatgagaaaacaattggccacacaaaaatacaggtcatatttccaattatattatactaaggcttacagcatagcatatgcatgtctgtaaaa

SEQ ID NO: 38619 - DNA, 3425 bp, Homo sapiens
tatatagcaagaagcgtggttttgacagaagccaggccaagctcataatatttctgttcatccatttactagttatgtgacttgaatcaactattttctgtatctgtaaaatctgaaactgatgccttactgatttctaaagaagcccaaataagttagcatgtatgaacatgcttaaccattacccaatacacaggagacacctaaacattttttaaaattctttctaacaagaatactaggcagaccaccacagacacaaattgagtatacttaataatatatatacccagacaatttattcttaagacaccacagagaatctggaagtgggcagtaggctattttatagaccattttctatcttccagattctagactgacatggcaattcctggacagctgatgtcatgctagtcatatgctcagagaccaaagatcagagtctgtactgcccttggtggtacctttagctaacaagaaagggacatgtgatgggttagtgaggcaggtgtggcacctatcatagaagtaaatacaaccaaaggtaagaaaagttgaaactgggtaaagtagagaaggaagcagtccaccaatgctcatcatgtcaaacacaataagtgctttggctgggcagacataaaatgctttctctgtaattattagcagctgttgcctgagaattattttgagcttactccaatataaaaagtaagacaggacgagtaagcacttttctttaactgcatgacctttaaggaagaaaccagaaagcatagcgatttgcttgaagcagccataggaactatctccttaaccttcacatgacttggtacagtccaactccccgacgaagaaagcagggatcttgacagaacaaactttcagcagagtgtacatgaagatttgaaccgtgtttcattgctgcttctttcctttgctgaagtccgctaacttctctgtcatgggcatttgctaacacatctcttgttggaacagcaaagcaaaaaacaaaggcagacaagctcgccacatccttttaatctttagccttacaaatgttttgatttatcaaattcataccacctgatacctctctttgcctaagattagacaactaattaagtgtctagagtgagggcaagagagaagtagcggaatataaataccaattgggagctttagctcctgggtaggtggtggtgaaattagcagaagtagaaatatggaaggacataacggggaagattcatttgaatgccccataggacactgagtttgtgctgtccataagtacttagatatacatatggatcatcagccgaaatagagaagtaactgaacaagatcaatacaaacctacaatacaatgctaggaaggcaccaaaaaattgtgtgtaaacttctctgtctctagaagtcagatttgcttaggaattcaagtaggaactgtagtggtttggaaagcatgtttctatcttaccaaaggaggaacagaagatgaccgaccacaaaatttgaagaagatagactgattaacctgggggataagagagattttctaagccaaaagattgagatcttcacagacaggtagaaagattaaaatgccatcttgaagaccagaagagattgatatgacagggaaaggacacccccaccttcacctgccctcttcaggggcttagaaaaggggaagatgggtcagttgctaccaagtaagaaattgtgacctcttgtaacaaaggagaagacagctgagagaacagaaaactattgagaagcatttttaaagccacaaatagaaatgaaaaattgattgggtaagcttaaatattgagagaagtctacaaagtgattacagagtatctggactgatatggtgggggaagatgaggaagagcagcctcaaagccttagagcatattgggtaactaagcacaaacaatgaataagcagagactctaggcaaatatgaagtggaaaaaatatatttagaataaagtgtgacatgattgatcaggaattcctagagcagtaccaagagacagaaaagagctgagtcactattaagagagagaattgactctcaagctttggacactgagagagccattaaataactcagttccccaagtgtgtttcattccccatgaggcccacatatagaactactcctgtgcttccacgagatttctattgcctttcttctacaaatatctttacactaaatccctcagtacttaacagagtctgacataagttgtccctttttctggcagccaaaattgcctaacatgctaagaagtgaacttcatccttcttacagtgtagtagccaaaaatggataaaatcctacagatttatgctacccagtgaggagtaaaaagagattattaccttctccactgtggacattatcccctttatctttttattggcagcctcatcagtttgctgcttatactgacctctgtgccaagaatcctcaattctttcattacttatgtattcattcaacatatatttattgggctccttgtatgtgctaggcactgttcaaggcactgaagatgcaaaagtaagctacactgtccctgccctcatggagtttagcatctactggtggagacagacattgaacaagtatcacactcatggaagctgattcattacacacaagtgaggagatggccccagaaccactcatgctcaccatgagactgtctgccattgtcctccacccctccactggcaggaaaacagaggagctttagagctccctcccaggggagactcactgtctctaccactatctctgctttatcttcacttacttcagtcagcacaaaaaactcaggcctctcaggagatcccacaaacccaaaccccaatatccgtaaggctgtgacttcagctcccaccccatctccaactcctccaacccttctgctgtaccctggagagtgctcagtgcatcatcactacccaacatcctcaaaatgtccatgaatgttcctgtctcttagggctccaactaaaagccgcctcttccctgagttccctgcttcctctccagccctctcaggttgtgactgttacaggtctctaggcctggaggtgggaaatgtgtcctccttgctcctcctctaaatcgttttccatctctcctcctaacccctaaacacacacacacacacacacacacacacacacacacacacacacacacagcttcgaatctcacgtcatcagacaacactatccattatcttccctataggagtcatttactcatctgccctttcctcctccttaaacttctcccaacacctttaccccacccctctcctgctactcctaactaatgacccaactccccttttcaatgataaaacaggagaaatccgaagagaacttaaata

SEQ ID NO: 38620 - DNA, 1310 bp, Homo sapiens
atacttgttggaatcagatagaaagcagtgtttttttgccaacagacaagaaaactccagtcagacatgattctggttcagcttgacctgacccgcttcagctttgtcctgggaagatcataaatcatgatgaaaacattgcccagtccttgttcccattacctctttgccagatccacacaagttgccaagggactgatttatcagattgttgttatgaggacggctaatgccacattcatcgtgccaggtagtatctgtacccaagatcctccctaggaaaaagcagcaagagttgaagttccgagaactaagaggaaactatgacctaaaagaggtcacctatgaccacgggtcagctaggtgtgaatgaaaaattattctgctgatttatgaagtggaaaatatgacaggaactagtgtttattctagtaaattccatgaattttactgaaatcttgtcaaaaaccaatatgtgaatctttcaaactgttagccaaaagcaaatgttagtggtctgattagtggagttatcccagcaagcatgtaaaatgtcacaaatgactttaacctgggttagccttgtccttccacctgcctctctctgcactgagacacctccctcttgtatattgaggaatgagctttgtccctcatatctttcctgaacccagggagttactctggcatcgtcatgactcactctgcagccgggaaccatctagaacgtgcaaacattgtcttcattgatggaggccgcctttccttcacatggggccagcaacaggaaaggctggtttttttttttttcttttttctgcccaacctatttgtttcccacattgtcatcctacaaagcagtacaggtatatcagttgttactgattggcaagataaccaaaggaactgggcagaaaaagcagtagtttagtctaagagagatagtctaggggcaaagcacccagcaagttgaaggccttgcagtggttcctgcgtgaactctccccaactcataacctgttgccctgtctgcacctttctggtgtaatctctgctccttatgtaatctctagatgcaaacctccacctttgtaaaccctcacccctaacctcagtggtcatccttccctcatgggttagtaaccctgagtcattccatctagaataaattccagaggtgctccagctgggcagtccaaagtggtgccatcccaggtaaacgtcatgtctgggtcctctctgagaatttcccattaatgaaagctgtagacattcctctttcttcagctattatcctgtgaatgactgtc

SEQ ID NO: 38621 - DNA, 1684 bp, Homo sapiens
tttaattcatagcagtcggttactctatcaaattaagctgataactatgcttcttttctttttttttttttttttttggcactgaggtatttggatttctatggctttttaaaaacagctttattgagatataattcacatactatacatttcacccatttaaagtatacaactgaaaggcttttagcatgttcagagttgagtagccatcatcacatctaattttagatcatttaaaaatattttttgcttaattaattaatcttttaaaaaaatttgtcatattattcctgcctcttacaattattgctaggttctctgtaagtatatgttgaatgaaagaagaaaccactttattactggaactgccagtatttttgaagttggagaaatgaataaaatgtaattagcatgaggacaattctggatgagttttttcttcctggctgtgtcacaggaagtctaagaccaatccagcttgtagagcagagaaaaagccacaaaagtattatttttcaacagctggcttgtaggttggatagtctgccctgagaatagaatgagtctcctgatccaaatatatataatattttttaaaggcttgggggagtagcaagggcaaccctatactcctaggtggtgtacagagtagtaataaaaagtcacagggtgggagatcgtgaatgtctttaaaattctgaggtctgaaaaagaactctggataaaaagtaccttaaggtacattacttcactttaaggacaggggagtctattgatgtttatttcatccctagctaagcaaagattgactaagatcagctatccatgactcagcatttgagggagagggttctatttagtgttagcttggacaggacacagaaagttagtacctgggcaggaaatttaaaccctagcagtggtattccaaggccgtggttctgaggttgaggtgagatgggctaaaaatgagatcaaatggcaaatgaaggaaaactggaactacttcacaaacttgcctaggttgagttctgttcaaaacacccacaaacacacattcaccaacattcacattccttggttcatacacactgattgaaaacatattagactttggatttttcttaaataaatcaataggtttttagcaagctaaacatgtttattgttaacagtcaccagaagtttctttggactagttcaggcaacagctgcataaatatttctcacactggctgtctgccccactcgccttttttgcaggaaagaccacatcttttttttttttccagtttagttcactggttgtatctcatgtggactgactaaagaatgttatttctaaaagtaggagtgttccaagtataactatgacttctggcaactaaagagaggccactaaacgattttttccctctattttgctgattccagttcatccttcaagacttagctcagaatattcagtattaagaaatgaagacccatataaataaaaccataaagtaacacaaagatttgaataaatggaagacacgctatttaatggaaagaaaaattaaaaggtttgaagtcaacttttccaaataacattctctgtattgccaatcaaaatctcaatgagctcgttaagaattgacaaaatgattctaatgttcatatagaaaaataaaaatgctggccg

SEQ ID NO: 38622 - DNA, 2580 bp, Homo sapiens
taaacacagtgatgttaattatagcattatctaaaacagcagaaaaacagaaaacaacctaattgtcctctggctaaacaaaggcataaagtatgataaaatactatatggccacgaaaaattgtaacatgattttaaacgtattgctctgcaatgatatccaggttatattgttgaatgaaaaattatcaagatactgaataacatgtgaagtatggcaacatttttataaaattatgggtatgcaaacacatgtacatgcatgcctggaaaggttattcactaaaatgtcaacggcaatgatcttcgtgaagagattttgggtgagttttactctcttgtttatattttcatgattatttggaattcttgaatgagcaaaaaaaaaaaaaaaacaaaaaaaaccactacccaaacagaacagacacaactgaagcatgtcttctcaggaagccttctcttactccaggttggtctggacattgccctctaacctcccatagcagcctatacacatcaccacagcccttccacatcacaatataaagatatttatttgtatgctttgcctttccttacaaaacatcagtaaatacatctgatatcctattattttgtttttcctgtgctgagctcagtgactgacacatagcaggcaccaatgactcaacctatttgggaattcaaactagcctcccctaaaattatatattgtaggagggagtaggtgtgagttttatgagattaagatgtgtatttttccccagtagttttcataagctagataaattgtggggaaatacaaagtaatgacctatttatatggatctacctttaagcaaggttcaaggtcccactaaattaacatccttcagaattcttattggaagtactgctgtttaagtcttgcttgctactgacactaacttgatactgggaatatgtctacttttctgaaactctcacttcctgtatctgcaaattagaaatgagaataattcacccagcaacaggaatgactggcgatgaggaatagctaagagcgtttgctcgagggctctattttaagtatgcctcaattcagctccaaattttccagtgaactctattttgacattgaaaaacaatgttttggcactacgctatattcagagactttcacaataagctcctcttatcagttcaccatgtgatgttttcctttagccagatcactcattttattctggggttagcacttttggaccatagttacagatatgaactgtggatagaaacggtctctaacttgtaactattattatttagtaacgtaaaatacaaaatacatggaagaggggagtaggtaacatattggggtacccagtatgttacctacccaaagggttaaaaggaaccccctaactgaaattatttaaaagctgaaagacctaaactccctatccaaactgttaatatattcataaccatattttaagggatggtgttggttttgtggtgttgatgattctattactgcttttaacaattcaaagacatactggtattaaatgaagttacagctttacccattgttagactaaccagagataagcacttggcattatttccatccttaggtcttcaagtagttatctcatcattagtttgtttccctgtgtttagaagggtgtgattttcacacactcctccagccaatgaaaacaccagtttttaataagcacgtgaaaactgtgactcttattttataaacgttgacactgacaggttgattcatgtctgagtatttgtttgatctttggaagttaaacttggaatttctacaatgtgttatgttaaacatgtgtcaccattttgaacataacatattgcataaaactgtttataagacctgtatgcattgctaagcatttgtttgcttaaaatcaaagatctaagagttttaagaactgcaaaacatctgagaatatgaatgatatgctgccaggaaagagagaaaaacaaaggacgattagaactgagaagagtgaaaaaaaagtatcagatgcaaataacctacaagccacagtcaacacatttgcacatgaagaaaacagtataacataatttataacacattttgacatatatttatattatacttcaattaacttagttctaagatcatacagtcttttccttcttctttacacaaatacatatttcacttttaaaagagggcagtcttacagtcaatttaatgactattaacacatcacaataatagacttttgaaaaagtctgcttatatcttcctaaacctgtgtttccaaatgaatggtataagttgttctcccattaagtcaaccactgggctcattaagatatgtatttgagaagaatgagcttgttagtaaacgtatagataaaagatttaggtaaggattaggacctactaaagtgactgctgttaaaccagctacatctaattctcaatactactaatgtagctctaagcaacctaaaacaatgacccactgtgaaagataagtgattcatctcacttgttgcttactccctgaccattctctcaggttttat

SEQ ID NO: 38623 - DNA, 1651 bp, Homo sapiens
actggttgattctaaaagttagaaaggaatagcatatagaacattattattatgttgatattattcactgcaaaatcaagtattatgattaaacctcaggagaaagaaatgtaatcctatgtaaggaaaactttgccactcaaaggaaatgatttaagaatcaaagtatccaggcacagtagctcatgcctgtaatcccagcactttgggaggctgaggtgggtggatcacttgaggccaggagttcaagaccagcctggcctgcatggtgaaaccctgtctctattaaaaatacaaaaaaactagccagacatggtggtgcatgcctgtaatcccagccactcgggagactgagggaggagaatctcttgaactgagaatctggaggctgcagtgagccgagatcgtgccactgcactccagcctgagccagagtgagaccttttcttaaaaaaaaaaaaaaaaaaaaaaaaaaaatcaaagtaaacttaattttcttttcttttactccagtaattcctcagcatcatgccatatgaaacagtttactttgtttcatgtctggaacatgactttcttgtacaagtttttgtgtttttcctaaagtttcttgttgctttttttccagattacacaagaaacatataaacgcttcatcattgcattaaggtagtccagcttctcctcctatgctccccaccccccgttcagctcctctgtttatctgctctctcttacttgatttctcaatagaaaggtatttgacatcctagattaatctttatgatctctcactttttttctctcatagttactttgtctgtttgctctacttttaaacctagccttttattgaatggagggagggaggggcaatcatatttttaatttcctcttgttctctttttgcataaaaccgtgtactttctttatagataccattctttcatcaatctctgaggacattaactagaattttttaaaatttttcttccctaaataacctgtttttgttggtctatgactttcttttttcatcttagccctatctgatgctgctggttttccccagatatctggccatcagtggttatctgcacaaactcatgagagaaagactagattgatgaattcaagtagctcgtgtggatttcctctgttgttaagtggggtttttcttaacagatatcacaccgactggaaggatttctgtgctagtgggcaagtcatgtcattgggtagacttctttaagatacatgggcagagagcgcaaaagtaaatcagggttccactcccaatatcagaacaggagggtgtgctctgggcaggggttgtggtggggcataccttcaccaagagtactacccccatcctaactgttaacttgcttcagccattcacttgcaaatgtcaccatgtcagtttcactgcaaatgtattctgcatgggtgacaggagcagctgttttttatagatccttctgccaactttcctcactggttctccttatctgtcaatctaagctactccggaaagaatggcttgtacctgtgttacagccttttgtactagggcttatgtatcagtactcactcatctattaatactttttttttttttttgagacagagtctcactctgtcacccagg

SEQ ID NO: 38624 - DNA, 612 bp, Homo sapiens
gaaattattcctcattataaatgatcacaggaagaaaagtaaatgagaatcatgattttagctccagagagaatttcctgtgatacagattcacacatgctaaattcatcttacatacacaccatcctttaaatcaatcactgtggaatttctaactcaataataatactgcaaccacaaagtgatgattcaggcaaattcttcttctagaccttccacagactttgttctccttcactcacccctcctttctaactttttttttaaccaaatggtccaaacaaagctgcttgctaaccccagcacataatcttgccttctgtatcctgggatatgccatttaagtcatcaagaatggtttacttgtctgtcaggacagttgggcaatgtgtttgttatacccattatctcagtgatcagcagagttgactcagctgatctgacaggtagggaggtgtacccttcctccttacacaggggaattgtaattccaatttgtgtcaatccaaattgtgtctgtgtgtcatatgaggggacggcaggcaataatgagtgagggaggttattctgagcctaagtaatattgacagaataggacatgttgccttgtaa

SEQ ID NO: 38625 - DNA, 1239 bp, Homo sapiens
cctacaaaatttataattcagctctttgtgatccaggctcaactattctgccttgaagctattcttagttttcaattcccttatacatactcttacatgaaacatagtaaccaaagaacagatgttaaagctgtctcaggaacatcacactaaagggactccagtacaagatacagttaggaagcctgagttaagcaaacttttaatgtttaacatggttctcagagaagtgctacaaggttaatcattaacatatgaaatttatgaacagccaaagatacaaaaaaatctattaggtcaatgtccaggcatcccaactttgtgtgggagccatgggaccctccatccagaggtggtgccatctaagccctcctccctcaagtgtggcatgcagacattccctggttgtttctctcctagtttgttgtttcctttgctacagaggtagctcaggcattggtcccatgaataaaagggcttaattatataacaacactcacctttaagtctagcattcttgtccacccagtcaccgatgatggctcccaggaccagaacagaccctgccaccaccagcccgtagactgctgtcaaaaggaggctgtttccatagagctctaccagaaacacagacaccgcaaagtgccacatccgatctcccttaaatgaaaagagaaaatgttttgatggaatatttttcgtttctagtctattgtactcaggaagttgcttccttatcaaaagggcacttcctggctacattatgagactttcaaagtcagtaattactcttagattgaatactgctcagatgttaaaacgttcatcccagcacaatggaaaatattcttgcccaattattaagtaaacttgaaaaggcatgatattaatgaaccgcacattctctttttcattctagaaacaaaatgcagtttccagacccaagatggctttttgagacaaaaacgtgttctcctgtgtgtcaggtttctcctggggcctggaatttgcctatcttgattgcagaggcataaagtagtttgctattgaaccagaaatcaattacagtacagttcacaaacattagtataccttgagcatcaagaaaaagccagttttccaatttgtaaaatgatgggaatggaccatatgatctccaagttttctttcatgtctaatatcctaaaacctatgagatttcataaagtcataattcgaaagtcataaaacagcagagcg

SEQ ID NO: 38626 - DNA, 2676 bp, Homo sapiens
ccccaaactttatctaactatagataacatttttaaagaccagaatttttgtcactcagatatttgttctgggggtcatttatgtttcaattaatcttagaatgttattattagcttaagtcagtcactctaccattctattgtattctcatggtgctgcacgctggaactaaattttaacaaaaaaagaaaacaaaatattttaaaatgtgaagaagagaaggtatatgagacatccatccatcttttgtagcagatatgtctatttaccaaagctactaatgcaacataaaatttaaaaacaaggcaaatattcctttccttgataatcttgtctggatagttgtctatctacataaactacgatgatctgataattaagttgcattaactaacactcatggggaaagatcttcgatgtaaataacgttttcattaaagcatgtgtacttggatgatttatttctttaactgcttgacaaaactggaagttggcttaatacaactggctagaacgaaaggaaataaaaaattgcgcaactgtgttgtaagactatgcattctcacttacccaagtagagagagaatgaccaaggtagagaaggaattttgcagaggtcaggtagtcggccaaggatcctgcaaagacacaggcggggtgacaaaaagcgatggtagtcacttaatgagctgagggcagaatgcttatccatttgatctcattagaacatgattattaaaaactactttgcaggacaaaccacgtacattttatcaagttacctatgaaccgatgtatttcgttcacttaataccattcactaaattcagttattgacctagtcaataactgcccaacttcacatttcacatacagtgaagaaactcttgtttcagcattcttttttgggttggttggtttgtttgttttgtttcttttttacacaaggcaatccaaactgcccaatctactccatccgtgcctgtgtgcaaaccccttttcccacaccctgaatttcctttcttccttaacgtccaccaaatatgagtcaaaggatctttttacaaagctatggttcacagcagagccacattcctccagaactcgtgtagagttgcttgtctccaaagccccacctgggtttccaccatatgctttcggtcaacgacactcaccacagcatcctctctggcggttgtgatctcccgccctggtcatgacactaggcgaccccgctggctcttctgcggctgctatcgctgctgctgctctcgctgaggtgcttgttaacaggagtgcaaggaactggagatagcacctctaaaaacacaacagccttgggcaaaaagactacaacgacgactttggcaaagaacaaaagaaaaggggcccagggattttcttttttccttctttccaaacttagctaacactgtagctgaagttggaaaggcaaagccttatggaagcggtttgggaggctcagcaggtcgtccgagcctagcggacgccctgagccagctctctccgccgccgccgccgccgccgtgggccgggcccagctcttataccgagtcgggggcggagctccctgcgacctccgactggggccgccccgtccccttcagggccgcccgggcgtccccgcggcgcgagacgagctcccgtcaaccttgcgcgccgggccgtccccgcgcccttgcccggaggagtcgcccaccccgggcgcaagcgtccaaccggccgcagacaccctgcgcggcttgcggggaccttcgcctcgacgcgttccactccccgggttttcctgctctccgggaagccgcgagggcaacctcggggggcggccgtggggctgggaaaaggaggaaggcgcgtggagccggcggggcggcgtagggagattctgcgcgaaactaagcgtcaggtgctggaagaaagcgctgcgcaccggctaccccgcagttcagggaaagggcggccgccggacggtcgcagtgcaaagctccagcgcgagcttggtgggtggggattccttttttaacgaaaataatttttaatacaggtatctaaataaatataattcatgccacagaggccgctttcctggccgtcccattccggcccgcctgcagcagagaatgcctttccttccccggactgcatagcagggcttccctcaaagaaccagaatcaaagggcaggaagggggcgcaaagatcagagtccatccctcttgagaggagcaaacggaggcttgcaaaggtgaagtcccgcagcgagttacagacctacccgtatccccaaactggggcctccaaatccgtcctggagacagaatgaggatgctgcagccccagcaaacccttcaccatcattccttctccctctgtaccctctcaccccgcccccacgcgcgcgtcccttccccacctaacctccaaatgccccagtgacaggcttaccaggaataccggttatcccagttgtgtccctggatctgtccctgtccagataaagccattcggtggcctcctggagggtgaggtgaatgactaaagaacaccagactctagccttggttgacttcgttttaatcctgctgtgccaaaccaacccctggggcataccagccccttttgccagtaggttaccttacccttcttaatctcacg

SEQ ID NO: 38627 - DNA, 1997 bp, Homo sapiens
aatgctggagaaatatgctcacaaaatatgcatattttgttttattttattttcagatggtgtctccctctattgcccagaatagagtgcagtcatgcgatcctggctcactgcaacctctgcctcccgggttcaagtgattctcctgcctcagcctcccaagtagctgggactacaggcgcccaccaccacactcggctaatttttgtagttttagtagagacagggtttcaccatgttggccaggctggttgcaaactcctgacctcaagtgatctggccgcttcggcttttcaaagtgctgggattaaagttgtgagccaccacacccggcaaaatctgcatactttgaaatcttgtctagggctagctcttggatcgatactttatttcaacatgagcagcagccttatctttctcaaatcaaatttgtctgccttttctggtggaaagttaaactatcattgagatttgcttgaggaaacaagcatttgtgttttttattttacaattggctcatatttgagggaaggaggtagaaatctcactttctacacatatagactgaaaaataaagcatagcatcatagggttgctttgaggattaaatgggttaatctaggaggtagagcagggaaatctcatttttaacttaatctagaagttgtagacttgatatttgtcaattggttaactgagtcttattcaaattataattatcaatctcctaataaagcataacttttttaaagttgttctttcaagatatctattattccctagggaaataaaaaaagactataaaaatgcttgccatcagttctgctgttttcctttcagaagtcatgtatgtgctgttcaaggtcatggatattttgggatttgagatagcaaacaatcctgacatttttgatcaacacttgcaaaatggcaaagaagcacattatgaaagaattgcaggaagtggagctctgagtagtagaaagcaaagagaagacacgaccttgcatgcttcagccttccacaagcttggatctctcactatctcacattcccagtgacgtgtgtcagatatcagcttcagcctcttaaaggactgcagactcatactggtcaaaaacaaacactccgcaaaccgaaaacaactcagtcattgcctggagtttagtattaagggaaaaagtgttttgttagtttcctctttctaaacttaatagtccgtgtatggatatttggaaaagaaatgtcattgtttaggcttctttttgctaggaaaaaaggaaggaaggaaagaaggaaaaaggaaagaacgaaggaaggaagaaacaggaagaaacctattagctatacattcttttttttttggcaaattcctcttccaaggtttacaacaagggaaaaaaatatcatatatggactaatttaatatgcattatcttccctagatagaggtgaaagagtcatatataaccaaactattttttttcagttgaaatcagttggtgaagttccattataataataacatgtgaatcaccacaattcaaaagccagctatggcatctgcaggcatgtgtgagccttgataccactccttccctctcacatacttgctttcagcttccctgccggagtgggcatgtgagaacagctagctcagctctcactagtgagaggaaaaaaatatacagtttggttttcattttttgctgacaccatatatttaaactggcatgtttagacattttagatggcaaaggacccttaggtcagaaagtcaacctttaataatgcagagaaagcaattgaaaacatacttttgggggctgtaaactacaattcccattttgctattaaaaaaaactcatgtctttatggtttcatgactagctctttcctattggaaatgcaattaggctctgctacctccatttattttagttatcacatgcatttttatcatacatatttattctgtctctagcagtgcaaagagg

SEQ ID NO: 38628 - DNA, 1632 bp, Homo sapiens
agaattgtaaaacagcccagtcaatataataaagtcaagtccagagcagcactgaaagagcatccagtaaataaatctcttttgcctatttccaagttttagtcattttttccacagaaatgagatattgcaaatattgcacgggacatagatgcactaaaaaactattaattcatctgaagttcatactgtattttatccggcaaccctaaccacgagttaaccaaaactttaccaagtctgtacagttcttttgccaacacggtatctcttaaatctgttccttagcttcatctttccctagataataaatatcatattaagcgctgtttctattgcacgactattcttcatatttaccactggagggcgcacagaactcgtagtatactagataagaggtcatgaagaaaccacctgagcgtttctgcatctcaaccacaagaggccagtacaggaacctcagattttgcaaccagactgtttactcgctccctaagcagccatgcgcaggcgcgaaactcctccccaggccagacccggcctgcgcatgcgttcaagtgagcgcgcagacgctattggtaagactcgcgggaaaagaaagggtgagcgcggctggaagcgcgcatgcgctgtggctaatgccgtaggctccttcagggctgagccatcccgcgtgtcttgcgctcggtggaaatgcccagccgagggacgcgaccagaggacagctctgtgctgatccccaccgacaattcgaccccacacaaggaggatctaagcagcaaggtgagtgtgagacgcgacgaaaaggctcctggactcgggaccgggcgccactggaccctgaaggtggtccgcagcgggcagcgtggggcctgcctgggcctcggctttgccctgctactttgctctttttattcatagcacttgacagccacagttagtccttttattttctgaaaacagttgcgaaaagggagatcttgaaatttgtcccgagactggacccaggtgacagtggggcggagttttggttgggtgttttcctccctagtctttttaaacttttggaaataccgcccaccccaaatctgttccatcaaagatattctccatccagttaaccatgccagcaacccggggtccatccttgacccccatcatggaagcctatcagttctacctttgaagctcatttcaaatatgtccctttatcaccgtgaacactcttaccaccccaaataagccaccgtcatctgctatcgggacccctgcccccggcaaggccttcctaagcggtctctcctcatccacctgttagctgctgcttctccgttaaccagagcaatggtcctaaaacacgcattgggttgtcactcataccaaactgggggagagaggaagccaatataatataagccttaactgccataaacaaacaacctttaaagataaatgggggtggcgagggttatagcccttcaggtattacatgtcctagattctactttggttctgtcccaaacttacaatgacatcttgggcaagtctctttaatctttctgtatcagttaccttctttgaagtaaagtgaaatgtacacctgtcattcctaaaatgggaaagccctgt

SEQ ID NO: 38629 - DNA, 1485 bp, Homo sapiens
atctaatattggcacactgttaaatatagctgtgagatgatctgttcaactgtaagctccttggggtttcgtgtctgccctgttttctagggtttccagcttgtagctgggtgcctgactcataataggtgttccataaatgcttgttgaatgaaagaatgatgatggaggtggtattccaactcgggactgcctcaacgcccggcgctgtctcctctgctactctgtttcggtgttttagcagaggcagatagtgagggcggcacagtgcccacggcatgccgctggactaagcgctaagcgggcttgggatgatgcgcacgcggggggtctgagccagccaaggggccgggcgccgcctgggggcgctgcggctgctgcgggacgcaccaggcctagtcgcccgcaggctccgcccgaggagcagcccagccaccccagggcccggaggaccaaccgcttcgacccgcgcccgggcggcggcagtgttggccggcgaggcgaggagggccgggccgccacggtggggcgaaaagccctgaaagttcctctcagttccttccggtgcgcctcccgctcgcccttgcggaggccctgagggcggattcaaggccccgcgagaagccatctgaggcggcgacgactgttctcagccccacgggaacgccgcggacgcagcgtccctctcccggacaagaaaacagccattctagagtaggttcctcccctttccttgttttttcccctttcccgtgcccatggctgacgcgagctgcttttggacgtgggtcccgggcttgactggacagacgtgggttctgtttctgaaaggcgtaaaacctcagacttgtcctgcaacctcctggtctccgtttttgcctctataaagtgggcataacaaggtctgactcactgacctggggtctcaggtgtggcgcccaaaccagcactatcagcatttcctgtaactttactaaaacgcatattttctggccccactacagctcattgaatcagaaactcagtggtgggattcagcgatttgtatttgaacaagccccaggtgattttgatacaagctaaattttgagaaccactatataatagagaccaatcagatgaaataaatcaaaccattatatagtaaagaacctggctcaataaatagtagttgtggttattattatttcaggaatagacaggcattcattggcacagaaattgaaggttaagcaaatgcttctttccttttctttttcttttttttttctttttttgaaacagtgtttttcacacttgttgcccaggccaccgcaacctccgcctcctgggttcagcctcctgtctcaagccccgcgagtagctgagattacaggcatgtacgaccacgtttggctaattttgtatttttagtagagacggagtttctccatgtttgtcaggctgttctcgaactcctgacatcagttgatctgcccgacttgg

SEQ ID NO: 38630 - DNA, 1884 bp, Homo sapiens
agacaaaatgtggattttctaaaaagaatcaaacaacaaaggcagatggaacagataaaaatactgttaatgtattccatctcctaaaaacatctttcaaaataaaactggatcatttggttcaaaaacaagagttaacataaacacacacacgccaactgcaacctaacacctattttatccttaattgcaatctttggaattaaatctccactttttgctacaggttttgtcataacaaggatcttcccaaatccttttcccccaaaataatagcagcccatcactaaagcacactagtattttcacactgcgaagcacctaattttatgcccccagatcatccgttctaaaactttctgggtgttaaagcagggcctttctccaccacactaaagggacacggcatcccagggattagagatgagcgacctatttgcagaaggcagttgcgggcagtgcagcccagacagacacaacctagaggaattagatttgcattaacaaaatctggacaaggaggattgtacgaagcactaccctttcgggccaagaaagctgcaggctgaacccacgtgacttgggtagcgctggtctcctgtcggctgtaaggcggcgacgggcgcaaactggaaccgcttttccaggtgcgcaaaagcgtcagtggggtgaagagtgagcaatttcacccaccttccacttgggcggcagtagctagcacttgtctcctttccctactaaagactgtcgactgcccttatcgctgcaggagaaagcccgaacctggcgcccggaagtgatgtcatcggaactgtgcaaggtcccgtccagagctggctgctgttccgctagcgagcggcatgcttagtgaagaaaagcttaaaggccgtctttgcccaaaacgctctctgtgcgcacctgcatttcccccagatttgcaggtgatgagagttctgtaaaattacacagctagtgactgatccagcggaggccgaatacaggtttgtctgactacacaacatcaagttccaaacactaagctacattaaaaagaaattttttttttgcccttggctggaatttggttgctactgtgagaaaaggatggggtagattattcgtcattcatttttaagggaactatcatcaaatctaaacttaggggtgaggtacctgatactttcatcggagaaataggatggaatctagcggcgccccctagcagggttaccaaagaacggaagtgtttctcatcggacagtgtaaaccgtttctcccacttcactaggaagaaaggggctggcttatttttacaattaaaaaaaaaaaaaatcgggagactgaggcaggagaactgcttgaactgggacccgggaggcggaggtagcagtgagccgagatcgcgccactgcactccagcctgagctacagagcgagactctgtctcaaaaaaaaaaaaaaaaaaaaaaaaaaggctgtggtaaatattcagttgccttaaaccatcctattttcataatgcattatgttgtccttccttactatgtacatgaaattcagcatggtatgttttcaaagtcttgcacctgcttttttttttttttttcttttattggtttgtgaactttgttttgaacattggacagatttattccaagagtcaggcttttcccctgctggtatttaagattttagtaagcaaggaccttagaatccactgttgtacagggctggcatatatacctgcactttgcacgttgtgaagctctgggtataaaagatgagtaaatcccataacaacatgttgggaagccacagagtacagtctagaggtggatacagataaataagtaaataattaccagaatatggttgaggtttttt

SEQ ID NO: 38631 - DNA, 2463 bp, Homo sapiens
agccaaaagctaaatttaccaacataataaatttatattaaaaagaaaaagcagaactcaccgagccagtgtgtcaagtagtcagactcttatatttgacttaatgtatccataaagaatggtcagagttcagatcacttctttctgaatactcaatgtggaaggtacatgctgttgacataatgtggtgtaaaatttacatggtcaagggataatgtttgtttctcaattttgtgattaaactaggtgaaaataaggagtcttctgaatatttctctagtcaaatcaaaaacttcagttttctttcttctttttaaaaaaggttttcccttctcctttccattgaagatggactccaaaggaagaattgataatagttctcagttcttttaatgatggtgtttacttgagactaagaattgcttaaaataaaactgtcctgaagaacacctatcatccgacggagggggaaaacgaggctagattatatttggaacagctgtgattttaaaatacacaaacgcttgtattacggagttagcatacagagaggaatttctcataaccccttccagcaaatgtttccggagtataatgctccttccgctctagagacccatagaacaggcatcaagggttaaggggacgaaaagttagttacactaagaccgctaaagcctccaatttatatgtgtaaatctttcgtctaaacacccatgatttatcatacattaaactattatgtcatacttagaacatgccaacactcaagatagttttcccacgttccacaggatggaggcctgaaatttacatctcagctggaaggcaaagctggtgcggtactcatcctattccaaccagaaaaccttttcccagcaggtttgccgcgctgcccacgactggcaaacaatgaccttacagaccgtgaagaggctgttggctctgccctcgccggtgcctccgaagacggcgacccgcagcggcccctcaggggagtcccccctgctagaccgacagcccgagcgctctgggccagagaaaactcagcaaaagccgccgctgctaccacctcagcgcctcccccaacccgccccttccttctcgcggccgcacgtcacgtcaggaccctggcaagacaacgaggatttgcgtagggggcgagcctctgaggccacttggctcttacggccacgcagggcgccgcagatgcagccggagcccgcttttccctctcaggacgacccctaggccgccagcagttccctaccgacgaaggcgactgtacagcgtccaccgcgttcgtgcccacttacccgccgccccactccgggccgccggctcgcagcaggaccagcccggctgctacggccgcggatacacgccctcaggcccggcgctgcgcagcttgcggaagctttcccggacagactcgctgccagcggattggctgcgagcagcgccaatctcacgttgcccccgggcgaggcgggactcagtgccgcgctctctgcacccgctctgccgcgcgcgtgcgtgctgggtgcgggtgcgggtgcggggttgggcctgcgcatcgggtgagacgctggctgcttgcggctagtggatggtaattgcctgcctcgcgctagcaggaaggtagtgtggtgtgactaacgggtatttattatatcctcgatggctcgagggccccgtcccctctactcgtcctggtccgggcgcgaacgctatagggcagctaagggcgctccccgcggggcgggaagcgaagccgggcttgcgggcgcgcacacgtggaacgcgttttctgagcaggtctgggctccggggtgttctggcttggtctttgttgcgtcccattccccagacccttctgggtggaggacttaaaatttgttttccaggcagcagatttaacccatggcaactgtaactcatcttgtgtgagtggcggtttatagtattgtatcctgtggcatcatacaaggggtgcaagttaaactctttaaagttaatcacgatttttgctcttggccttctgggtttatccgtacgccgaagacaggcacctgtattacatgctaaggaaatgtgaataccaaaaattgatcctgaggaaagtcttgattaggtttttttggaatcgcctttgaaatgtaatttccctcaccttggcagtgcagaaagtttgtgatttttattgccgaaatagctttcaacattttgaaattgacttaagagaatgttggctgtgtatgtctgtatcttgcatttctgttggctttgtgaacctaattgttttggatttagtctgatctttaaataaatgatttctttgtgttctctctaatggaagtctgtgagttctctgatctttacttcttttttaggcacacctgttgtccttaactgactttccgggtcatcagcacttcttcagaagtgttccttttccctccc

SEQ ID NO: 38632 - DNA, 864 bp, Homo sapiens
tagaattaaatgaagaacagtttatttaatttgcaaaggcaatttacagtgaaatacttttgaagcaccaagtacttctttaacttctttatgttgaattaagaatttttttaatgttctaaaatgaacaaattaggtcagcgctcaatttcctgggtcagtgccacagtggtgccctttgttcttggaccctatccatggttccggcttggcaactgaaagattcaatgagctgtttttggcaattagtataggagttttaatgtctactgactaaatgtacttttgaagcccatttgctcaggtattggggtcagtgttttgttatataacatcattacttaactcaaatttcaatattttaaattatatatctatattcttgaaatttaacattaaaaagtcagtagtttctagttattttaaccacagaaagttacaaggagttatatctttgaatttctaattagttcagaactaggtacaaccttgacttatagtttaaaaaaaaaaaaaactttcatttaattagatttagcatgaacattctggcccctgctgggaactctaagaactacattacttctgctgtcaatttttctaaggtcataagaacttcagtttaaaccttgagttcagcgagttcagtgtgatatattttccctctctctcccccccccctttttttttggtaacctgcagaatctggctgaataaaatatgtaagtaagacattactatgattaagacccaaaatctatgttaaatattggatatttttagatgacacatgaatttaagtccccagtaatacaacaaatttttctggaaatctaatatattttttaaaaatctccattcaaa

SEQ ID NO: 38633 - DNA, 1591 bp, Homo sapiens
ctaatccgttgtagaacacaaggaaaataatggttcttttgtagttctcttgggacttttactattgctagaaatcatgctgggcagatgcaggcatcacatggactgtgcggggaagtgtaactcaataatggccatgttttgaggcagtggtattcaatgctttaaagagtgagaaaatggcctttagagatactttgtttgaaagagaaacacgcttggaaaatgttcttgagtatttctgtatggaaaagtataaaatggatatgtcctttaaatgtttaagtacttccaacacttttgctctgcatactcatggtgcaaacgaggtgggaagggcggaatccctggcctagctctgcgagagtggggtttcaggtcaaagcaggtctggcagctctgcccggcccaagcgcagaacccttagctgggaaggccgcggccaggctgcggggccccctgcaggcgggctcagtgccccggcccagcacctgttgtcccaaggcaggccccgcgggggagaggccttggagggcagcgccccctctcaccagggcggagctcaggagagttcgcagcccagggggccgagaccaggggcagggccagcgaaatgcctcgctggctcttactttcattgacctctgcgatgcctcgctggcttctgctttcattgacctttgcgggtctgttcccgctgcggcgccggcagctgcttggtagttgcggggggcgtgagggcggtggcccagaccaaccggctggcagcccagctccgctccgcccgcccctgcctcggaccctgcgcctgaggaagtatcgaggcaaccctctgccacccgaagttcgtgggtcgctcccagagggcgcgccctggagccgagcgcccttgggcggccatctggaggccaggtgcgggccgcgaacccgcgaggagcgcgcggcgggcgcggcggcgacggcaggaggaggggccgggagcccgggcgccgccgaaggacgccccgtcctccacatgctgccacttggctgagccgggcgccggcgagaaggcggcgccgctgccctggcagctggactgcactttgcccccgcccggcctcagctgccgcccgcccagacgccagcaagcccccctcccacgacagggctgctccgggagcttcggagacccgccccgggcctgagcgcaggctgcctccgggaccccacggctgtccggacgtgccatgggcgcgcagctgccgggcaacgtgttgtgtaagtgaacatctgggaggtgggtgactggtgaagggcgggtgtctgtcggtctttgcttgtcagctgtgccttttagatttttcaatggcagaaacccatgagttacaggaggctttaattaaacgagaccgttctcagccagctgccgtggatagagcctcacatctccgtcccctaatcgagaagagttagcccctaccccttcaattttgttctgggcttcccagtgaaaggtatctcattatgagttgcaattccaccctgctgcctacctgaagagtgagtgaagattttcaggtaagagatttgcccgtgaacattgcattga

SEQ ID NO: 38634 - DNA, 1018 bp, Homo sapiens
aagacaacatctacaaatctcatgactttttgttgttgttgttttgtttcattttttggagacagaatctctgtcacctaggctggagcacagtggcgtgaccttggctcattgcaacttctgtgtcctgggttcaagcaattctcctgcctcagcctcctgagtagctgggattacaggcgcatgccctgctaatttttgtatttttagtagagacggagtttcaccatgttggtcaggcttgtcttgaatgcctgaccttaggttattcatccacctcggcctcccaaagtgctgagattacaggcatgagtcaccacaccctgccaagattagtcatttttaaatgtttgaaaatatcataccagtagagttatttcagataggcaaaggtttgttcctatggtttctccattttagtgctagtgccatattgttcactatggaactcattaagtaattcagcttcatatttagttataaaccgaggcttttagacaagtatttataaagtatctttctgcagttgagtacagtcaataatcagtgatattaaaatggtaaaaagctgaataaagtttgaaacagattgagctaagccatatcttctaaagaagcaaaaatggaaatttagggcttgccaagttgggcccctaaggggacctcaggaactagatagcctagattcaagccatcattctaggatgacctcgaattaagtccagcttcaaattctctgaagtcctgactagactgagatgatctgggactgctagtgcccttagcctgaacacctaccagaaacaaaggtccatcttctttggagagagaacatcatcctaggactcaaaaatatctgcattttaaatactcaattagaaataactcagaaataatcagacatatgagaaaagaccacaactaaaggcacaatagatacagactcacagggcattaaaatttaaatgtactatctaaccattctacaattatggtatgtcctacctcaaataaaggt

SEQ ID NO: 38635 - DNA, 2107 bp, Homo sapiens
gccctccaggttactctgatacaaactaaaatgtgaagaacagtctttgggagatttagaaaaaagtcacaggagacacaaccacacacaagaacctgtagagcagcagtttttaactttaccttcacattggtaacaccagggagctttaaaaatgcctaggtctcatagcaccactgcactccagcctgggcaaaagagtgagactccatctcaaaaaaaaaaaaaaaaaaaagcctaggtctcactccactgtccactatccaatttaatgattatgggagataaggtaagcctaggcactggaattttaaaaagactcccaaataattctaaagtgccaacaaggttgagcgccaatgatctagaggattacattttcagaagctagagttcataaaacatcttatattaagaaatgctggtgtcttaagttttctgttgctgtaactgagtatctgagactgggcaatttataaagaaaaggaatctatgtcttacagctcttctggagattgggaaagccaaggttgaagggccatatctgttgagggccttcttgctggtggggactctctgcagagccctgatctggtgaaggggcaagagcatgccaaactggcttttaaaacagacccattcccatggtaattaaaccattcttcctgtgataacctattaatccatgaatggatcaaactactctaccctcatgaccccatcacctcttgaaggcctcacttcttaatactgttacattcaggattaagtttcaacatgagtttcggtggggacaaatattcaaaccgtagcattccatccctgacctcccaaactcatatccttctcacatacaaatacattcactccagctccatatcctcaaagtattgtttcagcaccaactcaaaattccgaagtccagagtcccatctgtgaagcctgtgtaatcaaaacaagttatctacttccaagatacagtggtaggacaggtatagggtatacattcctgtaaaaagtaaagtagaggatcctcttcaaagagactttcctccctgtctaattaggaataaatagtaaattctcttagaagcaaaatttattcaaagacctgtgctaacattcttagatatctgctagccttaataaagaaatcaatgtacttcgtgttcttagctcccacatttagcctaaatatttgccctggcatgcttatactggtccaagcaagcattaggtcatagcctgttcctcttccttatttggaggtgtttttacctttctcagcattccacaagttacttcctccttcctttgttctcctctgcctttgcctcttttagaaagttctaagttgctatccaattgggacaaatacagaatgtgaggtcccgttccagccaatggaaaccggacacagcagtagggtgaacgcgtcaggttataaattaccctgtcccctttgttcgctgtactcttgtagcaaaactgccggcaagtgtactctttctgcagaaagtaaaaatggcctggctgagaaaattaaatttatgttcaagtgctatttctttgcggcaccggggaacaaggatttctaacattcccattctaaaaggcagaaataggccaaaagaaaggagtaacaggcctcaattaagtctttaaaaccctgagaaagaagacattaactcttaaagctagagagtaatctccattccatgtctgaatcctgtgcacactgggatggggttggagaggtgggccctcaaggtatcaaccctactcctagagctttctgggctcaaccagttaagagtaggtagctaggcagacatgagcagggcagagagctcccccacacccagaatgtcaggtgaccatcaagtgatggtcaggtggttgttaaactatctccctaaaataactggtcgcagctggcagcagggaaaggcagtctcccagtagacagaaaacacctgaagctcgtgatcagccgcttcccattaagatctcaggagctgggcgagtgggcccaagcatgtgcatttagatgcaaaattgcagagtttaactggtatataaccttcctctaaaaatgttcaactta

SEQ ID NO: 38636 - DNA, 1899 bp, Homo sapiens
acaaacatgtctttccagtttgtttctctatttgctatttgctgacaacactgaaaaagcggcagtaacgattacgtgtactgattttcttagcatttactaaatctctccatgagctggtgcaaggacaactaattttaaggtattaaaaaaacaaacagaaaagcaactcttaaatgtataacaaaaatttactgagaattaggtctgtggatacagtgttagacatctagacactttcccctgaaactattcttcttaagtcaaggaaacacctccatcccttttcaggaaacccagaaggcaaactctaaggcttaaagaatccagtaatttaagtcgtccttattttaaagaaataaggacggttctcccttcaagtgggcgcagctgctacctggtatgacagtacagggccaggcagtgggctgtttaaggcgcatgcagcctaaagatgatggctaccagatttcctaggctgagctcaaagcgcagtgaggggtactttcaaaaagttaaacaatgtttgcaaacatgctcccccatgccacgttaaatgtccctcaacactagcctgaaagttccaaatgcctatactgacgctgcagccatgcaagaaagctgaataaaatcacaccacgggcagagagaggtgcagcaactggcaaagcacctgtgtgtgctggctgcacaaaacatgccgcacagttccgctaagctaaatctgtccgtgtccccagactgcacccaacttttaagaaaggaaagaaactgaggccaaaagaattaaagtcgtgtggggacaagcctgaattaagagccagagtggcagaaaaccagagtgctgctgcaaagaagatgctagagggagaaaggaaagacagggacgggggctggggcttggggagggccaaggttggggtctcacagcggcgcctctgagcgcgactcgaaacttcgaggccagcagtctccacccccggcccttttcccactgtggcgagtgccgctgaagagcctgcccttggcccctcgctctctcactcacctcgacatgagcctccacatctcgcgctgccccatcgccaaacactccgaagctaaagcagcagagcgagaatctcccggaccgttccagcgcctcgcgtgagccccgcccaccgccgtcctgcgccgccgggcacagatgacaagtcctccaggaagccagagcgaccgtttccgctacgcgacggggaagggcggggcaagaacgacgcctggaggaaatagttgagggagaggaagggatcggggaccgggccagggagaaggcggagagcgagctgaggcggagcgggaagagggaggatagaacggactagggcggattcgcaggaaaggagattgccctctagaggctgtcttagcccaaagcgcaacctgttgtctaggcttggcctgccaatttgaccagcagggactgatgtgaaagacttttctggaattttagtaattttttattaaaacgtaaacttagtattctttgagactcaagtagaggaattacagttgataaaggacatcgatgtagtttattcattcctaacccaatacagccgaattcctttaatattaggattgagacattttcatttttcttgggaaaagttacagatctcccactcttcctcaaagacacacaagagttgtctgattaagacataatagatatgtcttcccaactaaagtaaaagttgctgttatcagtggaagcataattacattcagaaagtagcttactcttaaatgaaaccaacatttaactcaactactaggatccactgttaaattgaggaaaacgttcctccgcttccagatccacccagatgtgtagcagaagacatttcatcgccacta

SEQ ID NO: 38637 - DNA, 2310 bp, Homo sapiens
tgaagtaagtggtaacagggaattagcttccttttcctcatcttggtatcaagcagtgggtctccaactttcatttaactccttgatcctcacagaagtaactaataactgcatttgttgctatttccaagataaaatttaaccgcatatgtcaagtaatatatggttgacccttgaacaacatggatttgaactgcgtgggtccacttacaagtggagtttttgcaaccaaacacagatcaaaaatacaatatttgagggatgtgaaacccgcctataaagagggctgaatttttgtacacacgggttctgctgagtcagctgctgggctttaggatgctcggattttggtatccacagtgggaggagtgttggagatcccggaaccaagcatcccgtggatatcaagggacgactatatttaacctttcttcataaccttgtggaaagagtaaaagaaggaaaaaatgtgtatgagggagtaggggggtagggggaatgttaggaagaaagaaactatgtgaactaagttcaaaaataaccgtgtgtgttctttctgattttccagtgttttctttccatttataacagttcatttgtggaaactctagattaatcacaataagcaaacatttcactgttggcacattctattacaagacttgtgaaaagcatttaggatcaaatactcaatacgtatgaagggatttgaaagttaaaattgtttttaagttgtgaggtgttaggagtaacagtacaatcccattttcccaaatatatttaaaatgtctctacagtgttaactaaatgacacaccttatatcacagaaggaaattacttaacaaattcataagacagtataatcagcatatgagaaatctacctcttcttgtctcctcttgcctttccagtctcttgttggcttaagtttttaccagaatgatttggtaatatcaggtgtggaagagatagaatgggtgcggtttaggaaaataatttgattctgtgtattggacattttaaagaaggctcttaaggctcaatttttaatgcttaagaaattaaatgacttttaaatgcactattccctatgaaattaaatacatactcatacttgccacaaaatatcaaaagatagactgccaaaatattccaaaaataaaggtaggcaaacttgttcgaaagcaaaatacacaaaatggggtaagcaatcaggatgtaaatattcaacatagcaaagtatgcaataaaatcattttacaaactaaaatgtatcagggaggatccaagaataagttgattttagagtggtctgtggaaaactaaaataaacaagaaaatatctagggaagtttaagaatgggaggaaatgagtcattgataacatgcttgctccagaggataacctttgtaccaaacggcagagaactgacatctaatcagcagaggttggccttggcagtttatgaaggaacgtccagagggagcacaggaaaggcagtccaatgatccttccctgaattttttactcttcgatgtcaggctttaattcccttgagatgggggaattcaaatcctaaggattcgtaaactccaaggctttggcatttactatatttaacatctgcgaatttagtaaacaacacttctgtggaaaggtaagggaaaaaaaagataatttccattttatgaagtttaacgtatatgcagtttgtgtgtgtatgcatatgtgtgtgtggatagagtgtggtaaaataaagattaaaaactcaaggcccaatgaaagcttttagagagatgcctatattcccatgccttcatgactgtaaatatatccgctatgacatacactagaaatttatcctttgcttttcatatcttatctacttgtatcactcaggaccacattctactcccactagtttacataggttagtaaccttgcaccgtaccttaaaaacactcagagttttaaatgttctatcacaaatgttaaggattccttccctgaatcataaatgtgctttgctttcattatacaatcttttctaaggcaggtattaatgatttatattagttaatgatttaaaaggaacacaaaaataagattgtgcaacatggagttaggaatctcttacaactttatcagttcaagtctggtccttgttgtgagtcaaccacatttttaaactacctaatagcctatggtcaagtcatttttacatatgcctaacaaaagagatataggtgacaagtgctgtaaaactattttttttttttttgagacaggacttcactctgttgcccag

SEQ ID NO: 38638 - DNA, 1954 bp, Homo sapiens
cttcccagccctccaagtgcaagggcttctgcaggaagccttctgcaggagcagcctcttctgtttacccccattttgacccttgtaatatcatcctttcctacctgtgccaagaagtgaaaaggtgtgtgaagcgccgctttagaaggcccagtacattcacaaacatcagcttctgggcgaggctgcttggcctcttctattcaaaactttgtgttgcccttttaaggtttctattccccccacccccaccccgcccaccaacacccattcctacctaggttcaacccaaaccatccttaaggtacactgagtatcacagcaccaaaggctggagagagataagttccccacccttgatgcgcttcctgtccaggtggcccgaggcccactccttaagaggcaaggcccagagacactgctgtgtcttgaggaacatccagtacacctgacatttccattagaacagtgggacccggataccactggcaggaagtccatcttcacagctgccaacccatctgtcaaacccgcagtcccctatgagagtacagatgaatggaggaggaagatttaaaagtgaattcgtgggcggcgacaaggaaacagcagccgtggccaagctgaccccagagcccttcccttcctggccctccctctgaatcatcgcgctccacttgtgacgtcgcggacgcccggctcgggcaggcgtggggggcccgcgcgtcccgggagccccgaggcggcagcgcgcgtttccacgccgcggtcccgcgggaaagccgggggcggcggcctggctgaggccaagctcggatccggtgccgagccaagcggggccgtgcgtcgccggggcttcgccttcgctcgcgtgacctccgccgtcctccccaaccctcgtcctctggccgcgcctgcggccgcacgcccagcgcccctcgcctaacctcgcgcccgggccgcgcctcctcctcctcctgctccccgccgcttccgtttctcgagggaaaggctgctgcctcctgctctgtcctcatccccggcttaggtaacacgttttcctccttacgacacccaccacagggtccccgcgccgctgcccctcctccttggatctggggcccgggctggtgagcggcgcgcgccgtcgcctctccgcgggtaggtgagtcgatggcgccgggagggttcctcgcctctgcgcgccggcctgcgaggtccctgccccggcagcgaggccgcccccggccgggcccggccaggcatgcccggcatcgccgctgcagccagcgcggaggggagctcgtgagtcccgcggcgcccttggccctgcccgagcggcccgatggggttggggggcgggaagaaagggtggcaaacaacgattttaaaaatccagtcattagtatttgtaggacgaagaagctgatctgacagttgtccagagcagtggcccagctgcaacaggtagatggcgcagctgtcagtgaccccttggtctcagccttggctttgagagatgcatctgagtgtccctagctgccagctacctccagtgacctacttgatgagtgtgaaataaatatgatgggactatatttagaaaaatctttacttccttgctgttaattctctctgcattttgaaaggtggttttgtgaggtgtgcataattagttggtgtgtccagagtggtagctggaaaaaaatatttaacctgggtttggccctatcatgtagacggttaggcgcaaagagtgtgaaaggaaacgcttactttagtacatctgtgaaaaacacttataagaaaccacggcttgttttttggagatttctcattttaaaggtatttttaaagtgttgaataagcagaagtttgcccactgtatgatggtgttcacttcaaaagaacagtgggttaaaagtatggacagaccacttaagtggatcccatc

SEQ ID NO: 38639 - DNA, 850 bp, Homo sapiens
cccttctgcacaaacaacctccaatctttaaaactactccccaaggcagcccttgagtatggagcaaaggagaggtgggacgaagtctatgtttcccctacaacagcaatgtgatctgaatagaaccttggccactgccatcatgtggccacctacacagactcctggacagctgtacccccttggaaaaggtcatgagaaacaccttcttgtaaaacacccagatatttcacggaagcttggccttttccactagcagcaatagctgtcaggcaggcccaccacgcaatagcttcaaattgccattcctcagaagatgagagccagaattcaggatgtgaaccgtgggggtggggtggagtcaatgcgcaatgggcaaaaatgtgtactctgtaaagtgttgaattatctgccggaagagggaaatgtcaacagaagtgctttgacccgcttgcctattgattagagagcagttctgttttgtggcaggcccttatctatgtcatcacccttctgtcactgtggacaacaaaagggcacagccagcttctgctacaaccaggctcttcacatgagaaggagcactctgggccctagaatcctcacaaaatatctcccttgacagaaaaatggctctcccaagccagtcatagactgtctaccatgaagccagagtagtctcagcctctaggagccagggtttccacccagatgcccagaaactgaagcaatcagatctggccgacaaaaaggaactttatttgggttactcagagaattgcaagtagttcccaggctttggatttaatggagtagtaagttttaagaaaaggtttcagtgacccatata

SEQ ID NO: 38640 - DNA, 881 bp, Homo sapiens
ccgggccgccggggcgggctggaggccgggagcgggcagtcgacgcatccgccgccgccgcaggaggcggagcgctgcacctggcggccggtcctcagcgcccggccctgaaacgggtccagccggtagtgaccggcggcggcgactgtgaggccggggccggggaggaggaggagccgcagcgggagagaaggtcgcgccggcgggagcgctgggccctccgcctccgtcctccgtggccccacccggtccgcatccctcgcctcgcctcgccgcgccccgcccagcccgtcgcagccccggaggagcgcgcgagcagcccgggatggtgcgcgctgccccgacagccgccgccccggcgccccgagccgccgccccgtgctccggggacagggctccccgcgccccgcgcagctgagcgctgccgccgccgcagcaggtgagtcgggcccggcttgcggagaaggggctcgcagacccgccctggcctcccccgccccgcacgggcccagccggagggcgggtaggcacctcagccgcgcacacctgctgccgggaaaggggcttcggggccggggctcggagcccagcgtgcgccgctgtctccgctcgggcctcgctcgcccgccgctccctccctccctccctcccccggcttccgtgtcgggtgtcatctttgtggggtgctgggggaggctgccgcctgcgcccccagcgcgccccgtgctggcagcacttccgcaaacgtaactggagtcgggaaaacaaaggcgctgcccagggagccctcgccgggcgcccacagctgctgccgcgggtggggacggagggtgagcgccgatgcccgggtcctcctccgcccgggccgacccgcgccctcg

SEQ ID NO: 38641 - DNA, 2101 bp, Homo sapiens
acactgcctagcacatactgaacactcaaaaaatttctcttcaatgaaaactggaatccaacacttccccaacatataactcactgcaagattccctcagttgggagctgtggcagaatctgataatgacctcatcaacatccagtctctcattcatccttagataaaaaaccgcggtataaccggagggagggccatgcccagctaaaagaatacacttggcagcctcccttgaaaccagggtagccaaagcaaggaagggaagttggtagacagtgcacccaggaaatcttttaaaagattttatgaggggaaaaaaaaaaagaaacagaaatgtgaagctcatggtaagttagcggcaggtctggagttggaactctaggtttctgacttccccaggtgtccttcccagatccttccccagtgtgccagcatcttaagcccactccgtggcgagcccctacagctagcagccgctaccagttcttgcttcctgtgtgccaggcattgtgcacacgaacaccacaagaaccttgtgaggcctcattacctgccgctcacgtgggaccgttatgtttactcgctcaaggtcacaacagtcaggggcagaagaattttcgctccgattctgaagctgaagctgttaccttctctagtcttgagaccaaaggaatgcgagatagtgaaataacaaggatttcaacacgcattgatgtactgtacaaaaggccgtgtgctgaaagtctggagactagggtcagctgtgccagtgacaagctgtgtgaccctgggcaaatcaaaacctctctgagtttcggttgcttctgtaaaacgagggaattgggcgactggatcgcgcggttgcttctaattctaaaattacaaaatgtccaactgccaggcgagagactacggaagcccagtaagacaggaagggcgggcggggcctgcccgggagaccccaaagcgagaaaagggagcgcccgccccagtgggcctcgcggtgccgcccgggccaaagagcgcgccctcagggcagccgcgaagccggggagcgagcacgcacgcgcgcgccgccgccgccggtcccgggttacctgataacgctgccgccgccgcctccccgcgcacgggcagtgtggccaggggcggcagccagagcagcagccaccaccgcccttggcgcggccccatttcgttaggggtcagctccgtgcgacccgagccctaggggaccggctccgctgcgaggagcggaagtggcgcgggggctcagagaaggcggagggggcggtgaggcccgaacgcgggaaaggcggagaccccgcctccccggggcggagggagagttgggctcgttgctccagcctccgcccgcggcctcggggcacggcgggcccaggccggaggagctttcggtggcgcgaccccgctggcatgctcccggcctcggcctcggcctcggccttggcctccgggcctccagcgcacgcggggcgtccagggcctcatcttcccctggggaccgcccggccgtgtcccgctgccctcggcgcaggggtgggagttgcagagaggaagagtcgctaacccggagtgtttcttaaaacttggctgacctgtgacctgcggatttggaggctgaattctccgagcacctgtgagtgacagcccgtgaatgggaaggtccttcggcaaacgccctttttgtgaataaaatacataaaagccagtttctttattttacctttctgtttatctttttactttcatttggtaacaagcaataacaaattggaaatttggccgcttaagtaacactgacttgtatgtctaatctcggacacggcatttcagagtacagaggggctcgtaaaatgttccttcaccaacatgacaaggttctcttaaaattaccttatgttaaaaaaaagtttcttaatgtaatagatatatttttaaattaacatataacctgaatgatcttaatactgataattaggagatatacatatattttaaagaacattccctccacaggacctggaacccattaatttgactcaatattccatacttaactaggacagtcttctctaat

SEQ ID NO: 38642 - DNA, 539 bp, Homo sapiens
cattctctgcttaaggccaagtaaggtttcctctttctatttccatcactgtcagcagcaaaggaaaaactttgcaacaaaacttgttatatttttttcagaaggattaaagtttggaagaataccatattggaggctttaagtctcaaaaatatccctctgattatacaggggcataagaaaatgaatttaactgcatccatgcaaatcaatcatcactaagcgtatgtcgtaatgacggtaggtcagtagtggaacaactatgactcacaggctgagaatgccctcatttaagaaattctacaaagttgctccctaccccagaatatctaccccaggggcttgttccatgtctcaaattcagctactaaagtgctgaagtccaaaattttcatatttaagaaaactccaaaagaaaacacatctcaaaaatcatatttagtacttataagtcattagcaccttatttgtcacatctcttaaaaacacaaaaggaatgggacacagaacctgcaagtgctaataaggcataaggtgga

SEQ ID NO: 38643 - DNA, 3377 bp, Homo sapiens
ggagtgcaatggcacgatcttggctcactgcaacctccgcctcccgggttcaagctattctcccgcctcagcctcccaagcagctgggatgtcaggcatgcgccaccacgcccggctaattttgtattttttgtagagacgggatttcaccacgttagccaggctggtgtccaactccggacctcaggtgatccgcccgcctcggcctcccacagtgctggcattacaggcgtgagccctggccagcctaagtacatttttgaaggtgctttaatactttggttagcaaagtttatgcaaaccaaaaaattctatattgtgccttgggaactctaatttagcacacaccagcactatactagcgccgtagtttttctacaccatggacacaaaaaacattaaacagtaaaataaaaggcagattttcaggaggttaaaaaggttggaattaaattacccggccagcgcgacagttgtcaaagctgtacttcggactccctggttccattcctccctcctcctcccgtcccaacgccagagcggaggtggggagggggcaagatgggcgaggcagagatgctctcccagccgccggttcttccagcgccgcgcacctgccgccccttcctccatgcggtcgctgcagccttcccgccggacgcctcgcccccccgggcaggggcgcacctggaccacctgcctccccgcctctgccccgagcctgcgggggccaggggagcccggcgcgctgttgttttttttttttttttttttttaaagtcagcctcctagaggatgttggatttggcgggtgtgctctttgaaatactatatcgggaacctcacacataattttttttttttaattgcaaaccttcccagttcactccgcagctggagagcaggccggaggcggcgttccccacccgtctccctctttgtcgtcccctccccgcgcccggagcgggactcgcgggagccgcccactcccggcgcccacttggttcctcccagctgccgtgtgaatgggccgtcctccggattccgcggagggggcggcgggaaggggccgagccccgggcccagcggccgcccccgcccccgcccggcggcggcccacgccgggatctgcgtcactcggccgcgcgtgggcgggagccggagcggcgaatgtagcaagagcggaatctcccaatgtgacagcgcggggtgggggagtggaggcggcggaggcgggcgggggagggggaggagggtgtagcgcgcgcggggaaggcaggggaggggagggcaaggcgcggcgggggaggcgctgccgccgccgccgccgcccgcgcgccgcagcctggaggagccgccgccgccgccgcggccaagcgagcgccgtcggggcgggtgggcgggaagaagcggcgggcccgaggtgggggggagcagagagagcgcgcccaccaccttcccttcccccctcgatgggagcgggggcgtcccggctcctgcagccgccagaggagggagagccgggggccgtcgcttcggagttggggctgagcagtcctcggggagagcgcgccaagaccgctgcagccgctggctgagtacgtaccggagcggacggtcgccactcccggtccgccaagtgcgggacactttcgcggctgagcggccacgggcgaacttggggcggctgagtcgcggggccacgcgggcactttgggggcggtgtccgggggaagcgggctccgcgcggccgccgccggaaggagagggcggccccgggctcgtgtgggcgattcccggagacattctgtgtgccagggcggcggggagcgcggccctgactcgtgcattttccctccgagaaaggttggggtgccgagtccgttttgctaacggggctgggggcgtcacacggcgctctgggggtgtgcgatgtgggttgtgcgcgccggccccagagttttgcagccaccttcgtcagggcagtctttttgtttgtttactttataaaagtgctgcacttaccgtctcgattttcttcttgggtatcttccctttccgaatgtagttttctttttaaaagcggaaggagagttttacatggaagtggcttacagaaacttggcgctgaggtgcagggaagccagaaactctttgtgtctctaaggccgatgaggaatttggaaacacatgtgggacatacaagcgttggatatagaggtgtgtgtgtgtgaccttatcatggagaaacactgaaaatactatcaaatctttgtggtctgcaaactcagagcttccaaagcttgagataggaaatgacacttctgttaagcctgaatgttgcaggatctcggggaaagggatagttgagatggaatatacatttgtcgattctgcagaccaagctttgcagcgagtgatcgggaggaatcgtagacttgcatgtacttacacctcgctccctgagattcgggaggcacggaaaattttgggatggctgttaatttaaaatttcatctgaaagagtcgatttggagtaacttgtcactaccagttggtttgccagtgacgtgtctgccaactcaaagagtgcaaagatcagaagctgaaagaggaattctcagatcttgtttaaaaatattttggcagttttaatagataatatgagattgcataggaacagaggagccgaatttaaaatagattagtcacgtaggaaatgcttagctgttgtaaaagtgttcacgcaatgacttaccttcctaggttttcacttttttgaaaatttttccctgaacaacatactgaattatgatatttcataatttgtgtgtgggttataagaagtatgaggagagaggatgcataggatttgctttttctgttttgggtggagattgagcttttcctgaagacctgaaagagctgcttctgatctaatctgagtgccagtaaaagtggctcttagatgaaaggctttttcttctccatattggtgtcatttaagacatacaatattatctttaagtttaaaagattatattttttcatcggtattaacatacaaataagggttttcttgagtctttgtagatgactggctaggtcagccttttttatccctgatttgggtattagatattggaacattaggtcttgaaagaaaatttcaaggaacttctggaagaagctttcttgtttcaattttattatttttaccattttgcactaaagttaatatgccatttcgagattaaaaatgtttttttcccgactctgatggtctcttgttacttgtgaaggtatcaataataatgtaataatgacaacattgaggaactgtagatttttattttattctgcctgctaattatgga

SEQ ID NO: 38644 - DNA, 1063 bp, Homo sapiens
taggtgagactacacaagctttcagaatagaccctcatcaggagtgtgtggtgggatgagacaagctgaatttcatttaaagctgtatctcagatatgctggctgcatcttagattcacttggggagcttcacaaacctatatctgcctggggggctatcctagacaaattaaattattatcttttgggggcgagcccaggcatcttatttaaaaaaaagattgtgggccactggcctagagaaggaagagccagtatggtggtattcccagttaatgagtaggctcagcaaactcattctggaaaagaaggatcagaaatgaatcatggtgaaaacatttgagaagccctccatgctcacctccaaatagtagtccactgacctccatcttgggctccatctgaaagcttggaggcctgaaaggaggatttcattcaaggtcttcgccaccaagtctgagctgaatagagagagtaggaagaaaataggagctgaaggtaggacagggagaagggaaaaggaaacatgaggaaatagcaagagctatggaaaggcaagggctctctctgtctttaaaggtgtttgtaaaatattgcttagggtctggaagcatgagaaaatcagatgaaggagataggggtgcttaactggggaaaagaaaccatagggacagtaactgtcttccaatatttgaatggaaagccagaatgacctaatctcctaataatgccagccacatgccagattctagagcaaacaatatccaaaactcttggcaggtagaacacattagacttctttagtgttactctagagacagaattaggactgggatgtttaaagttccaagggtgcagaattcagctcaaccacaagaggaaatttctatgagagacagttgagaggggtggaaggtctttacagtccaatacactgggtctaagtcctgggcctaccactattaactgtgcgattgagaaatgtacttgaactatccgagttgctatttcctaaccaacaaaattagggcaaaaaataaggttttgaggcttacatagagat

SEQ ID NO: 38645 - DNA, 741 bp, Homo sapiens
taaattaaccgagccctgtctcagaccttcagcgttcacagactataccgaatcgggctgttaatctttgaaagtgactggaaccctagagatctaaccaagatattgtcagggaactcagcagagagatcgtgaacatggcagaactgaaggcaagtgactgtagaaaaataaattatttcacgcctgtacttcctacgaacaaggattgtttagtaaactagatgtggtagccacgattttcatgatcaacagagtggcaacaggcaagactgaatgatggggctttggggaattgcactggcgatgaatcaccctgagattatgcaggtggggtttcccctgaagggactggaactgctcactgccagctgtcctcagaagaggtcagtcatggggcgggaaatcagaatgctgggactagagtcagtctgactggatttcccaggaaaggtgactgttgagtccccagggcacttcctcctggagggggaaggacctgtgcctggcactgacttattctctgttttctgtttcctttccattgtccctgaacctttattgtgatctgatcagtgtctcaaatattttgacttctgatgtcctgagaggaattaaggggaaaggtccacaaccaacccctgaggcaaagcagaggagggttatgacttctgtcctcaggccacagcagtggtggcagccacaggcaccagctgagaacagctttgccccagagggacc

SEQ ID NO: 38646 - DNA, 1175 bp, Homo sapiens
atctttcatgcccattgcctcttttttcctataccccattcctctttcacagggcattatcttccaaagagtcctaatgacccagctctgccacagccaccatggtaagtgaagtccagtgcagaacaaggtaaacagacacaatcctgccctggagagactgtcatactgagtagacccacagtcagaggacacagagaggagaggaagcaataaacaaaaattccattgagctggtagggtcataaagtgtgttgcaaccatacttcaaacaaggtcagcccagaactaacagaaactctatgattagcaccatctccttcacttcctaattgcaaacacgaaagacacattccttctctatttgtgctctggcctggtaagaatgggaaagcaacttaaacccatttgaggttataattgcttttttttttatgtttacaaatcttattttatcaagtagtcagttgttcaggccgagagagtgtaggacaaatttttctttcagcgtgaacacgtgaagtacacgtgaggtctgtagggtatggaggaggcctcaggggatgaatcatgtggtctaaggtccacaactaggaggttgttcagggcaaattgcagagtgagagaactgcaggcaggagaagatttcaaatattccagtccccacttcagaaaatggcatctctgtattttcagtgagttcaagctgaaaaccttgcacttttgatttatctctcctgtcacatccccatttaatctaatggcacatcttgctggtttgggggaaaattcttccaaaatatatctagtatctccagtttccaccactctagtgccacccaggtaatctatgccagcccccagtcccattagaacttctgcagtagcctctaccttggtctctctgccacccccttccacctccacatagcagccaaaatgatgttggcaaagcatgagtcatgtatcatttaaggtaatagtagctactgtaacaaggaaatccccacatttgaataatacacattttgtgttccattttttattgctcagggaatagttcatgtggggactccttgtcaatgccaggctgggagagggagagcccagtcatcttaatacatggaatcaacacccagctggtagaagggcggagagaacatgaagcaggcata

SEQ ID NO: 38647 - DNA, 516 bp, Homo sapiens
tattcagctcttcttggctccaaagtggggcaactgtaatatccaattaagatgaaaaatttctgtatgtcctcctttctgtatattaagtaggcatcgttttcgtgaaggtggaaaggactaaacactgaacatgaggaaaaaaccctgtagaggacagtgacttcggcagacatggcctcaaagcagctagcagaggattgagtccctgagcttttccaaaatatgtggccacattcctgtcagtacaaatattgcctaagcaccaactgtatctcagggaggaatttgctttctgtggtttcttccattaacccctccagattcactctcttctcagctccactctgctctgggccccaggaagctgagccatatagctgtcagctagctcccttcatgcccagctcatggttgggtttggccattgagaggcaacagcaggagagtgaggatggattatttattccctggctttcttgtgttggctacagcctcttctttcagatagtcctc

SEQ ID NO: 38648 - DNA, 2348 bp, Homo sapiens
accctcccatggcttaagtcgcatagctgaaaggattttgctcattttttccaaaacacttcacgtctgggtagtagccaatcatggaaagtttcaagcaaatgttacatttgggagagggatgaagcttgtccggggctgctctcggaggagtcgccagacgccctgacctgggggccagatgcgagctgggatcggctgagttccgacagctcggccagactcagccctgccaaacctgctgacctcactgccctcggctgcgggggatctcgcccatgagtctccccaacagctcgaattcccagagtggaggagcccactgcttcataaatgcgagaacccagagcccctagtacccaactaggctagcctcggagttggcacggcgtgcagaaagtggctactgagcagccgggcctggctcacccgcttcacacgtcagtttgactcctctccccgccccccaccaatcccccgccctactctccgcgcacccagagccgagagaaatttgactgccctaatcgccaatcaaaagagaggtcgaggatttgagccaatcgcagcgggcgaaaggggcgggccgtcggcgagcgctgaaggtctctagccctcccctgcgctttagcctcagtgcggagccttaggcggagcgaagagaaccggtcgcggcaatcctagcgcgcagcagcagcagcagcagcagcagcagcagcagcagcagcagcagcacccgcatccgctgcgggagtccgagccggaaccacacccaagtagctgccctttcctcttctgtcatctcaccgccccaccacagaccgcgttccccgaggaaaccggccgcccacgcccggagcatcctcccctgttgagcgggcgctgacggacccggcggcatgatgcggctgcgaggctcggggatgctgcgggacctgctcctgcggtcgcccgccggcgtgagcgcgactctgcggcgggcacagcccttggtcaccctgtgccggcgtccccgaggcgggggacggccggccgcgggcccggctgccgccgcgcgactccacccgtggtggggcgggggcggctggccggcggagcccctcgcgcggggcctgtccagctctccttcggagatcttgcaggagctgggcaaggggagcacgcatccgcagcccggggtgtcgccacccgctgccccggcggcgcccggccccaaggacggccccggggagacggacgcgtttggcaacagcgagggcaaagagctggtggcctcaggtgaaaagtgagtgtctccgcgaggcgcaggaggcctcgttcctttcggggcccgggctcaggctgtgtggggccctgcggtggggcgggataggagccgagggtctagaaaagagaaagaaagaggtgccgggcggcctgcgccgtctgcgccatgtgattaggcccggccccgcccgcgccttccccgcccgcaaccctccgccaggcacccacttcccttctccgcccccggcgggggtcgccctggtggggccgcggtggggcctgatgggctcgcctggcgtccccagcgccagagaggccgctcccctgcccgcgctgcgtgctcagctccctggcttgcggctgcagcgcctggccgcccgccccagccattcgtgggcgatgctgcacgaacatctccaccgagtgacatttaggagttgggcgttcagcagagcctttaccttcctgacttgtcgcttttcctggctcgtttccgctctgcctgccctcccttggtttctgccatcatccggttggaagccagatgtgacagagagctctttatatttcgggagtggctacctcaggcacgtgtagagccatctggggcaccggaaacaatgtttcagaagtgagattaggaggaatccggtcatgtggccgagaagatggggcacgcagtatagaccacctgtttgcataagggaccagctttggcttgtcaggtcttccgtgagatggggagatttttagaaataaaagttaaatagccaagatgaaatgtgacgtaatacactaactcagtgaaaaatctgagttgagtaggttttgtgacttcattgtgataggatgttgactcatcctgtatgtgtacggcacagtagtttagtcttaaagcaaaactggtttttcttaaacaatatgcaaagcagtctcctatatatttttgtcttgtgtaatacaaatggaccactttgttttcccaaaatgggtaaaaatttacggatctgctttcattataccttactctttttctggctttgtacgctgacactctaacctgttttgcttcccttttattt

SEQ ID NO: 38649 - DNA, 1954 bp, Homo sapiens
ggtattttgctttttaacatcttatggaccttggacagtgccctgcatatactatgtgctcgaaacagtttgttgaattgaaattatgtatatttcagacggaattagaaagtaaaaagcaaaccatattatgatctcacaagtgtgagtccagcatcctcattaagcaatggttgcacaatggactgtgctggaggctcaagtcctgtttctgttctatgaaaataactccttatctatacaaacaacattcaaagcacaatcaaccacacctctgcatacctaccacagaactcttcagtaccggccagaaatttttttaagactatattattttggggtggggggtctgcaaaaactaaacatcacttttaaactctaggaagacattaagcccttccatctttgaacatagaaacataattaagattccgaagtcatgtactcattcatctgattccatgaacatttactgacctgccaccttgtgccccaacaagggcctggggattcaaccaaaggagcagctacgcacagcacgttaggtgccaagactgtcgaggttatatacacagagtgcgaacgttaacctagacagctctcgaggatggcatacagcaaatgaaactttctgcgaaaagaagaaaacgtgactgatggaaaggggtggaaacgggagaaagtgacggtaaatgggaaggtgcagtgccttctagaggaaaattatatttcacaagtcctcttcactgccagagcacgactggcaaggacaatcgtgctgagcagtgccatctccgagaacaggtggcactgctcgcacttggaatactcaggacgcgttcttcctctgggatcactattcgcgggtcagcacagacggcccgtcctcgcccggcgtccaactgcacggcccgaggactctgtccctgcgcgtcccacccccggcacccggaacctcacggccactcactctgcgcgcaggatccggaagggctaggcgggggcgcggcggtgcagcctctcccgagcgcgctgggtcgcctctgctcggtctggggtctgccaggcgcgatccccccggtgcagccgagcccctccgcagactctgcgcaggaaagcgaaactacccggcaggagaaaaggcagcgctggcgcccggcccccttccgcccccaccaatcaccgggcggctccgcgctcagccaattagacgcggctgttccgtgggcgccaccgcctccctctgcgggccgctgctccgcccacgcgctggggtatttccgccggcttccggcgggggccgccggctgggtgagctgcagcccagtcccgtgttgccacgctgggaactggcgttctgtttacatatcttagagaacgatcagaaggacgtgctgtgtttgcagaagcccaaacttggaggtctctgtagtagtttcatcgccgagaatccaggcagaggacagatttggcgacgtcgtcattctagaagctccctttagcaactgacctccgtgttgctaaacccagggaacgcttttctgtttttctcactttacttgacagctcggaagcatggggcagagttgacgcctttgttcttgaaacacgtttcttccttggtcatgatgataacacatccttcttgctttttcctgcctctggcattctttctacattgcctccacctccactatcaaaccattatatgttaaggttgtcagggtccagacattcgtcagcttctttacctgggcttctcctaaacgctgtgctgtgatgacctcacccacagcttcagtttccttctagatggaggagtcttaaatgcttatcccgtccacacctctcctctgggcttcacacctacaactcccacttgcctctccacttgtatgtgcagtgagctctacaaactatgttcagaaccaaacatctttctcctcaaacctgc

SEQ ID NO: 38650 - DNA, 2084 bp, Homo sapiens
tatcctattattgtaataatatatagaaatgtaaataaatggaaacagagagggagaaggaaaaatactctaaaatgttaatgtgtctgggtagtaagatatgtctatgtaatttattttcagtgtttaccatgagcactatcacattcgcggtcaaaaaccgctcaggaacgctttggagccctagctttccgagcgcaggtagagcagcccgggcccgcccacgcccctggctttgcgcggtgcagtttgaaccgcttcggaaacagctggcccggcgcgcgcggcgggagggacgcgagtgctcggaagagccgccccacgtgctttcggggaaactgcccgggagcgagaaggactgggattgagaggaaaccgaaaagcgaaagttagagcctgcgggagcagtacgcaggcgcagcacgcaggcgcagcggggctttcccgcagcccgcttcctcccaacggtttctccctggcggcgggcgcactgctcgcacgctcgccctggggctgcagatcggcttgcgggacggggtcccagagaggccggtccacgcggcccgcacgcgcgagtgttagctctgcacacgacggaaggcggaggcgcgggtggctgccgtttcaccttagagggagggagggaaacgtgtcctgatttctgcacctaaggtgctggaaaccttacccttgcacttccaccgtttctttccttgtcctgaaaaggtctcttttacccgcttcacttcgctatctacacagtttgcacttgcactgactcagatcttgtcctgtctggtaagctgtgaccctcagccagcctgggtagctgcccttgaaccagaggttggggtctggcagtttctataggcgtcctcaggctcggtctgcaaggggcttgcctctttcttctggggtcttctcgcccccatgccttctcagttgtggtgattataccagaaggaacgtgggagaagtataatggagaatgcttagtcactggacaatgatttcgaaagttcggctggctgaggaaacaagagttttgtgtaatgtctgtgacttactcaatggttctaggaggcacgagactgagtttctttgggctctgctcgcctactcttaaggggctctaccttcttagggtgaactcggcacccacctagaacctccagtgtgtgaaagggcctacctacctcattgggccccaacctccagcctcttgtgagagtgacgaccagccccaaaatggctgcacacaaacaagaccctaaggtacagagtcctactatgcaaatagacgtttattttcccctgttagaacaacacaggaccagctatgtaatttgcagggagggcccgttgcaaaatgaaaatgtggggtcccttactcaaaattaatgaagaatttcaagaaggcaacaggagagcatgaagccaagcgtggagcccttctgagtgcctgccctgtggaagccagacctaggtggggaatttgggggcatttcttgtatagcaaccttgttcgatgttcacttaaatgaagaaacaaattttataacaccactcacctgtttaaaagcctctgctggcttcaatttgcaataagaatccagggcccgccaatttgggctcacctacccctcttactcatcttatctcaccccatacttcactaggctcccctcaatccccttagcctctttctgttcctcagataccccaagtttttacctgcctgagccctatgcatacatacactggtcttttgggatgctgttttcctgactgtgttcatggactgcctccttcccattctctaggtctcagttcagtcatcatctcctcaaagacaccctcattgattgcttcttccagtgactgtatcacacttgcaatcctcataacacttgttaaacctatccctgtttattatttgtctgttttcatctctcctcgccagcgtgtaagttcacaacaggagggagtttgttctgtgttaacagccttttccatccagtattccatgagacaattcagtctaatcccccagggtatctatgtgtgtaatgaattccctgctc

SEQ ID NO: 38651 - DNA, 495 bp, Homo sapiens
gttttattcactttccaataaagtaaaactgtaatctagatccctgagtgaaaggtaggggagtgtagagtaagggtagaagaaagaacccagaggttgaaagcactgagctccctgaggctgcagaaaagaagactgcagaccaggatgtgctgtaagagccccagctcaggcagtgaggtctccacccctccagacctgggcacaggagggaggtttgctctttggagtggatgagtcagaggaattacagaggctctctacattctgggaacaaggtcaagctgcagtcaggggttaggtgctgtgtgtgctaaagagtggaaggtcctgttaaagtttacggttaagcccatgcttgccccttctccgacatctagagccaggcttaaaagctcctggaaaggtatctgggaagtttgccagaccaagggaggtaacatacagctactgccttctatacccaacaccgtcctccaacacccctttgaaaca

SEQ ID NO: 38652 - DNA, 846 bp, Homo sapiens
atagcctttaatcacagaatcacagaatcagaagagaggaatgtaaaatgacagcactgcttagctcataaagccctctgctgcattctacaaagtctaaggttttagtaatatttttgtacaatttctccctcaaaaaagtgttgcaactctttaaattagttcagcgagaaatcaacttgctgtgcaaatgcttgggctagctggggtgtgagtagcgcgtctgtgtttgagaacactgaaccttgaaagaacatctgtttggctattttgttaaatgaaactcaagtcacccaggctttactaatagcttcattgtgcttcatgactttccaccacataaacaaaattacctaacacctcagtctgtggctaaaactgtcatttatcagttaaagcccactgacaaagagcaaactggagaaactgcaattccagcttctctattcaaacagttttcacatttcaataatcactctctagctggctccctgctagataagtacctccagggaaaggttgcttcctgggaatgtttattttacaggaacagattgatggcctcaaagtctggccactttctaggtgatgaaattgtttattcacattgactcttcccaggagagaatagagtggagagaaaggcagtgattgctaaagttgattttatgatagcgtgtctacagattcctcaaggaatgttgtgaaattccaaagcaaattcttaaagttaaattcatttttaaaaatctaaagctcctaccctatgttgcacttctgaggattaaagaatcttagtcaaagggacttcagagattgtctagtccaatgagtccaaatgttttt

SEQ ID NO: 38653 - DNA, 807 bp, Homo sapiens
tcagtgcctgtctgtcctttttgcgtgcatttcctagaagatcccactaaaggggcattttgtcccaccgtctgtgagctggtggtgccgctttggctctgtggcctgtagcttgcaaaaggagatgacctgccctaaaatgtcactcgcgcccatcaaagccacagtcaccggctgccgtagctgcaagcttttttctgaaatccaggtacgctaatctaaagtcagacatcacagctctagagaagctggctaagaaagtgaagaggggctcactttcagcctccgcgaggacacacctccgcagccgccgcagctcccctggcccccgcagggagattcgcccgggcaccgtggcgcgggcctgcggagcggtttccgcggagaacccgtgccagggcgcatctgtgggtcgtggagtcgggcgcttccttctataataagcctcctcaggaaggttaaaatgaagcaattgtcaaaacgccaagggaaagcaaagcttcagagtatcctgcataataagcatgtcctccttacaagaggcagccagaaggtgtggtctggccacttacctagcgctctctcagcacaggtcccaggcagtgctcaagtccaaagtcagaagcgcccctcacagtccctaggagaaagccgctgacgccatcatcagtaggggatttgcatttctcctcccacttgaggctttcctgtgcgtcagtgttcgagtctctgggactttacttgggtcagttcccacccactctattctagaaatgctaacacgcagaaactgccaggctggagccc

SEQ ID NO: 38654 - DNA, 8554 bp, Homo sapiens
gagtcacatcattgttgatgagctggaataaatgcatgttttccatttgactactgcttccatctttctgggtggagtacaaattctctgttttatgctagatgagagcaatggtgaatagtcttacaacaaagaacacagttttaaaatggaaaaggaaagcgctatttgaacgatagtcagtccttttgcataaattgttaatgttggtcaaattgcaaaggacttcttttccttagccagttctggaggcaggaactttaaaaagcaccagagggcactattctcacgtgaaagccaactaaaaaccgaagcttcttttgagtttactataagagagtgcctttcacatttaaacaagaccagtattagtctctagccttttggcatctgtgattgtgtaatcacttgtcctgagatgtcacaaggtttataggattaataaactagacccctaccaacttgctctatggctatcgcaagtgtatcagtcttactttacaccaggatggatgtggaagaaggagagaggatgcaagcaatagtactcatgtgaaaggattgtgaggatttattcttggctttgtttaacctgagtacctgaatggtgacattggtcagattcatacctgagtatttacttacaatttagataaagcctttgttccttaggtatttaggtatgtcaaacttacacagggtggtgatgacaagagatggctcagaggtctcttgcctgtctccaaaatccaccctaccaccccatattatctaggtaaaggtggtttctttgctatacaactttaagacaaattccctggctgtcccaataagttgccccgtttaactcctttatagaaattctagagccatgactgcttgctggttggttttccagagaattttctctaataatccaattcatttcccatacaaaggcataaactctgtattcacttcctcattgcttcaaggtttagaaaaatccacgaggaaatcacaagggcagtagtcatctatatcaagtgctgctatatatataaaagattaataaaaatcagggacaaaaagatccatggtaatgtatcaaagagctatctatttaggctcccttttagatggcattcagtctgcagattctctcagaatggagaagcttgtcatgtttggccctgtcagaagcagccagttaatcagctgtaacatgagactttgacagaaccaactgcacagtggtagcttgtactgtgagtgcattgtcctctcacccacactctgcaatactgccccattgtaaacaagatgtctggcttaaatgggatatcctctaaaagtatttaggctaaaacagaagctgacatcatacgggaaagctgcgttccctctgtttgtatttctaacttcctatactattcccagagaattccagtggatgttgcttaataatgataacaatggattacatacaggttggcaaagggggcaaaattattagatcatccagtcaattggtctttccagcaaagggcagaatctccagatagggaatctaacacttcatttaaggcaacgggccaagtagtaggaaccacactgactttgttgtcttctctgcaatactgccagagcattgaatctattttagttggctgtacttgtgccctacttaattccttaaacacgagcttccaacacagtgttgctctttcctttggagataaccagtggagtaaatgctatctggtggaaggcaattaactcttgtaaatgatgcctgtgcaaaacccaaggtcttgttaccactgagaacaccttgacaagacaaggccaacacaggagaaaagtcctaaagagtcgtcctgtggagagtctctcacctttgctgtgtactgtattgtataaaacctggctcagaaagggctattgtttcaggcttatttattcacctgatggaatttattcaatagcacagctgaaacacttcgtttctcacctctgggttttggtctttataataaccttattcctggatatattttcttcttatgttcaaatatatggctaattcaaattctcaaagtggattttataatatctgggagtaagacacaaattatccagaatgggtgctggatacctacttcactttggtctttgttgtcaagaaaccagaagtctcaatctagcactttattcttacagtgactcatacttttggaccggtgttaggacccagtctctctgactctctctctttgggaattgtgtacggtaaaaaccatgtaggcctgaagctttcagtggcctcttcccttgtctataaaagacattattgagtaaaacccacatatgtcactagatctagtcatatctttgtacccttgattaatacaatgtaagatagtaccaaactatgggccagatacggtggttcatgcctgtaatcccagcactttgggaggcaaaggcaggcagatcacctgaggtcaggagttcaagaacagcctggccaaccatggccaccacggtgaaaccccgtctctactaaaaatacatacattagccaggcacggtagcaggcgcctgtaatcccagctacttgagaggctgaggcaagaggatcacttgaacccgggaggcggaggttgcagtgagccgagatcatgccactgtactccagcctgggtgacagagggagactccatctgaaaaaaaaaaaagaaaaaaagatagtaccaaactatggactagagagaaggacagagaaccccagaaagagagcaacagacaaacagtagagtggttataaagaagctgtgttcaaacttatgaggagtatgacttacttcacagagtacttgatgaattggttgaagcctttgctgggttacatctgttactctttagcgtttcttggggaactaaggaagtgccaggacactgggaaaagagccagcataaaatggttgtgtaataaaagggtaaaaggtttagttctgaaaattaaagacctctaagctcaacttttatagcaagggaaaaaaattgtcacactgaataaataatgggaatagaacaagatactgacttcacatgaacaacatttcccgtcagactaatctaacaatttaatctattgacaaaggataggtaaattgtatctgtggattagagctgggaccagaggtatctgggagcacagatacagagctaagcctaagaaaccatggcaagactggagtctcaaagcaggaacaaaggaggtagaggtcagagatggggacagacctggaaccaggggcctaatgcccagataataagatgatgtaggggtcaggcgcggtggctcaaacctgtaatcccagcactttgggaggccaaggcaggtggatcacttgcagccaggggttcgagaccagcctggccaacatggtaaaaccccgtgtctaccaaaaaaaattttttaaaaattagcctggtgtgatggtgctcacctgtaattccagctactggggaggctgaggcaggagaatcgcttgaacctgggaggtggaggttgcagtgagccgagatcatgccactgcactacagcctgggcaacagagtaaggctccatctcaaaaaaaaaatatatcatctaggattttgtgccattttctgttccttaaaaaattgaatttccaggcatgagcctgtgaagattgtttaattcctttgagaacctgagcccatcattcaaagaactgtcactcagtgacagtatcatttcttcattctttattcattcattcactcattcaccaaatacatatcaaatgccttatttttgtaaggtaatttactaggagtaaataaaataaaaatgatggacattagtttgttatctcccgagtcataatagaagagttgaaaaacattttgatcattatctaatcacaactgccttttctattaaaaaaaattatcaaaagaataacagttaagatgtaactaagtcccgactactttgaagatttggtataaattaggaaaaaaattcaaataaaatttaatgttttaaaacagcccttttactaaagacttggcttcttttttggctttttaaaaaacttacagttgcagccttgattaaagacctcaggtttcctaaagtacttttaaactcattgctttatatagtttcaatatattgctgctaatcagtgccctgttcttaccaactaaaggtgctatcttttatctgcaacttcgtttgtgtcatgtccagaagcaaaagcaaacataaaacaaaacatatggaggaaaaatgatttcagtcttttcactgttcacttctattttttactcttcttataaatcagtaaaatgttactcttgaactaccatcacacccacttactgtggttttccattgttgtataggattttaaaaaataactcattaaataagcttcatttgaagatctctgacaagcttgcttttcacttatgaacctaatgtaaaacatccaatttagatacattttaagcagttactaaataattcccttacagctatataggggtgcctataagatgagtcaatgggtggtttatttagtcatctatttattcagcaagttatagagtgccaacattgaacaatgagccatcataggttaaaatcaggtaaaataccagcttgtgcaagaggtgtgcctgccatcacatttgaacccaattgctggaagagacaagtcacagtatggaacataaatacctcaatacaaggtaatttatgaatcatattaggtaatttgaacaaactaagaaagactgagtgaagaagatggaccctaaaagaacggttaggatttttgataaggactagaggaatatataagtgaagagaaagacataagtacgggctgaataggcagggaaacccagtgtgtattcagggaaggtcaaacagaacatattggcaggagcagaagcttcatactggaaaatagaagcaggtaaagctggtgatgcgtggaagtgctgtggtgttttaaatgcgaggtgcctgagtttgaagtatttctacgattcaattgccactcccttgtcattcttagccactccagcctatcctcaagctgctgccaacatgattcctctaaaagataaagttaacacataactcctctgttgaggatttctcagtggattttagaagggtatgggtccctaagcccactcaagtatgggggtctatgagactgttcagaactgagcaccaagacacaggttccctctggctgagctcagcttggagggtcaccactggccctgcctggtctcatagggagctggataaacaagagccctctttgatccaagcaatggtctcagacagaggtgaaattgcacctggcaacccattatgcgatggcaaataatggcaaacaggctgagagatctctgggttctgattaaattccaggacacttacacagtggaatttgatgttactggcttactaaactcaaacaaactttcaaattcactgtgtaaatgcatttaatttcagcaaaacagcatccattatcttaagtttacattcaaatattatagattatatttttgttttaattttattttaaaaattagtgctgtgtatggtggaaagtaggaatatagatatagatatcatacggcattatctaatttagttttaaaatgatccctgcagcgtagttattattatcccatattatagatgaggaaattgagggttagagggttcaataacttatgcaaattcaaacagcaattaagtagcaaattagggattttaaaccagttctattcaatgccacttcttctgcacatgcacattcagatgtcatcttcagagacatcaaagtagaatttgtaaatgacagaagctgagaagtgcaaggacccagactcatctacaatatctacttcctggccgtgactcatcagaggaaaactacgaattatggttttactaaatcaaggagttatattcgatgacttttcaaatcttctctcatccccttgagtctatgatcccttatcaaatttctactgctccctaaacatttcagatttcaagagctcagttgaatcaatgaggaactcttacccatattgaaggaaatgtcttttatagtgatatgttcctgtttccctaaaacaccacgagcaaacttcaaataccattccaacttttgcccttttttttttgtccacacctctttcaaaaataagtaacagcattaacaaaaaccaacaaaatttggccctagcccatctgaagtatcagccagatttgcatttagttccccagaccaaagtaggagaagcagttagctggttacaagcccttcacagtgctaaagaacaatgaatggagggcttcaaaatcaaaaccatacgtttggtaggaaacagctccaactggtgcttgattactaactaggcgttctgcttctaacatgattaggacaaacacagaaaaccctgtagggtttgaactgatggactgatgtttccctcccaggaagaaaaagagcagtatccaatggcattgaatcactgtgattctggataccttcaaaagccagggctttgagggggttctcatttctatgccacacagtgagcccttctctttctcaggaatcctctccagagagagaggctttgtgtagaattttcctgaatgcaatgaatgtcagcacattcccagctagaatgtgcattctattcttatcaagtgaaactgacctccctgccccagcatgctctccttgttcaacatgatgattaatttcaatgatgcaggtttctagatgaattgcactagaatttgcatccactccagatggcaaatatgtacctctggaatctcctcacccttaggaaagaggtcatgtgctagcttgcaagaatgaggatttttaaaatagttggcttacaatcaaatctgtgtcccacaaaatgctctgtccagactagcctctctccttttagttggcagcgatcctctccttcctactcattttccatctgataccatgtgactcaagtaggagtcacaaccaaaatgaattttttttactgcaaaattcaagattttacagtattttttcagccaatggaagcaaccaggattcataagagtctgcaagttgatgttcaataggcccctgaatcatgcttattcacagatttccaagttaattgccctgatacatgctactgagcttcttctagtgaacaaaaatcttactccattagtcatcactgtcaaaaggaatacagtacgcaaaataaaagctggtcctctttttgtgtgcatttctgcatcagagtgattgtttcaacattgattaaatacagatttccccccaaagctttgttggaagcgctaagtggttcaggtgatggaaagtgagttaattcatgtgctcccctaagtattttttattgaggcattttcttaggattcaaagcaaaaaggaaggaaattgctcttatgtgtatcaaggaagtccaaatactcacatggacaaatagctgccccacttcattcgcccttctttgcatcccagaactgtcacctccaggagcctctgctgaggttaccatggagctgtggggaaaattttgtttggagctttcagaggatctgtggggataaacgtggatgaagacaaaaacctgaaaatctaggggctggctctgggttggggcagaatcataagagctggcccacccacccagcagtgtcctggctccctcattacctgaaattccacaaatttagttcaagacaacgcacatttgctgtgtcctgggaattctgagataactaaaaaaaaagctcacggtataatgggaaaggtaggaactttgttataagataactctgcctgaaagaggtgaaaaggcattactgaggtatttttgagccagattttgaaggcaggatggaagattgccaaatgcagaagagaaagccaagggaatcccatttacaaaggtcagggcctgatttgctgtggcagaagaatgggatctggaggaacctagcactcacaggagaggagatgaggcaggtttcgccaggcccgaagacgtggccaccaaagtgtaagatagtgtgatctgcaacagtgctggaaatagactggggtagggagagaccagttgtgaggtttttgccatagtcccagcaagtacttatgaagatctggacggcagtgacagcaggacttaaaaaaaaaaaaaatcacatcttagaaatttttttttctttttttttttgagatggagtctctgtctcacaggctggagtgcagtggctcaatctcactgcaacctctgcttcctgccagagtggctcactgcaatctctgcctcctgccaggttcaagctattctcctgcctcagcctcctgagtagctggaattataggtgcttgccaccacgcccagctaattttttgtgtttttagtagcgatggggttttaccatgttggccaggctggtctt

SEQ ID NO: 38655 - DNA, 5518 bp, Homo sapiens
tacttgccacaatcataaagctggaaaatgcagagctggaatttgaacttaacagttaaagttctcagactttaaatttagaaaaaggggagaaggagagttctgtatttgaaaatgaaagaaaaagataccaatgtttatgtggttgacgatttgcatagtgggatcatttcagtactcaaatggtttaaagaatttataaatacatttatgcaggtaaatattctgtatcctttattttagtttatttaaaacattacagcaataaaaagaacacaatctagacaaaacctggtgtggatgcccaatatgtaagataaatgaaagggaagctgctcagttcaacaggaggtgggaggttcataaagcatcaacatcaccccatctctcctctcagtcttttcaaaattcaaggaccccatggctctcatatatggccccaaataatttttagactcataaactttttttcataccacaagcaaatggctccaggaagcaagcaaatgttatatgaggtgacagaggtgttctttgcccttgtggaaaattgtggctgtgcaggagggctctggccacctattgaacccactcctgtgctgtcatgggtgctcctatgacctagagaagggcagaaccgatcatggacagggtttagtgtcagctgcaagccaccttcatagagaggccctgacctttagtccacagaaacaaataaagagattaaaccttattttggaagggagattgccaagactgtttctggcaaagtctgcccacaggagatgataaagtcacccagggataacgcccccttgctggtcctctgcttattttaaggttccttccaaggggcaatagaaggcatcataaagtgattcacacctgttcaaacacagatcattttagggccagcactgaccactcctaaatccctgctcatttagggaagtaggaaggattttagcacagcccattcattatggcaatatttgccctggttttcccaggactgaaaggtcttggagggcattgaattttcaatactagatccaagaatgttccaggaaaaccaggacaaattggtcatcttactacaacccaacacaccacaaaacttcagggtgttaactgatctataaaacttagggccagacgctgccataggagttcacagagtacaaataatttttgtgtattttagatgtgctctttaacaaccaagtcatagcatttacattcttcctgttacaaactcaataaatatactcattgtctcaatgcaaaaaacccaagtgtataatccagttaaatatacatgaatactcacagcttgtgatggttaattttatgtgtcaacttggctaggcatggtagatatttggtcaaacattattctagatgtttctgtgaatatatctgtaagatattaatatttaaatccaaagactttgagtaaaacagattacctttcataatgtgggtgggcctcatccaataagctaaaggccttaatagaagaaaaaactgacctctcttgatgaagagaagattctgccagcagacagccatcagacttgaactgcaactcttccctgggtctccagccagcagattttggaccagcactgctacaatcatgtgagacaattccttaatatttatctttctatctatctatctatctatctatctatctatctatctatctatctgtctgtctatatctatcatctatctattcatgtacctattactgattaagaaaaagatcttactagaaaccaataacctgataaagttgtttgtttggacttttaaaaacttagagggaatttccagcattaccccataattttgcaataaccacttttattcaatatttgttgagtcctcctgtagctgatcacacacttgtgtatttagaatacaaatccaacatactgtatgaacagaagacatgggggtacatactgtgcagggacgtcctttacagacacccagcttacttcactgaatcttgactcgtcacatagactgggttatttcttggctccttaggttcataatttctactttcttagtcccaggtacagcccctttcatggccacctgaatctcaatccagtggcttatcagcttagattaacaatgattaacagagctctagcccttctttcctcctcttctttagttcatcattaaactgatgtgcatttattatcttcctggaatctccccagtgtgttcttctggattcttctgagaggtaaaattaaagttttcttgcctttaccctgtaacactattgtatatgtatacagacacatagacacacactatttgagtttttatttaatatgaacaaatgtggaaaagctttctcctcattttcttcattccacatcctggttccgaggcagctgatctagttggcaggggctgctctttcctcaatgactctgtctttcttggaggaaacaggatgagcagcctcagaagagtctgcctcactgtacatcaagaacacgagaatcttagccaatatacacccctggggcagcacgtgcaggctgttccgagaatcaatgttggaatcaagatgtggctcttgaatcaccgccatgccccagtgcttttgctagttacacttcatcatgacgtactctttggactggtttcacagaaatgtcttagttctccccttgagggtggagagacatcatgatagagcctgagggccagtgtgattcttgcaccatgagtactgttacctcacagggagcctgaagaagagcgggggagaagcttgtcaaaatttctttcttgtgccactcagacctgatatctagatctcatatgatgacaggaagttcctggcacaagtccagtccttcgaggtaatggtcagttgcaatctctgtaaaggcttaaggaaggttagcaggccaaggcacagtcttactgctgcagctggtcccagggcactactgatatgcatttccttatcacccgttctagactttcctcatccttgaccaatattttcatctggtttgcattcttgccctgtgtggtgatagagaccttcatccctgaggagtttcagcctttaattgtcttattcctgtcaagtcacttttgatacaatttccctttattttatttatttatttatttatttatttgagacagagtttcgccctatcccccaggctggagtgcagtggtgcaatctcggctcactgcaacctccgcctcccgggttcaagagattctcctgccacagattccggagtagctgggattacaggggactgccaccacacccacctaaatttttttgtctgttttgtttagtagagacaggatttcaccatgttggccaggctggtctcgaactcctggcctcaactgatctgcctgcctcggcctcccaaagtgttgggattacaggcgtgagccactgtgctcagacacaattgcctttgatcgatgagactggacacagaagaactaagagaagcccgtgaatcctgtgggttctagacatacttctctctgttgcagcaaccctcattcctcaagggaatcatcatcaattatgcctgacagtacggtaactcctttttttgaacactggcatatagagtccaaggtggcttcagtggatgtcatggcagaagagtttccaccctgggaactaggatcactaatctagcagagactaagtttgtgagagtgaggagcccaaattctgaaagtggatcatttggagttacagtggaacaaggttgatcttatatcctgtatctatcatccttctagcacccctttgtctgtctaccaatctagctatctaactaatatgtattatgtattacatatgcaatctatctgcctaatatatattatctatctaatattttatttatctatatattatctcttatctatccaatcaatcttaccatgaagggcagcaccccaaccccacaaggtgtgatctctttgcaggtacttatgctgagccttccatgggcctttcattagtctctcaagctagttgcttctgaggaatagagtacactttaaaactcatgactccatagccatgagcctgtcgctgcacttcctctagttctttactctgaggaaatgtcatgtgtacaatgttagcagatcaggcattttgcaggtccttagatggtggtgttggcagagataacaccgccacttccctgtggcagggaagacagatccttctccagagtgtcagttcaggtaagtgtgaatcactgctcttctaaggtgaaaggggtctgatgtatttgacctgccggtagctggctggcaggtctttccaagattggagccatatcaaaggctcagcatcagtctctgatcctggcagggagggaattcagcagcagtagctagaacagccttagtgagagggagtccatgttgtttgatccatgctcagtttccattcttgccaccataacttgcagccccattgcacaaacactgggatgactcagtaggaagctggctgacattcacagggcaggtcatgctgccaacttggttgttgagaactttgcatgaaattgctgttctctaatgggtattcatatgacataaaaggtctgcatgtattgtttccactccctaagtctctgtacatgaatatctgctagacatccttgtcccatgtccttgagtcttgactatttgatcaaatcattttcattgctcaggactcagtatatattctttcctcaggccacttctccttcaacatgaaatgataatcaattttattgcccaattggagaatttctctcaattacttttcttcagggtcaatctttggtgagactttagtacagcaaaagttcatttctggctagcaccaacatatttcaccaaactttgtgtaaaccaagccctttgtccttctgtcggtcggtcacaggaaatcctcagtgatgacataggaatggattgatggaaagatgctggcacaagagagatagatgaaatgggcctaggctacctgctgatacaatttacagaggtgtcctgcattgacatcagtccagtccagtccaatcctcaatgtaccttgtccatcatgtaatagattgctgccatagccccccctgcccatatgatttggtagatctgatcaactcagctcatgataagcagctctggtttcacagagacttggtgttccatgatgggaactaaatttttatttgtgactagtgtcatgctgtttttcaaagggaaatttattctgttatatatatttcaaagccatatagatatgtcttcactccagaatctcagtggtctgtgctatgatttttctaatgagatttttttcagagattctatatagcattcttacccctaaataccttgaaatgcttcaaactagatgagacatatggctcaagaggcagggcagcttgtattgcaacttggtctttctgcaactccctgt

SEQ ID NO: 38656 - DNA, 2722 bp, Homo sapiens
gcctataccacataacatattggcaattgtactatcactgcatgccaggaatccgggccacccagtttgccaccatcggtggagacccaaagttctcttttggaggtctgctttctaaggacacccattgaaccatgtcttagcctggcttccctagacaacagaacttgagacaaaaatttgtgtgctattacttcagtgtagggtagaatcccagggaaaaggagacatgagacaaggaacgaggaagagcaaatacaaggaagtgcattacccagctagccagagcttcatagcaacacattggctgctcagtctagagaagacatctccagaaagaccataggagaatgactgcatcttggaacagtccatcaggccaggaagtctaaagggcaagcaatttatgtgcaggcattccctcatgtcttgtcttccattggtaagagttcacgaattttgtctactttctctcacatctgagttgcatcaactcagcaccacctcaggcagcccctggagcttctggaactccattccaggcagtgtgtggcttcagtggtttcttctttagttggtgatgtctgttgaagcttctcctctgtggggatgacccgagcagaaacagactttggactgcagcaatggaatgagctattgctaggatattcctggttaagggagaaggactgtaagtaaagccaggctctgggggcaataagtgagaaagagtggatctgaatggcacataaactgggcctggtatattcattttctctttaaggaaataaagctgaatgttaaagttaagcccacttcctaaaggtgtaacaagtttgtgctctacctctctaaataagagctttcccacattttagaatttcatagactcacaggactggaaacttctgtgcaaatcatttggttcagcctccatatttttcagatgagaagcacaaagtttagaaagttaagtgacactttcaagtcaaacagtaaatggggaagcaagaaggcctgccttcattccagtcctcattccacaatatcacactgataaagcagatgaagggggagtcatttgcactccacttttgcctttattaaagtcttttgaaggtgttggtttagtgaggtaatgtctcaaagcagttttaagaacactgaaggaaagatgttatgtacttttgaaatgcaattgttggttttggaacaaaaatgtttaagacaatgccagcctactttgttgatgaaccagagtgagtgttacaagcctctacatttccagaggcagaacctcatctttggaagtgaaatagaatacaacacaaagaaagaatgccagcaaacaaaagtgagtatgtcagatcacaactacctccctttaattctgaatctattaggttggtgcaaaagtaattacggtttttgctaccatgttaagcaattcacaaggattggctcagagatcttcctgtgatctttgcattcacacctaagtggaaacctagtaccctatgccctctttaggacagctatcaaggtgacatttgtagctgtggtaaggatcaataagcagctagagcagaagctgcctgttccgtgaaaacagcctaatttctagcaaatctagttgctttgctcttggtggacacattaacgacagtgacatctggaaattcttgccctcctgacacatgtgctaaagggtataaagatgtgaactccaccttctgacagccttgatttctgtggctactgaagctgcaatagaatgaaccaatcttcttccatgttccaaatattatcctagaaaatgtcttgtttttgttttctgtctgagaaaataaaacaaatctggcttgttaaaatccatttcctatcatgtcttaaattagcctgggaccaatttgtttgaatatctgctccacctctgtaggggaaaactgatgagcaggcttcgaatttccacaagtgggtgccaaccacggtgtgccctggcactggcttgggatgctttctgccaaaggcagggtttcacttctgatttcatggcaaatcaaaccctgaatgagaagacagctatagacaggagggaaaacagtctcttcagtctgtcagctcttctcctaatattcctctccaccccagaagaatccactgatatgtaacaggaaaaatacagactacatgcaattcggggaagtgtgagaaaacacttaggtagtttccaggcaagactatcatatcagcaatgcaagtaaagcatttgaaatagtgattatactgtggaaatgatactcacttccagggcctgccaggtgctactcttgatgctgaaaacaacctctcctggaatggaggtaatagtgcacttacttttgtgtatgtagattaacctattttaccccttttagatggagaaaggctattgccctcctgtggtaccatgaggctgaagactgacaaatatataatcacgcattttttgttgtttcctgaattatgcaggatgttttctccagtgaattctactgtggaggctttctgaagtgtcagagtctattacctgctgcccaggaaaatctattacaggcatgcacaagtggagctgaaaaataggtctttactcactaacagagactgagcaagaactgctaaattgtaccctccagcagtgtgttctcggctttttctctccttctttatgtatgcttaacaa

SEQ ID NO: 38657 - DNA, 1175 bp, Homo sapiens
cagtattcccatattcatttgcatgtgagcacgtgtgtattaaattgtatacaattttatcacctgtataggttggcgatcaccacagccaagacctgaacagttccaacataaaaagggtcccttatgttacccttttataaccacttccacctcttttgtgttactcccccagtctaatccctggcaactactaatctgttctttacttctgaagttttgtcatttcaaaaatgttatgcaaatggaataatgccctacgtagcctttggagactggctttttccactcggcatacatccctggagattcattcaggttgttttagatatctcaagggtctgtttctttttgctgttttgttgcgctaacatgttatacttgtaccacggtttaaccattgacctgttgaaggacacttgggctgattcccatttttataagtaacagctatttacttttataagtcaagctgatttacttgtaacaaacgtttgtacatgggtttttgtgtaaccatacgctttcatttttctaggataatgacccaagaagtgcaattgctgctggattatacggtagttgcatgtttagtttcataggacactgccaacgtgtattccaaagtagccatatcattttacattcccagcaatgtgtaagtgagccaatgtcaccacattctccccagcattgggtattgtcactctttttccttttagtcattctgataggtgtgtagtgatatattactgtggtttcaatttgtacctccctagtgaccagcgaggttgaatatctttttatatgctcatttgctatctctgtgttctctttggtgaaatgtctaattttctaactggagtgtttgttttttcaagtcctgcattttgagaattcttattatagataccagtcctttgcaagatatgtggtttgcaaatattttcttcccagtatatagctttttatcttcttacataagctttcgcagcaagttttacattttattaggttcaatttgttgattttttccttttatgaattgtgcttttagtgtcacatctaagatctctttacctagttctaggtcccaaagactttctactatgagttttttctgtaaacattctatagttttatgttttacatttaagtctatgacccattctgag

SEQ ID NO: 38658 - DNA, 1956 bp, Homo sapiens
tgggaggtcaaggtgggtggatcacctgaggtcaggagttcgagaccagcccggctaacatggtgaaacccccatctctactcgatgatacaaaaattagtcaggtgtagtggtgggcgcctgtaattccagctactcgggaggcggaggcaagagaatcgcttgaatctgggaggcagaggctgcagtgaactgagatcatgccactgcactccagcctgggtgatagagtgagactccgtcttgaaaataaaaaataataataaataaataaataacacagactttggagtcaagcaatttgaatttggatttagacttgaatctgcatgtcaccacttgctgtccatgtggccttggaaagttactcctctctctgactctgttctgatctgtcaaacgagaatattgataactaccttacagagtcattatgaagattaacatgaaaagcactcagcacccagttggctcacaacaaaggttgattgttattttgaagtgttaaatgtcccatcaccatttatcaaccagagtctgtgttctaatttactgtaccggatgctgtccagtagttgtgacatctgggaaattcctccagctcctctgcattgactcacagaattcacaacaggaacagacatgaaaactcaccataatcttttaaactaagtaaaaacaactaagactggataatgtaggcaatgttttttatctacataagcactgcactcgattaagtcctctgaactattctcctagcatcagttgagcaaactatacccatagcaatttggctggtaaaaagttaacttgggaaaagaatcttaagtaccttcccagctgtgttctaattgcatgtttagaaagagtatgcatacattttttagtgtggtaacatcaaggatagatgttgctaaagagaattttaagtgattcatgccctgttttcttattcaggaaagctttttctaactttcttctgataagcctacagaaataaaagagaatatggcagaggaaggcattaagaattaaagtcgggaaagtattcaagaagttacccagtttattttttgagtttcagacagaagggtctagcctgaccctcataaggatcagatgaggcagatggaggcacctcgtctctcaacctaaattcttagtgaagtcccttatggctcagctgcaagcctcctgccacaggacacgcacatttcctctagtgggtttgggggtggagagcagctggtatcactctcttcataattaccccgtatacttaaagaagacaattgagtcatcctttatcctctttttttccaggaaaacatccagttccttaaaacttacctcataggttctgttttccaacactttaatcattgtgtcttttgtgtgccctggccaagtcccctgcttcctcttagacctggacctggtccctgaacaaggacctgactgtgctgacaggaataggaaagcccccctgtttccacactcacttgtaagccaagaaagtagggaacagccatccctggcattattccagatgtgggaaactctgctgtccacagggacaggcaggagcatacacagcatgggtgaggatcgtgtcagaaggaagaatgtgcacagcctggccaaagaggccggccctgcttggttacagtggtctgctgccctgaggcacattgttgccaggtcttctgatttttctagaaaagttcaaaatctggactttaaaagtatctgcttttttttttccaatgttgtctaccctctcaaaaatatttaaacaatctgtgggcaaataaaacatgtctggaggctgaatcgggttcctgggcctcttaagaaattctattctatggctgcatagtattccatggtgtatatgtgccacattttcttaatccagtctatcattgttggacatttggaatactatgcagc

SEQ ID NO: 38659 - DNA, 599 bp, Homo sapiens
taaatcaagacttagctttttctcctgtgtttccaaatctctttgtttgtgcttcacatgggatatttatcacattctaatttgttttgtaattatttatgtacatgtcaagttttctccccagtaggttgtgagtttatgaaaggcaaggactaaatcttaatttttaggctgttccagcacttgtactgtgcctgtcaacagtgctcagtaagtcattattgaataaatgatggaggaaaataaaagggcctacaagacaatcttcccttaatccactgctttttcctaatccattgagtctagtaatgcaggcatcactgttctctgaatgtgtgcttcaaaggtcaatgctcctgatgtggctgaagctcatgccaacttctcttactctgcattgctgtggagagtgactattcactgcattggtggtaagccttcatatttttttctccctttcttctgttatatttctctgctagtcccctaccccatttccagtatccctcaatcactaagggtctgaaagtttctataagctaaggttatagatggcagtttccagtagtttctgtatgcatacctacccatggagagtg

SEQ ID NO: 38660 - DNA, 597 bp, Homo sapiens
ttgaatttgttttttaagctcaccacacccagcttttccccatatttagttttaaacaaaaatctcaccatatttctgtaattaatctgtacaatattgctactgttttcagagtaactttggaaagccccaacactttgggcaatatctgcaaaatgcagttaatttaatgctatctacattaagggagattttaaactttaaaacaagagactgaattagccagttttattgagactagagcaattaacttgtaatttatggttggctcaaaaaggtcactcactagaagtgggtgtctgggtactccccaagtcctcaagctgacctggattgggcaatttgagcaaagcagaatggtttggaagaagcattctccagccaagaggacactcatgttattgccaattagacttggaaactggttcaacttgctgggtcaaaaacagctagacagcaggagtttaaaaaatacaaaatgatcacttgtgaaaatgcaggtggaatacaataaatgtcaggttaatttaagccatctttggagagtcaatactcttctcacttcccaaaatcattatttaattgagcaatttcttt

SEQ ID NO: 38661 - DNA, 3766 bp, Homo sapiens
cttttcagaaatttgggcagtatttatcttataaaagcaaccctgtttttttttttttatggaagtcatttatatgacttctatgatttatatgactggtcatttatatgattgtttagcttagtttggttttgaattttattataaccatgatatctggacctaaggtcccaaattgaacctctcaatatccatggcattgcaagcatgactatgcatgcagtggggaaaataatataatgtatttgcataggtttttttttcctttttaaagccctttcacatctactagtacatgaaattgtgccacttactaaaattcattgttaatttcatttttctaatgaatatttggccaccatcctgtagaccaggttatagatgcttcacctattacctgagggttttgtttgtgtatttgttgagctaactttttaactaaaaattttaaggtcaaaaagtacatttggtggtctttttattgggagcccagactgtgagaaactcttctagagtcctctcttaaaatccagatactcttttgaaggattatgtaactaagtaatagcttaaaaggtaatagttaatatcttggcatgtattagttggcagttgttgaaaaggagaggaattttaggtggtaaagtaaattacctggaaagggaggatgcctctggaggagggggagcattaaccacgactactaggaacaaactccacctctccaactacaactgtgacctcatctctcactaaccttccccataaaactgcttagtcacctctggtggcaaataaaatctgtctctagactctaagttatttggggggatgaacccttgtccctcaccattgctttccagcctgtcttagcatacagtagagaatcaggaaatatatgtagaataaatgaaaactttaatccataatttgatgcctagttgtaatatttaagcttctctcttgtgctatctttgttttcaaaaggaataatgctggagcatcccagaaatcgaaatgtttatctttgtcttaacctctagaaaggaatcccatttttctgtgggataataaaaataatagacaacacttactgaatgcttattgtgtcctgggcactgtcccatcattttatacagtccctcactaccagcccattttacaaataaagaaaacatggcagataatttaagtctacttgcttataagtttcctctcttagtgttaaaaaagacaaaggtgctgaatggcgatgacaaaaaaagtcccttctatttgtttttaattaaacttcattgtagactcaacaaaaattaaatgcaaacagaaagagaaaaaaagaggaattcatccctcagaagcccatcacagtgcctaagtttatcaatgcataacagtctatttagttcattcctacgtggatgtttatgttggagctacattcacagttaaatacgtcgtattgtggaggagttaagatagcgcaaaactatgtccaccaggtggcactcatccctctagatgaggggcagaagttgagggggaaacacttctgattgtgttgtcagcacccttggcaaaaagattcaagtactgacctttagtttcctgggcctacagctttttatccagggtgagttgaggagctgtcagacacccacaagtgcatcctgcctattttgctataaaggagaggaagttctcagctgcatagcagtacggtgtagttgatggatgtagggttctgtttcaaatccaaattcaaatacaggtttcttcaaatcctaggcctaccagtcactagttgtatgacttgggcaagttacttaacctttctgtgctccaagatcctcatgtgtgaaatggggacaatcactatacctacttcattttcaattgcctggtttaacagtcctctctgctcacagagggcccagataaatgttctatgaaatggaattaattatgtgaccctttagtagctgggcattaaaatgcaattaaaattttacttggctcagaatatatgatcaaagagatgaacttgagtttcaggcttttttgttgttattgtttttttattttctagagatgggggtctcactctgttacctgggctagactgcagtggcacaatcatagctcactgtagccttgaactcctgggctcaagtgatcctcccacctcagcctcccaagtagccagaactataagcatgaaccaccacacatggctaatttttattttttgtagagatggggtcttgctatgttgcccaggctggtcttgaactcctggcctcaagtgatcttcccacctcagcctcccaaattgctgggattataggcatgaaccactgcaccctaccaagtttcagttttaaatggtaaagtaaagctatgactatttactagatgtagattactcataagagcaagaaatattgatttagcctctccagtgagccagtttagtcacttctctaggtgcttttgctgcaaagatgagcaagacaggtcctatccccactcccattaagcatataatgtagcagggaagataaataaataatgacataaaagtaaacaattacaaatgtacaaaggaatgtaaagtagatggacctaacctagtatggggggttagggaaggcttccaagaggaagtggttgtagagaatcaggtaatgaagcaaaaagaaagtgggtaagcattccaggcaaaagaactggcatttgcacaggtcttaaagtggaaaaaagcctgctaaaatcaaatacctgagaaaagtccagtgtacctgaaggggagaaaaagtgggacagagaggctggcagatggagaggttacttactgggcaggaggaagtattaaagggttttaaatggaaaagtgacatcagatgctgttactctaagaactgcacttttcaagaggtcattatgcaacttgggaggctgcggtgggagtatagcttgaggccaggagttcaagaccagcctgggcaacatgatgagaacctatctccacaatttttttttaaattagctgggtgtggtgccacatgcctgtagtcccagctatttggggtggggggctgaagtgagaggatcgtttgagcccagatgtttgaggctgcaatgagttatcgtcatgccactgcatttcagcctgggtgacagaatgagaccctgtctctaaaaacattaaaagaaaagatcattatgactgaaatgaggagataaagaggctagtttggtgaggtaagactgtattgagagcgtccaaggcaaaaccttttgtattatttcagcctgattatgatggtagcctgaaccagtgtggcaggaagtaaatggctttgagagactcttaaggcatgtggacttgacaagatttgttgattagatgtgtggaagggaggaatctaggtatctgacttaaacaagagtgttgatggtattaccatttcccaagacccagagaacattggagaaatagcagttttggaaatttaagttaatgtgctcatttcaggataggatgagtttgaagccaaagacatattcaagagaaactgttaagaaagtacttctatgtatggagctcgaaaggagactggggttgtttcagtagatttaggagttgtcaccatagctataaattgaagcatgatgagaccttctagggagaaagtgaagagtgagaaaagaagatgtcctgggtcacaactctagggaacctcaccattttctacattagtag

SEQ ID NO: 38662 - DNA, 4035 bp, Homo sapiens
cagtgggaacagttactatatatggtctgaattctttggttcacctcactttagtgacagtttccagatacaggtcagtccatttaaacctggcccatttatggcaatttatttcattataggataaagtagttagaaccatgagtaataattactgtgtctacagtgcttttaacacctcagccaagtaatcctcatctcacccagtgagtaagtttgaatgcgcacccttccctgtgcgaggatgaagaaaccaggacctgggtcaagaggattgttctaaattctccaatgaggcaatagggcttgagtgagaaggtgtgtgtgtgtgtgtagggggggtgtcctgattctctggcccctacatgcctgtataatataccccatcactgatcattactcaggacctgttaatacactctattcaaatacgtatgggtatttgaaatttcttttaaactacctctcatgtatttataacacaaagaattggccagtgtctatttcccacaatgtgagattaagtaatttaaaagatactaaaagtcttgtaaatgaagacacaccacaccactcagtataatttttttctttttctgtgaaactaatattttctgatattctcggcatccaaaaattttcatcttggggaggaggaaaaattgagacttactcccactgtttgccggaatgtgaccccaggctggcttcgagttgtcaaatgttgtatttctcattttatgtcagtgagtctggaagcaaaaaaggtagaaagactgccttccgtgggggccgcgacgatcgcccctccttccctcaagcctcgtcccatccaggctcgccccgggtgcggagggtcgggccgcaaacccgcaaggcgcggaggccgccgcgacgctcaccggggggcgctgtgaagccggcaccgggcggacagaggtgagtcggctcggaggcggtggctcccgttcctgcccgcgcgccgaggggcgaatcccaggcagcgaggtcgccgcccccgcccctcggccggcccctccgccagcgggcgagaggggagtggccgggctcctcccgccgccgctgagcactccgcagctgggtgcgcacgggagcctcaaccgcggcgcgtggaggcagtaccagagcgcgcggcgcgcagtcggccggcagccgcgggacagccttggcagaacagccgcggcgggagccccgcagccccgggctgggcccgcgtcccggagcgccaccggagagcgaggacgacgtggaggcggagtggcgcccggcgaggtagcgccaggcgaggtagcgcgagcgctttctctctctctcccctgcccttccctctgcgtccgtcgtcggcccccgaggcgcctgctccgcgcctttgtgcccgcggtccctggccccgtcgcaccctgcgggcgggggtcagcgggctctgccgctctcttgggagacgcggcgctgcggcgggaacggcgcacgctgtaggttgcggagggtggtcgtgactccgcagtggcttcgggggtggcgggagggaagaagggcttgtaaactaagttgctcttactttgccccatgcctctcgtacctgtgggcagagtcgaatctcggctgtcctcgtgttcacccacagcccctccattcctctggcccacagctgtttcctggccccctggaaagacacggtgtggcttcctccgggcaggaaagcggagggagaacaatggggcgtcctggggagtggggttcaggtgcggtgtgccccggcggcggcgggggaggaggggcccgggacgctgtgggcctccctgcgcgtgcagctgcgctcgcctcctttgttccgccgcagcggagggggttgccctgggtctcgtttcctgcccgggatgggattgattcacggtcccagagagggaaggggaagggggcggggctggaatggaaaccagattagagacgggagctacgaagggtggtggggccgggaagagagttggggagagggttgggagagggtgatgagagcgcgctggagaggtaactacaaacacacaacattttgttcaagggccatgtgagtttctagagcttatttgtagtgctttgttcaggcttcggcccagcgtttattgctgcaacaagttgtgtgcttcttgagtttctaggcgttcccaatgttagattgctcaaagcaaatcttcttagttacagtgaaagaagcccccccccctttttttttgagatttgaaaaaattttgctatgaactatggtattggtgtgtatgtgtgtgcctctgggtctgtgtgtgtagctagtggatattggctggaatgggtaggagacaaattttatagaatcaattttgacgtaaaattgttttatagtataatatagtacaacagttttccaggactgtttgagggcagaaaccaccagaaaattagacattgctataaataaatgaatcagactatgtaacacaattgaaaaacccttttacagtctgtcccaggaaacacaccacacacaccagcgtttggggtttgaactgaggagccctggcattgaagtgttctgtgctttcactctctgtgtgaggatcgtttagaggtggtagaattaaatgtaatgtgtcagacatttgttaagtgacctttcctagattggaatcgagactcgccaaaggattggctgacctagggagggagctatgggggattgaatgatgtgtgttttttgaatggggtattccaagcaaaactgttttgggaggaggctgacatttccaggcattcatggtttgtgcctgtgggacactggtgggaggattcccaaagtcggactgaaggttagcattactgtggtgataatttaggagacattctgttgtagtagtctggctgcagacagggctgggaagtggcccagagctgcctctttgacaagctgagggtccgccattaaaccacccctttggccatttattttgagatgaaccaagtttgaaagcctcttaaccttagaaggctaattaggagcttgctgtgggggaaaaaaatatctcctgcccactaagtggtaatggaaaagagctgtataagctactgctgagggtttgtctttttcgtgggggatgtggtcaaattttcaggccaggctgaaaagcactgggagttgtcctcaggagccattatgatgtgaagttgaaatgggatggtgtccaactgtcaagctgtttgtcattagaactaacacactgcctggcaaaacgttgtgctagggcagctaacagagggagactttttgttgttgttgtcttaccattttggacttttcacttatgctgtgaattgttttataaaatacaacacgattgaattcctctcaagtactcattgttctatacattaacaaaatgtaaagcatctgaacattgctgctactggagatgtggacagatagcagaatcctaagtggctggtctctggtctctggcctctggccgttctggtggatgcctgattgtgtgataaggctggcaacaggctgtatccccttcccaggatgaatcatcactttgtcaagcctggagttaaagactaacttaccctgattgctgcacagttatgcaaagcaaggaggaacgtctgacatcatggggaagaagagggagtgaggtgagtgggtggtgtttggctaagaagggatcttcagcatgtagcatccatgtttttagcatttgtcctcctttgggtaagattgtcttctacctcccttctactgttttcaatagctgaacatttggattttaattaaatagcctaacaataattatagctatcatttagtatgtgttcattacatgccaagaattttacatacattactatattcatcatcacaacaacttgataaagtgggtgttatcttcattttccagtggaaactgaggcctggaggagttaagtaacttgccccttacaccgtacagatgctcctagatttacaatggggttatgtcc

SEQ ID NO: 38663 - DNA, 1043 bp, Homo sapiens
tgtgtgacataagtaatgactgtagcacagatgcgctggttaggctatgtaatgcttctctctccccgcccacccattcccaccactctaacacctgtgagctccttaggtctgactcctagtctagccttggcttacctttcatcccagcttcattgttcatcaggctcctataccggccgtcctctgctaccattctgccaggtcaccgtcttctgaatatgttttttattcttgctttaaacttcttttctgcttaatcacatccaactcacctttcatggtcgagtttcacctcttcagctatccttctgtgattctcctgctgtatgatagtagctgtacctctaaacagaaatgttcatctctatattcctccttttgaggtgaatcgcctgccctatatgaacatattatactggttatcttactcttaagtattctttcctcagttagattgcacatgcatgagaagcagtagatgtgtctctcattctttcttctttcattgcctgctaagtactgtttgtataccagtagcatgggtcagagtgggaggttgtcaacagaagagtccagcatgtatccatgatggactctcgatcaactttatatgattaactcatataaaacagccctgtatggaagctgaggctgcctcttcctagccacaggatattgacctactttccccttcttatctgcttgcaaaatatttgttgtacttagtgtgttctccctgtcacaacgaatgtttgtctctctctttcatatgaactgaaggctaaagtgctagttaaatcagtggaaaaagcaatggagaagaaaagttggtaagcagttttaatttctaaaccagaggggccttataattttgtcatttaaaaagaactctagtttttctacccacctattgagagacagacgtaagggtagaaatgtaaattttaagttttgatgatttataatataataatgtattttgaaagccccttttttgataaactacttgtagaaggaagttaacttttcttaatcgggtt

SEQ ID NO: 38664 - DNA, 1878 bp, Homo sapiens
agcgttggaagctgggacaagatcctaggagatgatgtgttatacgctttgtgaggaaactgaggcttgaaggtggcagtgtgcccagtgtctcactgtgagctagctgcagagctgggcctgcaacttggatcttgtggatgttttttccagaaccactgcagtagtcgttgtaacctatgatctgttgcagaatgccaaagctgttgttttctggagggataattttcttccttaacctacaaacaagaatagtgcactaaattcagtacatttctctccattgtcactaaaagagcctgaacgatgggaaggcccctgtttttttttttttttttttaaagaaggccattctgccatagtgtatcccaggctgttttatgtgagtgtctttgttcagaaccaatccggagtggcctccaaaactaatgggtagaggaaaccctatgtgagtgcctaccaggtgcaaatcactgtatttttaattataatgaaggtgtaccttgagtgattgcatgatccgatcaggcataaagagaacagaggaatgaatctacaagtggtgtaagactttgttgaggatcttagcacatggaatgagattgagaccctctgattaataagctgattcatttggaagggaagttggttttcctctggtggctatattcaattcagtaatcaccagtctttcttggcgtctgtgcacccaccaggaacaaatcagagtcgggtgtgccagttatatttgaacagttttacgttcacttaggggttccggggtctcaggtttgccaatctaaacacattgacttcttggaatttttaaaatctgcctcgaaggaacgcattgaaaagtccgtgcgttataattagcatgttcccctgtacagctgagtttgtgtttctggatgtaacagcggtttatagtttttggctgcctcgtccctcaggaatttgtagccttttttcagacgttagctcattaattctccagtcattgtgagctgtatagcatgacgaccggttcccctacagctgggctgcatgctgcccattctggaccttctagggttgtggcaggtggggggtccatgttgagggggtggagagggaggcagggcatgactttcagacccagccttggagtggggtgtgtgctctctgaagttgacctgccctttggcagccattcctgccatgactctgtagagcttcctccgggaaatgactgtagggacagtggtgttggctgcatttcctccttagggtgttaaacctcatgtaagatcaactgcaaatgaggtaactcactaggttagttacctggacacacctgctaggagacaggacagaagagtaggtaagctcttcagggtgagaagaagaaaggggcattggagagggagaaattcatctaatgagtttgctctctcagtcaggctacataacagccctgtggaatagatattgtcatccctgagtttttagattagaaatttgaattccagagatgaattcctttggattccagcctgggtctgtggctccacagcctgtgccgtaccacaatggggtggatcgaaaggatccttggtggtaaactattgctgcaagccttctgtaatatagaagcaaaaactctttgaaaaatggtgcagtgttgtgaagagcttggtgatttaggaattagactgaagggtatatgtaatagaataggtgtgaaagaccattttcagacccgtcagaaaagcttcatcctcgccctggctcttctagaaaccagctggctccaccgccttcttttttaaaggaaggttttgcctgggattctaaggtctctctccttgctctttaattataaacaaaggcacttag

SEQ ID NO: 38665 - DNA, 1741 bp, Homo sapiens
atttaggaaggggcaacatttgatatgaagaatactgattttaacctttattaactcttacgaaaccctttgaagccacccccttagtatattagtgttcattggatgcataggtgatcagcttgagatccaaaaagaatatccttgtatcctcagttacagtaggaacttcctaagccttatagatgacttagcctgctttcacataaatttaacaagagaggaataagttagagtatatacattttctactaatctttttccatcagtccacatcaacagccaaaacttaggctgttttagcacctggagggagagatgatttggatggttttgcaccacagacctctaccttgggaaaacacatgcaggcataatcataggttacctgcggaaggtcttaggttactggcttaagaccggagggtttcatttttacttttatcctctatattttcatgaaggatgggtcactaagggcccttggatgtttctttaggaattgctagtttttaagccgttgctttgccttcgaaagacatattttcacactcatacaccctacctcacgtttggccatgcagtgttgctgctgcttctatctatatttataattggtttggccgttattaatagcagaagcttatgcatatttttctcatgtgaatagcattatggattaaaaaagggacattcaaaatggcagactctcatctaaggtcagggaaatgtattaaagaaaagtgttactgaagtataaagatgttaaaggcataaattataaaatgaacacatgtagctatttaagattacatgatagagtgagtcatggctatctggttactcattacctggaatgtgggtatagggaaggaggaagtgtggaaacatgtgcatgggtgttggtcattgttcctaaaacaagtagaaaatgatatataacactttgaacatttgcctcctttccgtaacttaacataacttttattataagaatattatatctatgattgattgttaatgtcatactttgtcttacaggcatagcttaggtagcatagatgcattttaaattttgaaaatctttgtccttttctatatttagagactttaactttctttgatgtttacaaatatattgcattgatctttaataggactcttaaaattaaagccagcgctaattaaaaattctggctgtgaaaatagagaaattgagttcgataaatttgtagctagtgatcagttatacattttttttcacttggcctcttgtggcctactgtttctgaaatcccactgtttgcttcatttctcctctttcacagacactctggtctatattctgttttactcactccacatattcaaatcctgctcatcttttgcggtatatgggaaaccacctccattctgaagcctcttctctaaaggccacttggtggtccaaacacatatggtccatattgtgcattctgtcacaaccatgaccttttatttatatatgatttttattaatcatatgacttttatttatcttatgtatctcattgattgtttcctatttaagtattagacttctacaatagtaagcatctttggaagagggactatacatggatactttgttgcttcaagatcagtggtcttaaaatctgcctgtgtttggttatttatagttaacttgtcaggtaacaccatccaatgtattgtgtgtgttataaaacatacacaagactgg

SEQ ID NO: 38666 - DNA, 861 bp, Homo sapiens
cagggaaggttctctttctattttccctttgcacctttccttttaaactcacctagtatcatgtttcacattggaatatgagagtaatcactgatcatatcagtgtgtgcagtttacgaagtacactttgccagcattccttttcatatcgtgcgcaagtgaatattattcttgaacttggtggttgttatctgctgaatcttacagtcattgccatttctacactctgcaatgtctatgagcgtttattcaaaaggtgccaaacattagactggccagtgtgttgctgttgcacagtgtagtgttgtcacgggctttttgatggtgttattttgtgtcttgacctactacagtttgcttttgtaatgtgattgtggaagtgctgccaaacaatcgcttgtcatcattataaggtgccactgtaaggtgagaggacagcagctcacctcgtcctcactcacaagggccttggcatctcactgtgaagagagctgctgctgtttgtttgggtggcaagagcagccaagaacatgtgtgacttttgtagaccaagtggaaggtcatcacgtgtccagctggtgctaaacttcttcccaaatcgctggcacatagtgcgttagcagtagatgacctgtttgaaggaattcgtgcatgaatggatgaagtcaaatgtagcatttgtttatattttttatgtaatcaagccactttcttctaaacttgaggaatttcctataaaaattagcttttcaatgaagaatctgcccatgccctgtgggttttttcttctaaaactgttacaggatcccatagaagctcagtcacatgataagtaaaatcgtactgcatgtttaacattac

SEQ ID NO: 38667 - DNA, 1954 bp, Homo sapiens
gtttcttgatgctgtgatatttaaaaatggaccgtggttaagtgcattatatttttctataggaacagcattataatcagaagctgtcaaaggctttaacaccaaataaatctttgcaaggaccaacagcatattttacagcaataatatagcccaacttccctaaaatagtgatatacactcaaaatcctgtaacttttatataaatgcattgactcatttattatgcaggagactttactgtatgtaaaaatgtagaaacccccaagccagcatgttatattcaaaatttgacctcaaatcaaagtgctgaactataagaaacactaatatgtaattaacataagccatggtctttgtgtttggactgctcgctgtttcaaatacattatattcacctacagactccttcccatttctctgtcccaaatacagagggacagagctgccacttctatttactgtcttcctttcaatatttattgtttttaaagagcctaagagtttttaaaatacctgtcttccttaaagagtataaaatatcatcagtctcctttgttgctaaggagaatatacaaaggggccagtatttttgatacatcttaatttatattggagagtttatgattgatacttgtgagtataaagtagttatgaatcgactgggaataagattttctgggctttgtttttttgttgttgtttgtttgttttgatgttgaaaggatggactcaaagtctagaattcttaaaagaagccctagcgtttaaaatttgattatattatatacttctaaacatagtaagtgctccctatcccaatctatagttggtaactatagtgtgaaatagcagagaacagacaccttgctgtttgcctttgttctctaaagcagcctcagcttcatttagggaggttatgtaatagaaagcccagaaggtacttgtttgaagatgtttctaagttttagttttattccttagtcttcagggataaatgtgggtaagacagtagagaaaaattgcatacttggagcatgggtggaaaactggagagaggagatgagtcattcctggggcaagttcctgcccacttcctcttctggagactttgattcatgagcctgacacgtgggagagggcctggctcagggattgctggctattcacacagttcttgacaaaccaaaaaagtctccacatataaagttgctttggggccttcctattcatctggtggtttctagtctcagtttagctattttatgaaggagagggggcccaagttgaaaaccaggtattaatttaatatttgtattaatggaaaaatgtgttagacctatacaagttagagttctgtgaactgctgccaggctattccttaattttctgcagattattgattattccttaaatttttgaaagtttttaatcatatgtgcagtcccattttcctccaaatttgaacaatgccatcaacttcagcttagatcacaagagaggtgtgtgtctttagccttcactttgagcagtaaggatcatctaggtgacccatgacatgttttggagactttggaggtgagtttgcaatagatgctgatttctgtggggaagtaagttaatttctacatcggtgattgtgctattctatttttgttttggtttttttttggcggggagggggcggtgtttttttagcagtagagtaagttcagacagtcaagtttttgttattagggcatctccaggagaatactctctccttattggtttttgaaaaggagccttagcacggtactacacagggatgtgtccctggggtgggaaaggggagttacttttggattatgatggatctcttcactttttggtgatctgccaaccaccactgccctgactgtttgggtggatgtggaccttggatacatgtcatgcatgttttctttttttcttt

SEQ ID NO: 38668 - DNA, 623 bp, Homo sapiens
atgtctttccttatgttgaaaatactttgtggtagcgctggcctgttttttttaacacttgaaagagttaacttccctacaacacaagattgactctaaaattaatttttttccttatgattacagattcagaacagaagaatctaggctttaaattcttgggatcaagttctaacttatttccttataaacattgtaaacatacacaacgtaatattgacccaagggcctgttgagtaaatatttggcccagggccagtgaagtgcatgggaaattgctgcagatgggagagtggaatggaaggcagtctcagaacaggtcaagggtgtttgcttcaatcagattatgtcagtggtaggcagctgcattgagaaagttttgggaactgcctgtgacatttgcagtacccattctataaagaaaataaattcagagaggaagggaaatatgataagatggtcaaagtctgttttatggatggtagtgtcgtggcttcatcttgtgtcattggattttgttctgttttgtcttttaggatatagaatggactcacattgactacttcaataatgctatcatttgtgacctaatagaaaatgtgagtacttaggtacagttttct

SEQ ID NO: 38669 - DNA, 557 bp, Homo sapiens
tggtgaccatgtcttggccacttccttctaaccagctttctttttaagcgctttgttctctaagcaggaagtccttgaaataatacccgtacatgatttcagtatccctttgccccgtgttttcgagaaaagctgtggtacagaaggctatctcacagccattgctttcatactcagaatccctaccccagtgacttccgtaactgtccagtaaccatcttgcaggctacccatcacgattgaaagatcctgagatctggccaggtctagtggtggggacatggaggagccgtcacagtggacagcctggttctaggtccttgctgccaaggcttggttcaagggtcactgaactacaggccacaggctacagctagcctgcttgcgtgttctcatacaacctgcaagctaagaatggtttttatatttttaaccgttgtttttaaaaaagcaaaagaagatgatttctttttttttttttttttttttttttttttgtaggtgggatgtattttttttattttttattttattttatttatttttttttaattgac

SEQ ID NO: 38670 - DNA, 876 bp, Homo sapiens
gctttgcggggatagcgtgtggcgtgaatcctaaacatagtcaaccacagagctccttcagcagctctcacagcttgtgttcgaaggtgtgccatctgggaaagggggacagttcgcttctgggcagcaagggccctgccctgtcacagagggcgtgtgatgttctggatgccataagctttcagtaaacagttgtctgagcgaagatttataatgtggccacatgaagaaaacaaacattgggtagcattataatgcctttcattctccagtgcctaattattgattggtctcataaaaataaaacagttcataggactctacatagcacccgtgggtcccttccccaggtggcacaggaagcctgcagaggaagtttgtaggtaaggatcgtaaatctccttagggagcattttgaatttaaacgaaaatgtccaaagtcataggcaggggcgcctgttcctttatgtgtcagccctaagtggcttcgctagctctatagaaccagtgttgaaaaccacatgcagtttagtgactaagcccttccttgctttttccttcccagaagtagaagtagttactctaacaaacctagattctgtaatcattatggataagtggatgtcagtttatggaaagagagtcaaagtcctgtttactctttagtggattttttttttttttttttttttttgaggcagagtttcgctcttgttgccaaggctggagtgcagtggcacgatcttggctcaccgcaacctccgcctcccgggttcaagggattattctgcctcagcctcttgagtagctgggattacaggcatgcaccaccacgcctggctaattttgtatttttagtagagatggggtttctcc

SEQ ID NO: 38671 - DNA, 852 bp, Homo sapiens
agcaacagcctctggtgattctaatccagatatatggtctactatacttaaaacaccgaattatttaaatattgaggtcgtagaaggttaggagcaaaggctggatttaaatccacaatttttgatttctaagtttagggctctttctactacattatgtcaaccccaaataacatcagacacatggaagcctgacgctgtctgctagcgtaaatctctttgttttctcatcaaagaaatgccacagctcgattccaggctacattcttgtgtttccagaagagggtactgataacaaatcctttctttaatgcacgtatttctttctcttactctctctccccaccccctctctcctcccttctttcttcctctgcttgtttttgttttgttttgtttcgttttgggttttttgtggggttttttttctggtcattaaagttgcaaatatgaaaagcaacaaagtgagacctgggaaaatgagtttacttcaataaaaagccaaagtccctggagaaatttcttgacatcattacatttttaatacaaacttgcctgtaagtgctgtcacttactggcttccagtcactaattttatgagtcagcactttccctcagtgacttcctcaaaattataggaataggaggggctggacagaacatgcagaagtaagaatgctgaaaatttaaccagagctgaagaaacgttgacctttaggaacaacaatgaccaaaaatgtcatctagttatcttactccctatctctttccattgggtagttagggaggaagccataagcctaacttggtatatatatatatatatattttttttttttcccttaagttatt

SEQ ID NO: 38672 - DNA, 720 bp, Homo sapiens
gattacaggtgtgagccaccatacctggtgagaaacataaattttaattgctgtgtaatattccattacataaatgaactctatatttagtgttctatttatttatatatttatttttgtgactttacatgacctaagaattaacatgtttgtatttcagaatattttttagcaaagatctttagaattggaattattgagtcaaaggctaaatgtttaacatgaagctatggtaaatactggctagctgtttgccaaacttgcttgattttccttctgagtacagagataggctacatttctcagcctccctggcagtgaggtaaggacatgagaatgaattcttcccaaaggaatgtggcagaagtgatacaatcatgcacaatgcttccaggtctggcccaaaatgacctcttacacaattctcaaggctctctctttccttatttgctgatggtgtgtcagtgcagggtgagcttgaggcatttgagaaagacagcagagcatttgtcaggctgtttctgaagaaatgtggggcagaatacccttcattcccactggcttgaattgatatcagattgagaaataaaattccaataaaatgttaagatattgagatttgggggtttagacattttagtgctagcataatcttaactaatagagatattaccattgaaacttaggtactactctgtaataaaaacctaaaatatgtgg

SEQ ID NO: 38673 - DNA, 1100 bp, Homo sapiens
actgccctccagcctgggtgacagagtgagactctgtctcggaaaaacaaaaaaaccaacaaaaaaaaaaccccaaaacctccaggaggtttgtttaaaaaaatacatgctctggaggcctgccttcaaagattctgattcagattcagtagatctgtggttcaaatgggcagatgttccctcatgtgtgtgcaaactcccattcccctgtccctagcagtgctgccataggtgactcagttcaggtgggccctagagcatacctacagaagatgacgggagggcagtgatgaaaaaaaccacagaacccacacaactgtacagcagtagcatgattaactcagggtggactcagggtggacatcagagttactggggggaattaacaaaataccgctttcctgagcctcactcccagagactgtgattccagaggcctggggagggacaaggcttgtgttggtgaaaaaatcctcccaggggattctgactaagcaccactgccccaacctccatagcagcctcaggatcttggtggtcctacctgatccagctgtgcccaggcaactctctcgtattcaaaaaactatgagcaaatattccatttttggtgaccaattaaactatagatcataataaatcttcatttttgtatctctaattcttttttcagaggctggcacacagtgggcacccagcaaatgtttttggaatgagtcagtggttctcggactttactctgcaacagaatcacctggagggcttgtttcaacacagatgctgggtcccgtccctagaatttctgactcatttggactgagtgaggcctgggatgtgcaattctaacaagtctctgggtgctgctggttcaggatatcccattttgagattcctggaataaataaagtttgaattgtgaaagttctaattctttgattacaaaatggaaatgtttcttttttctttctatttttttttttttttttgagatggagtctcactctgttgcccaggctggagtgcagtggcacgatcttggctcactgcaatctctgcctccccggttcaagcgattctctgcctcagactcccaagtagtt

SEQ ID NO: 38674 - DNA, 3592 bp, Homo sapiens
cattgggatggaatgggtaagagacaggcttggggctcagtctcctaactggttagtaactaaagatgccttggagaggagagttgagagtccatatttttcacagaaattctttttgagccacattgacattcctaaaacaccgcacatactgatgctatgatttcacggtcatttggtctctaatacccacaaactttgcctgcccctagcatagttttacagcgtttgtttaaaaacaacaccccaaactaaaaccttacctgcataaaccaagcatatctgtggtttggaaaacaggccaggagtctagagttctatttctaactatgcagctaacttcccaggtggactggaagaaatccttgattcctttgctccttagtttcttcatattcatccatccttctgaaaggtattccttaagtactgggaccctgtggatacaaaaataaatagaacctagctcctttgtcaagatccttggaatttaggggaaaagacaaacaataattgaagattgcaatccagtgtggtaagtttgttgttggaagtaggcactgagtcctaggggagcacagagaaggaatgtcaaatcaagcttggagctggggaggtgagtcagggaccacatcaaaggagtagtgatgtcttcctgcaaagttaaactctgtgaaatgagcagggcttattagtggatccagaagaatatttaatctatattcctatgttaattgaagagatggtaatttgaggtccctatatagggagaagtttttccagagctgtaagaaagaagcaaagtacaaacaaatttgcctaatatatccatggctgcttatccccagagagtggtctagatcttaagatctttctaatatgctccaagaagaaaatatttgttcttgggacatttctgtcacttaatatatttgcctttagacatttgaagggtatctggctttcataagaagtcacagtcacctgtgtcactttcctctcaacagcccctttctttgtacatttccttgtaatgcactatgaactctaggttgaatcattcaagtgctgtaatattcacatgaaagcaacaccaaactttgtctccatttttaggttcatgtcaaagctagtttttcactaaatatctctggttaccatttgatttgattttaaaataatatttcacttttctaaaagtcgatctgttccaccaagtcttaactcattgtagatacagttataaaatcataagcagacaaataattctcatttctagcacatacgttgctttcttcccaatgtccacttttcctcttctttttcccaagagaatttcaatttgatccaggatggatactagttagccaaagtcaaccttgagaattctattcctttattcagtggttgacttaggaaagggcaattctggtctctttgggggaagtcagctggcaagcctctggaaaaggtttccttctcctaaaagacacacagaagttgatgttctctctccttttttggaacattggtgcatctagagtggccctggaaccacggcagccatattgccaccagctggaagacgaagccaacggtgggagaagacagagctggtcgaatcccccaggagtaaaatgcagcctgtagtacccttcctggattgtatcttacttggagtcttcttgttctgggaggcaataaatttctttgttatttaagccatgatgaatcagcgttttcaattatttgcagccaaaagcatcctaagcaatagccaagtatgcatggaagttcatgcacttctctcacagaacattatgtcagacatttagttctaggaaacaggcttatctgatttctcagttctaggaagcaggcttatctgatttcctagtttctggcagattagaaataactttctctattctctagaaatagagaaagttagagacaggcagctggacagagaagggagagacatgaaggcagaaccaagaactcaagaggcagcattgtggggttatttaatgctggggcaaacaagttctcccatctctgtagctcttgtgggtatgagagcatagttcagtgactaacccataatgacagtcatgtgtctgtcatcaaaggaagtttgctttctgtttactctgtttcagaaggggaatgaggctgaatagtatgtaaaaatatttctttgtaaacaaggaaaagcttaagtgattaaaaggataagcttatctgaaaaggcacgtggagaacaaactcactccctggctatgctaaaaaaatgagtgctaattatatatgcaaatgaaacctattaaaaagtttgcttcatccagagaaaagggaagaaaaaaaaaatgaggcagtagtttgattgctgcatagagcagctcacttcagttttggtccccatgagaagccccagcagagaagcaaagctaagaagtgaggacatggtgttgctcttctgcaagtgactttattttggctcaatggctcagcaagtttgcctaagctgtttcctcagaagcctgccagtaggaagtaaataagctgcttgactctactcatagagggggttgagcactcctaattaaaatgtaaataattctcagggccaacagcttgtagacgataatgactggaaagatcacagaaactaaaatcgcacacgcaaaacaggttctaagtctttgtatacacaaacactaagcctaccaattgatttagtcacctccgtgagaaatcactggaaccaagttatttgcaagcatgcagcaggaaccaggtagctggtatactctggtgacaccagggagtaaagcttaccaagtccacggggcatggataactcaaaaaacaagggctttctgcaatcagctggtgaatctgtggtcccacacagccccgccccaagggttaggatagctcctcctgcccagcccatcagaagtctgcccagaatcttccaaggctcatatgtggaagatgagctatctggacaggccccacccaacagagaagtgttactttggttttaaaatcacccttcatttgagaagtaccctgaaactttaatatgcaaataacagctaaataaaaggaaaagcccaatacagtttctaattaccaacaaatgcgtatgtatcttacacatggtagctactcataactttttaaaatgaataagtgatctgttaaccagagtactacatgagggaaacagagagagaattaaatacttttactaagaatgaaacttaaggctctttagtttagtagttttcaatggcatttttgttttcttcatgctaggatactgccatacatgctaggattatcttactggtaaattactattgttgttagataacattttgttggcattgtcctaaacactccacattcattatttcattttattgccacaatagcatgggtacaattattaagcctatgaaaaatgaggcttagaggtgcaaagtaatttgcctgaggacacggaatgaggacctgctgggtcaccaggcaaacataggttcattcctatggcacctctacatatttaccgataatagtt

SEQ ID NO: 38675 - DNA, 1113 bp, Homo sapiens
catgtaagctaagtgcccataagtgagtgacaatctctctagtctcaaatttttgatatgaaggtatggagtagatgatatttaaactcctatcagtcctaacatcccataaattactgagatagaggacaagattaaacttgtattactatcaatatttattccttccatatagagactatggattctactaagtgccaaaaagttaatatgattatgaagtccagtttacttgcatgtaatttttattctctgtcttatttgtaaataccaaggttcaaaatggctttggattttattttcacttttgcaatcatttgggaattttatcaaggctgaacaagagatttggaaattcataatgcatttcccaagaagctgcaagattgtgaaattcatggggctctaacctttctgagagaatgggagctgactggacaagacagctcatttccagtaatgttgctgggtaattctctggaaataaaggtgaggccatagtaatcacagcccagttgtgtgcttctggttagagcctatattcaggggctatagtgggataccacacagcctttttttttctccctcagccctggacattcactcagcaaggtatactcagtcatctaggagaggccataagtgatacagcccaaactagtgccccatggaagcaaagaaggtacaaaaaccaaattgctgccaatgataaagtttcaaactagatacagatcagagacagagtgagattgccttttgcctacctcttggctaaattgtgtgtaattaactgtgtgacccacttcttcaggcattccatgccacttgccaaccacttgcagcaactgggcagagatcttcttcagtctgagtggttttaggtcttgataagtgataactcatatctaatgattaaagacccaggatcaaaatctccaaaaaataattttgaaaagcaaatgtctattaaactgatcttagagttgattatatttaaagtgggataatctcaaacacccttcataagtacctaaatgcaacttctgaaggctatctaatgcattgattggaagtttctgatccttgagcatgccactacttaatgaaccatta

SEQ ID NO: 38676 - DNA, 1079 bp, Homo sapiens
ctgggtcatttgtacctttaaaaataagctgtttgccttggcgttcctctatttttcttttccacagatgggaaccagtgagtgtgaccacaacccactaatgatatcacctaagggaatggtgggtggaaaatggaaggaattcgagtccttgagtgacttcatagtctccctgcaaatctgcattgctctttttgggactataacatgaggaagaaatgaacttccatcttatttaagcctctgcatatagatgtacacttcttggtgtttccttttttgaatagtttaggctttaccttaataagcaagaactcagctttcccttgcttttgcagtggtatttgcctaccaatttccccttcaaaggttccacgctactcctatttatcccacccacatgggatagctgagctacgaggtcaccagagaaggacatttacatttccacttaggtgtggaattcccctaaatggagaaggccagttatcttcttactgctcttgcacagtttctttcactgttctccacttgttccttttgccctacttaggctgcagttaaagaaacgatcccttggtggtttggctgctcaaccaatgggcatagctcaccctcaggactttccatcttgcctagctcacttcctttttctcccttctgagcattgcctcttttatttttcagatgctacattatacacattccctttcaaatcatacagacactttcaaacaatagttattgaatatgtactttgtaaggtaaaacataaaatgagaaacaggaaaagtacctgactttttggtctccttggaatacacaaataaagaggaaattataaattaaagtcaaaattcctgtaattgggatatgtacagtgtgttatgggactacgtaggagagatgcctgatccagtgttgtacaaaagggatgtggtcaaccatgtcaagtgaaataaaggcataaaaaggtgaaataaatgtgtacattggctataaagaaactgtacacctatgaataaaacatcattttaaaacttcaaataatttcagagtatataaaattaaaagtgaaa

SEQ ID NO: 38677 - DNA, 4851 bp, Homo sapiens
tgccttgactctcttgctaatgttgtgataatgtttccaactctttctagggctataatatctatgctgcttgtttgcaaatacttgggaagtggtggttgatctaaagatactcagaaagaatggggagaaaattaaggcttctgacacttttcccaacatttctgttatcatcaccaagaattaactagatgattctttaatgccccactactttattctgctattttatttcttcagtctgtttttgactcttataatgacaccactggaagttaagtctaaacattacctttaggctggagagctctggggtcaagattgactagatttaaaacccagctcagccattctctagctatctggtctctggtgagttccatcgcctgtaaaacggggattaaaaaggggaaaatactgagtatgtactatttgctaggcactagttggacaatttatgatccatttaatcaatcttctgctaggcagggatccccattttattatggttaaaaagctgtaataaaagccaattgacctaaagctctcacaagtaaatagctggagcccaggtttgtctctaaagcacatgctcttttcactacgcgacataaaaaaaactttattaatctttttttccagattatgtttcaagggttcccactgctgttgaataattaattccttttagatgtacaaaagcaagtgcaaagtaaaagaagaaaagctaaatggggaaggtgtgtaatatgagaggcagggggtaaggaaaaatgagaagtctgcaaaggaatttacgtcctatctgcttagcattacacagtggaagcccacgtcagacatttgtgttgcagtcctgcctgctcaggggttgctgggtgaccttctgcaaattacctcatctttctgggtttcaatttaagtatgcctgaaatgaggcggttgaattgatctccaaattcccttctggtgctaaacttccagccttgtagccactgacgccttcaccatcccagcctgttttcccttggtaccggaccagctgcccttgcccgaaccctgttcttcctcgactgcgaactttctaacgtactcacaggttctaaactctaccgttcctcgtgaccgagggactaaagggcccgggcaggggctcaactctgagagaaaaaaaggcaagaaaactccaaagttggacagcaagcgtcaaaagactgcacagcaggaaggcgaaaccgaacagaactgctgctgcgcggcgacagctgaagtgggtggagaacgggagggcgggggaggcggggccgagagcgattggaaggacgagggggcggagcccgcgctgacagcccccggggaggagcgagggaagctctgcgggctgcggcggccgggtcccgcccctttgcttcccctccccagcaccaggcgggcgtggcagcaggcgtgccgacgcagcgtgacttcacaaggggaggggcgggccgagggtcctgccggcgcgcgggcgtgttcatcagtcgctgtttgggacgctgggtgtgcggtgttctgtctccgctcccgtttcgctgtcacagcccgttccttcccggagcccgggacaggctgggcgcgcgcccgtgtgagtgagcgggactcagggcagaagtgtcccctcactgcgtttttttttccttttatccaaagaacggggcagttagtacgcttgccttcctgtcgcccggttgggagcggggttggtgtgcggagtggttcgcctttttttctttagaacttgtgagccttttttttttttttttttttttttctttttttaggctcagtgctgtccgggctggtttgcccggtccctgactaacggctttctgccccttctctcgccacccctgcccaaggtcgcccctctgccttcgcccctgtcccgggagggtgggaagctttgaccccgccctgcccactcgcgtctccgcagccgtagccgcgcctgtcccaatatgaatagggtcaacgacccacttatttttataagagatattaagcccggactgaaaaacttaaatgtcgtctttattgtcctggagataggtaagtggggtttgcagcctactccaccgcccgctgtgcctcccggggcgggagacaggggcgccggccgctgcgcgcccggggctcccctcctcctccctcccctcccccacccacgtggctctagtggcctccgcccgagatcggatcctacctgaggcgggagccctgggcttggtcacttcccaccttccagatgtattaaaataccggaggaggagttagcctttctggatgtcctcattatctaacaacccctccctttgatttttaaatcctcacaggacgcgtgaccaaaaccaaagacggccatgaagtgagatcgtgcaaagtagcagataaaacgggcagcatcactatttccgtgtgggatgagatcggaggtcttatacagccaggggatattattcggttgaccagagggtaggtgtgcaaaaaagtcgggggacctaacagtctgcagaatcgggattggccggctcctgggatcttggcaagccctgaagtcccccgccttttctgtgggccactcttgaggagttttgaactcctttggtgttaactttgggtggtgggcagcgctgggatgtaacagacctttgcagtgaaaggcagtcggtttcagctgggaaatccgcgcctctaccccggtttacaggttaagtagatttttaattattattattttttgggaccgagtctcgctctgtcgccaagctggagtgcagtggcgtgatctctcctcactgcagcctccgcctcgcgggttcaagagattctcgtgcctcagcctcccaagtagctgggactacaggcgtgtgccaccacgcccagctaagttttgtatttttagcagagacggggtttcagagtgttgcccaggctggtctccaactcctgacctcaagtgatccgcgcgccccaacctcccaaagtgctgggattacaggcgtgagccaccacgcccggcatagatttttagttctattctgagtcagtgagtctttttaggagactggtatagtccatattttttcttttttataagttgttttctctagtgtagttgccactcagttgtttcccaccccttctccatttttaatgacttgaaatcctggccagtattttacatatgttatttagaaatgtggacataaatgaaaattataggtaaaggatttagcatattctgtgatatgtcaaatttgtacttggaaaaagagggaaactttacagtatctggaaggctcattctccaaaatgatttcttgtgtcttctgctgtaaggtggatgttgcgcaaaaaccaaagggatacacagaaaatgtttggcagaaaggcatctacaataccttcatccaaaagagtcagttggcggataggtggctttaaaaaatactagaactttttttttaaaaaatagattgcttttagaaatttaccaaatttttatcttaggaagataaaagggcagaaaaggatcttaaaaacagaatttggaagcttttgagatcaataaaattgtaataatttatcattaactgcagggaaagtggtggagattgatgttggcctaataagtagaatcttagaagtattggaaagcactgagagtaggagcttagagctccttggtgttaccttgcaggcttacaacatcttcaggaagtgaggtaaagtgtcatcaaagcaggaagtgagagtcaggacttagacattttcttctcatacactgactcatgacagtaatttaaacttccacatctttaaaaaacaaaagagaattccttcttagggaagtatggtgaggattgattagtataattggagtttttggctccccaaatatttttcacccaatgattgaaagtattttttacgctaaaaacggcatcttatttcaagtatttcatgttctgtagtgacagtcataggtgtttccatcaaaaaaattattggaaaattaaacttattagttaggtactatagaattttaaggggaacaattacctgggagtacaatttaaacgaaaattaaaaactatagaaactctatttactacttcagtatgaccttgagaagttactacacctcatacttcagcttcctcttctgtgaaatgggaataattataccttatttaccaaaacaacacactcagcttggagtctggctcattctaaggcccttaaattctggttgaatctaagaaaagtagcttttgaagaaaaacatacctaacatctaaataatggttcaaatatcaacatgtttatcagaataccctgaaaacttacctcagtgttctcatttcttaaagtgaatgttaaatattttaattgtaaccaaattttttctcaaaatatgggttaatttttattttagtaaggtgaaatgttaatgcactgtatcctaagccactctttgtataacttaagagtggtgaatggtgtctttaataaataaccctttaattaaagtaaagagaactgtatagtaagttaaagtcatgaagttaccatagtagttgtacagagaaccattgagaaccaaaccttggattgattttataatattaatttacctttttcttagatatctaggattattttatgtagtgatgctgtctgctttcaaaattgttcggagtaaacatttgccagtttgtttactacaaacccagcatggtattaaaaatcacatgtttggaaaggcagataggtgaagctttgtgaccttagtgttttttttagcacttt

SEQ ID NO: 38678 - DNA, 3204 bp, Homo sapiens
aaggctacagtatgttttcccataggcatttaaacactcactttttccaacgctttatactttgtccctatagcctttgtaattttaactttgatgacagtttaacttaggataacctgaatatgggtattactgttagtcatttgtatttttatcatttaacattttaaatgaatgtttaatttgctgggttgagtaatgccaagggaatgatgctaaaaacaaatagatgtgaggttagtaaaagattaaagttacaatttatgatacgagaacttcttaactataggaaagtaggtaaatgaccctaaaaggttttctcagaaggtaaaagttttacatcagtctgaagacatataactctaacatttcagtttagttactgaaatgactttttctggtgtcattgagatactggctgtttgttccaagccattttaggctgagaatgactcttaaggtcttctaatgcatttcagagggttctagaaacaacaaactgaacatgatatgaaactaacaacatagaatgccccccaaacaaattcctctaacctcactgagtttacttgccctattactattttttttttttaagatcttctgtctcttgtttttgttttatcccttacctgatgaaagtgaacatttctagtggagaaagaagatcacagttctctaatatgggcattaagagaggggtacagctagaggggaggtgaaaacctgcctccactggggtgaaaaacagtgtgctgaggtttcagccagtgattacactgggtaatcaaccagtcccatgtttcacaaaggagttgtaatgattaacagttcaggtatgcttctgaggaaatctaattgagacctttggaaaatagcattgttatgaatggtgtggtgttacgccctgagggaaaagctagaaaaacattttacttttcaagtgtatttaaattacatccaaatgtttcagtgtgctttactggagactgcctgagtttggaattcaaatattgtaaccaaattactccaggtttctgaactaaaatgatctattgatgtttctcaaagtatagatcacagagtaagaaaagaggaaatcaagtctggtttatgacaaacttttttccatgttaacattggacccaaagatgttactaagagctttttactactgtgagagaaccagcgtgatgtgaagacaacgaacattttaagaagtttgactagtagacatttcgtttaagtcttttggagggtcttggttgacaacccacaattttattgtggctccccaggctttgagaacgtgtgggcttggatgatcattgttgacctataaaagagcacaggtctcttgagagtttattgacacactactgatcagacccccacaatatgtctcaacctctgttgaagggctagtgatgtttaaaaaaacctgttatttccaatcagaaattgaagttatgtctcttactccatcaaaatttatgcttttcagcattgggtaagtctagtttcttggtttgtatattaaatgcatattgagtaaaattcttagtgatttagaaaccatctacatgaggcttcccaggaacttgttaaaagtacaggttgcacctctgcattactagaataacatcagtgtacatttgggagatctgcatttgaaaccctgaggttgtctgcctcctgcccttgagatcttcccttgtattgaaattatatatatatatatatatatattttttttttttcccctcagtttcttttacctttgtgaggctaatatatgctgacgtgttggattgtaaaacaaaaaattgtgcttaaaagaatgtccctccagagggcagaattgttgggtaaagcatatagcgcagagcagaataagaggttcagtatggcctctggatgagggtattgcaaattttgaattaggctcaaataaaatgatttaaattatatatcaattcgaggatcagatattaattgggaggtcacatgactttccttgagcctatctagataaaagtaaaatgctttttttcctacgtttttgaaaatttagagtttattgttgctcatctcagcaaattaatgttaccagcatcttctgccttcctcctgtccctcaattccctactttactaaaagaaggctggccaaattgaaaagtagttgagttggagacttgataaatacttttgaaaatacttagagaaaccacccttcatcttccacgtaaagatctcagttctgtacagagaggcaactacaatgagtattttctgcaagtaacatggaaatcatgatttgattgccatgtgtttctaatgttcagtattaaatgtttatagccctcgtaggaaacaaacttctgacctaagttgctggactacttgaatagaaaggtagtcagcacaactagtgccatctactgggtcattgctgcatagtttctgtctgtttagaaatctggcttagtttaacacgtgggggaaatggttctgttccaatgaatagcgatttttgcctgatagtggtgttaagtatgatatggaaaatccttaaggggcagttgggccatttgtttagtttatgaacaatcaacactgacattaaatttcagttaagtagatgaaaccctgaactgcccctaaagctatagaaaatatgggaaaggttgccaagttttgtattctcatcacatttgtcaatattgttggtgagaagtgtaaactgttaaaaatgccttttggtgagtggtggtttggtaaaaacaattgaagtagaacacgacactgcccttagaaatttcattcctttacccaatggtatttggtaaaatcctggccaaatgactgctgctgttgtaattatgtgagctttgcagaacataacctattttaaatgccagaatgtgcttccatgaagaagaacatggttttgggctgaggagatcttggtttgagtcctggatctatttactggctccaggaccatgaacctcgttataaaatgatagtggggctatgtactcatagtgttaggaggactatgtgagctaatgtatgcaaaacatctgctccatatctaagggtcaacaaatgttaagccctttctccatcagcattggaaataagttaaaatactgttcatttctccatgccattattagaaaacaatcttctataattt

SEQ ID NO: 38679 - DNA, 584 bp, Homo sapiens
tgaataacacaattgcaaggagcaggaagtctactaggcttgcaatattcggtgccttcagaaaggacattccttgagctggtttcaaaatcagttggcaactgatctgaaaaaggatctttgccattagtcttgataaaagtaatgctgcccacatcaagtttttagagttagtaatatgagaatggcaggtgccaggtgtagagtgtggggtagcatggggggtggtcctattttgagaggagagtgaggcaggaggcatacagctggctccacggaacatgcttccacctgcccatctagtcagtgtgaggaagggcgagaggagcagacccctccactaggtggcagtgactcggtttcgctatcaattagggaagtgtcctggggtgactcactttagactcagatattagttttctcatgttaaacagacggacctgaattggaagaggtttaccttccttttcagatactgagataggatttttcctaacataatatcctctccagtgtacaagttgtgctcattaattcctcactgctggctctgattggctatgagttcaaatcctatgaaagtg

SEQ ID NO: 38680 - DNA, 1771 bp, Homo sapiens
tttgatgcttcctcggataaagaatcttggcctctcccaggctaacggatgagaactgactgatgcttggccaagtgtctctttctttgaatttgaatgttgagtgctatgacacaggacaaagaaaagttggagctaattgtttcactacagctccaagaagggaatgcccttcagttcttgtttcctaggttcacatgcagatggcaaatagatctcacaagttgtgtatgtttgttatgtagccatattgcttgattgttagatgaggaacttgtgtcaagatttggaatgtgtgaccttgtatgttttcagtgagaagggaaaatgatacatatgtggtgtgtacaattaaccatcttttggaaagagatttccatgggttcatttaactcgaggcctaagggtgtgagaattcctgcttcctgaagtgttggaaagttaaggtcaaatgctgggtgcgtttcaagttctgagacaataccagccgatttcaaagctggtgtttgtgtgtgcgtgcatatgtgtgtgtacagaactggggaggaaaagcagcctctaaaactttgctttgaaagatgccaaaacactgagccacatatttgtgcgagaaagatctgtgtgtttggatgaaacctgcctcttttgtaaacacaaggcacagagaggcctgcctcctcttgccctgcttttgaacttttgttcacattagcagtttccctcaccttggctcttgaacttccctttgtagtgaaattcacaagtactgtgaactggcaagaaactgttggaaagaaagggtgtgctgcactagattgcattttttcctgaacactctgaaatatcaggaagtatggaacatgagtcatcactttctgttggaaacttcatgacctttacagagtaggtcaaattcctcccaagctgtgcttcttcacaccccagtgcatgacagtaaaagggcaaatccgagggaggcagaagcatattcatattttttcttgcaatctgttacacattatcgttttttgacatactttgcttcacatgacagtactaatggtggaaactgaggtcaagtgtgagagaaacttgcctggtctacctggtgtgactgttcaaaaactcagtttggataaacccagagcctgctaggattaggacagtgttgaaggggagagcattccactgaggacttggggaaataactgagtaaaaggagaaatccctgagggaagaaggccacattccaaactgtgaatcccagccaccttgcaaactagcatttgatattatgtaccaggacaaaaataggcaaaagtactgcaacagtgttctggccaggtgcccctttgtagagggttatacagttctacaactctgccctcaggcatcaccgttttgaccaaggatatcaatagagaagaacctgaattatgaagaaaagtttatgttgcatacattatacacttaagaatccaggaattgagagtgtggtgtaagggagcaggctgggaaaggtcactggaaaatcaacaactttttgagttgaagtactcagccatttgaagaccttggtcatggaagaacctagctgtgtcaacaccctttttaattctattggaatatttcatcttcctaaaatcattcagaaacaagaaagtctacacagtaaaattttcttttatttatttatttatttattttgagacagagtcttgctctgttgcccaggctggagtgcagtggtatgatctcagcacactgcaac

SEQ ID NO: 38681 - DNA, 632 bp, Homo sapiens
gtccaagaaacatatataaaatataataagcatgtaaaattacagacatattgaaatgtttacatttaataattccaatttttatgaccctagcaatcaagtagaagatgtgattatgactaccaagagtttataaaatgaacaagcacaagcaaacaaaaatctagaaactcttaatgtaaaggtcagcaggacaattttagtgaaatcaaaagtaaacacaactttacttacacgagaattttttaattgctaggagaaataacctagagatatctcatagacacatttcttaggctcaaacagaagatagtgcaaactatagggaaattaagaggtctaaagttcaaataatgtttcatttgctcactcctctattagcattctgactcatgaaaaatttagtaaccagaagtagtgagtcattctattgctgtaggagtggatgctatcctcttctctattagttgtgtacattgaaactcaaaaactaattaaaatttgtttaaagtatacaatgtagcattccaagtgaagataaatataacttgacactaattattataataattggtgttagagacaattatcacatgaaaatatggcattaagtattgttaaataaatcttta

SEQ ID NO: 38682 - DNA, 1592 bp, Homo sapiens
aaaaaaaactcaggaatgcagaaagactgacaccataatattagctatatctttacaaattgatggtgttacataaataatttatcctctcaaaaacgctgattttatcataaaaagtgttcatttatcacatcatagtacttaatgtttggacaaaatcatatgaatacatactattagtcatagacaatttattagtaaagatttaattattgtatttcttttaagtgctaaaatatcacccaatagattttattcacctcttcactttccttttattcaaatatatctattaataaagatgcttctatgtattctaagtatttattttcttggcataaccaaacctttttcaacctgaaaatatatttaatatgtaattgaaatgaagaaaacagaaactcataagataatgtgcatctatcttgttagaaaaagctgacagtttttggaataaaatggtgttttagtgaaagtgaacatttatattggtgtcaactgcagaagtatttcaaataaaattaataaagaaacaagtatttggtgtcggttcattttaaccctgtttgatcttaacaggaaatgatagctattaaaatgacgttaggtcacagaatacactgaaagtagagatcaatggagagcaaacaatgctacatttttagatcaaggttctaacactagggaatgtcccaagatgcatttcattttcaaataaattccttctacttggagccaaaggtcagcaagctagcattagttaaagagatttcagctgcatcaaagttaaataacaaccaaaagtcacccacagcagagcctctctaatccatagatgtgtccccaagggcggcaggccaaagtagaaaacagagatttgttcaaggtgccaacaataattgctgtgatcagcaggtatcttgggctgagagctcaggataagaagcttttttttgtttgcctcacagaagaaaaaaatctatttaagcacacttacttgttgaactaaatacatgtagttggaactgattaatctctataacacaacacagccaattataataatgtttagaaatatgacattttatagtaaacataggaaactttatattcctttaaaatatctgatcaacctaatgcatagaataccttttaggtttttttttaagtgaagtctttctgtgaaaagctttttcatcctgttgaaaatatcaatattacaagccagagttgtttctttcagataaataaatattgattttcctcctctattttttaccaatgacaggcaactgccttcattgctctgaatattttattgttttagaattgacaaattccattagcattgaatttttattgtttcattgttcccacttttaaaaaaggcatttgtgttattttatgtgtgtgtggtagataagacagaaaagtgagactgaaattaatgtagcactcactccctataccatagtttccttgtcgaatatgatttatctaagtttgacctatcactgactttgcaagaatttattaaaaactgagctgtttccaatttcattctttttagcaaattagacaacaaagttatg

SEQ ID NO: 38683 - DNA, 1143 bp, Homo sapiens
taaatgcatgagcaaggaaaagtgtcagagttttaaattcttccttcatcaaacatatggaaaatactaattactctaaatctgcaaagttacaataaaattttttatatattattctaaatacagcacaaacattggaaccttttagcagtggctgaaaacactcctttatcccccattctttgtatttcactgaatcaataatcttttttttaggtgtgtttaggtgtggatttactgggtggaacttacaaaggagatcagtgatgagacaaacactttcttcacttcctaacaagacagggatgttatgtgggcttgaatgttctctggcttccctttgatggctacaaaaagtgttggcaagtagctagtgaaactcactgagcagtcaaggaacagaaaggttaaacaaagcaccatccaagacaactttctgtgatgatggaaatattaggtatcagcccaacagtcacatgctgctataatgcacctgaaatgcaatgtgactggagaactaaatgtttaatttcatttgattttaattatttttttaaacattttaaaactatgcatgaatggtggtcatgtattagacagctggaatctagaccacaggttatcaaacatttgttccaaaagggcagaaagtaaacagtttttgatttctgggtcaaaagtttttgttgcaactattcaactctgtactttgagtgcaaaaacagtgacctcacattgcataagtgaatgggcatggagaaatttgccagatggcaagctgaatttggccctttaatttgcttacacctagtctagaaaaattttcaataagttttgggtgggacattatttttcactggctttcttaacatggacctgaacaattcaaaaacacacacatacaacttttaggatgaaaacgatagtatttcagataaaaactaaacagatcaataaggctcataaagaaagatgcagaaattcttaacaaaaaaatgtaattgtatatttaataaaagattatctgccttgactaaatagagttttccccaagaatgcaatgtatgtttatcatttcaaatgaaatcaatgtatgctccacattagtatatatctttttaaaaagatcatcccaatagaagc

SEQ ID NO: 38684 - DNA, 1572 bp, Homo sapiens
tctgctatacgtacattatttcctaagtacttatattctttctcatatctaaaacatgcctgcacatcagcatacctttatacagccaatgacagactttattttcaaaaactgccatatgtttgtgaaagcattttgagtcaaaatacaaaattgcaacaaatttagttttaaagaatcttaattggcttttatttgtgattccagaattgggcaacatctcactccataaaatagaacaagtattccaatgagctgaacagaagttggctttacaggcggaaaatagctgcaaaaaagagagacagagaacaaaatgccaatttgtctgttatagttacttttctcttagtattaaaacaatggggatttccttattacactgactcaggttgattggaatctcctgttttaattgatccatttcaaagttcagtttgattacttggcatgtagcacaagtgatagtcctcaggttcagtctagtctactgaagcctagtgcgagaagctagtctaaaacaatggcctcccataaacgttctttaatatgaggttaagaataggaatcttgaaatatgctttcaattattgttttaagttaaaaaataatatttgttatgaaaaatattaccttgggtaatgttgacaaaattacttgggtatttttggtttaaacaaattattggaactgtgacaatattaaacttaacccaagccacgtgtttctggaaagtagcagtagttaagagaggaaacttctcacccgaaactttttgtcttccatacaatggcttaccacaaagaaccagctctcttcaaatgacttagatagcatttactcatgtcccttttttatgtatgaaaaggccagacacacatcctggaaaataccattctttgtcttacaaataattagctgatctgtttattccccttaactcaatctggacaaaatatctgttaacttgactttgaccaactcttacttagtcttatctcccccccggcccctgaacttgacgactcttaatctaagccagcatcagaatgtaaaacaacccctctctaaagcccctcctaagaattggctgactacaaagacattttctggtcaataatttgatcacaccacccacccactcccacagtaggattctttttagcctgttttctctgtctgacctttgaaacacttactagtctcacagttggaggttggggggtcctgttgcaacagtccacctcccctaatgcaatagctgccattcccttattgcagtaatcctttagaataaagtctctctaagtccaaagttcagatttgttttcatttgataaatgtaacaacaagaggcataagaaattctcgcttaaatggactctgaatatgtttgagcccaacatgtggacatagatatttgttaactctcaaaactaattttgtgagctagagagacgctatgtgcataagtgtgtttggcaggggtggggcaagggggtgtgtgtgtatgtttgtgtgtgtgtgtgtgtgtgtggaaaacaggcactttatttctaaataaatgctgga

SEQ ID NO: 38685 - DNA, 1028 bp, Homo sapiens
tctgaataaaaaaaggggggtgggggggatgggaggggagggggaggggaggggagaaaaaaaaactatccattgggtactatgctgattacctaggtgacaaaattatcagtacaccaaatgcccatgaaatgtaacaaacctgcacatgtactcctgaacctaaaataaaagttggaaagaaaaagaaactattattatgcctattttccatggaaagctatttaactagaaaaactcaactcagcagctaattaatagatgccataccagaaacaataaagtagcaggtgattaccctcctgctgttactacagcagataggccaaatcaatttatttcaacaaatgtttataaagttcctagcacgtaccagtactacactatgcactggggatacaaagaaagggttagtcatgggccctgccaaggagctcataatctggtgatgagtattttaaaggcaaaaaacaagaggcagtaagattcgttaagtgtactacaggagtatgggatatacagagaaggaagtgaatcatatcatgtaaacttttttatctcaaaaaacaacactaagttacacattaactggaagaacagcagcagcaataagagtgtaagcaaaaaatgagtgtgagggaaagtacataaaacagtgtcttggtgtttttatatcttttcatatttttatataggtttctggatttgatttgaagcatacaaatggtgataacaagcaagtagagagatacactatttcatttttcccaatactttttaaaaaaacgtttgttagctttctttaccaaccttttatctcaatacctaggaaagtctattgaatcaatgcaatcaaatttagaaatagttcttggcaatgacccaaattggcaagcagattaactaattggatttttagtctctatcaataatgacactagttcattaaaattgctatacattttagtgtagaaaaatttaggccaggcacagtggctcacacctataatcccagcactttgggaggc

SEQ ID NO: 38686 - DNA, 793 bp, Homo sapiens
ttagttttactctttgaacttccaagtttatttattgttattatttttaatgtggcacagattgttttaagaatcaacttggttcccttttttgaagtccttttttttttttaatttgttgagactggtttctaaagtgctccacctccaccacctgtcattagatggggggctgcggcttggagaacactcacagttctgagttcagctgtggacggaataatgaagggcagctgcagaaggaggtagagctgcagattcagaggtaggtggcaatacagtatttcaaaataaaaactaccaagcttcagatcggtgataaattgtcatgcactaagtgtacctggagaaataaaactaatctctatccattttaattctctcagaaggactttccctcttacatataaaatcctgggaatttccccctcctcatccagtcatttctatgtgattaatcatacattggttactcgtcactagatggcattgtgcaatgtttcttgacagcagtaactaaattggtaaagttacagcttgggctattttttggtattttcttctttgggatggatctagaggatctaaatctgatcctggatatgtcatcatctttatatgttttatgagtatggctttgtaaaatttgtgtcttctttgagagtctttttcttagtataacttcctagtacatgaacccaataattatcagtcttaaatgaacaataaataaattcttcctctaattttcctccaagtcacatgtacaaatgtttacttacatttgcagaaa

SEQ ID NO: 38687 - DNA, 2921 bp, Homo sapiens
ctctgtgataccaggcaagttaaagtcttgtgtgcctcagtttcctacctcaccgtgttatggtgattaaattaatatatatgtggagtacttgacacacagtcaagcctgcgattactgctgttcatggttttattttctctactagacaccagtaaggcacccccagaactcgctgtgttaagtagattctggttggatatagaaacacaggcaccccaggcggaatgcagatacgcctcaacatgtggattaagtaagagccaggaagcagagtaatgaagcaaaaataagacgtccagagtcaccttttaagaaaatgtgggttggtggttgcttaagaggggaggagacaatttagatgggatgtatggcgtgagcaaagggcaagaatgagcacggtgtaggcacaagtccatggaactgcttggctggatcgggatttttttgtcatagagtgttaagaaatagtcgatcagttgaggagtagaggagtgaagaccttggaaagttgccaaaagcctcgagaatttctctacatgtgtgacatgttctcaggactcaactttttcttttaggtttggaagacccgcagtaagtgtgctttagaattaaatgggtgggaaggggagctaggcaaaacacctcgcacttagcactaaataaagttcgctgttgccctaagagactgaaaaggttactttaacaaagggggcggggttaacttaacgtagatgtttaactcgtatacagatgaacattccagttgatcactctgaagctttttggctaaagcgtttgggtttagagcttccattactcattcgccttgcccaaggcctcagcaaccgacgttcgaaagccaggagaaaaggcgaatgataaagggcgctccacgcatgcgttaagaagccgccccaactcccccgcggcgttctttcttggaacaaaactagcgcggagccacggaactccgcagtttgcgtagacttgaatttcctattcctcggacgatccatgtggaatccgtgagtagtgcgactcctttacgcaactggcgttatccgaagtgaatagctaggtggcgcgtgtacgcccatagcgtagcacccataggcggacggggtgcggctgcgcagggagctgagtggaccttgtacgccgcaagcgtagcagggtgtcagacgcgccggtttctgcgacgcagttagcgcagtctgctttggtgaatacacgatttggtgcagccggggtttggtaccgagcggagaggagatgcacacggcactcgagtgtgaggtaactataaaaccccgatttgtttacattccctcccccagaaccggccccgtgcgcggcggagactgcgagtcccgggacggcgtgggggtagaaagggagaacagaaccggggagtcggggctggttccctcggggatgcgggcgctggggttcccgcagctgctgcagtcggcggcggccagccgaagcagagcgcgtggtgggcagagtgttgggcgccgcggctcctcgtgtgcggtctgggctgctgcgggccgcgggatcgggagccggcggcatccacttcgcgtgcggagcctcgcgcccccctcaccttcctgtggaggttggcggagcctcgcgggccgcgcccggggtgggggagtgaccgctgggcgggtggcggcggttagggggctgcgcgccggccgcggatggcgtcgcaggcgcgggcgggcgaggctttggggatctgtaggcaggtcttcgggggcttggcgaccagcgccccggttttttcttctccagtccttctctctggtctgtaatggggcgaggggaccccgggatggagcctcggcaccgctgttccggaccgaggctaacggacggcggcgcctctgctcctactagttttctcccggaccaaccgaaaagccgaggcggagcgcgggggtgtgaagatctcggcctgctgggggtccctggagctgagggtgagggtggggccgggtcggtgggacaggccgggtgggccggaggtggcgcggccgcacggctttgttccggaaagcccttaggtggagagcgatgtggggcgcggcagggggatcgcgtagaggaaccttcgcgcaccgcctctccgggtctgggaatctgctgaactccttgcctctcctggggtccctcgaacgccccagctaagaagggcgggggccttgccagggcgcgagcaacatgacgttcaaggtcttcctgtggcttctgtaaagaaatgttcacgtgggagcctgtccacatgggctgtactaaggatctggcacgaggaagaaatatcactgcagaacctgaagccctccgttggaagggtcgttcactcgagtacctattctaagtaacagtgacacaaaacacatgttagaaaaaaacaaaaagtatggtaggttatactgttttttaaaagaaacttttatttatgccttttgctgttaagtcctctaattttacattggaactgagtcattcttggagcaaaactagaataggtttgtatttgttttctttttggatgtgtatctaaattgtacataattaagaaaaagcaagtaatggaaaagctggagatgtagaacttagttccttctaacttagtatgcaattgaaagcctcaagtcaagactcctgtgtattgttttgtattaggactctattgtacaaatatttgagtaccttaatatgagtcagttactttttctagatcttggatccatgccagacaacgcacattctgcagacactggttactccagtggctccttactggaaacatataatatcagtgataagtgctgtgaagaaaataaaacaatgatgtgctggtatggatttttaacttttttatgtgatgaaccacagaatga

SEQ ID NO: 38688 - DNA, 1278 bp, Homo sapiens
gcctgggtaaatgtcaaaaatcgttggcatccagtagtggtatagtttgaggatgagtcgtgcacactaagtgggtcacaaggcatcaaagcaaaaatcagatcgctgaaaatcacggaaacagctgtagcccgtcttgatctctcgctggttttaaaacactgttcccaagcagtaactgaaaacgtcccacaagatgaacacgaactttctctagacgaaaggcagctgggagcaggacgcgtccacgagtcccgatgggaacgcgcccacgccgcagctgggactcgggagaggctagggggaccgcgtggccttgctgtggaagggacccgcgcgggcccgccgcgaagggggccctgcctggcgcgacctggggagagccggggccggccgggtggagggcgcacggggacacacggacacgcacagacacagacacgcgccccgggctgaggagggtggtgggaggaccgccggccgccccccgcgcggagccccagggaacccggactccagccgcaaagcggagaggcgccagcagcaatcagccacctcaggggcggcggagtccaagcccctctcagccggaccgtaccgcctaaaccctcctcgggtcctccttcctcacgtatgaggtctctgtaccgaggcggctggttccatcgcagccccgagccaacccgccaatcccgcaggacactaaccgctccggccgccgcaggttctcccgggactgccccctccagggggccgctgtcccgccccacgccgggggccgccacaggacgagttctctagctccagccgggcgaggcgccagggagctccgaacgtggcaggatccacttttacttttccagacaagggccgacggttgtgacctggcttctcgtgaagtgactcctggcgacagcagcggagaggactaccgaagcttgcagtcgcggtttgaaaactgcagccgcgtctggggcatcgccgttcgccagatccctccccctaggtcgggagagccaatcggaacgggtgcggagggtgggtctgtcacgtgacgggaggggcggggcaccggccgggggcgcgtgtgcggggcggggcccggcggtgagagggtgcggcgcctggctggcccgaggcggggcggggaggcgcggcggcgtggcggcgcaggtggggcgcactcgggctgccgcgagggaggggcggagggggcggcgctgcagagggggcgcgcggggctggaactactgctctgtgtactccttcccaccttca

SEQ ID NO: 38689 - DNA, 1645 bp, Homo sapiens
atagaacactactccagaaaagacaagtttcacactttcacaaaggtatatatatacgaaaacagtttgcgtgagtctaggacagtgaaagcagaaatcataacccaaaagctaaaggcccccgaagtttgcatgctgtccacctctatctgtaatgatcacaaatgttttccttcctgaagtttaatatcgattgaacccttgtaactctaattgtgagctctctgtactgactccaaagacttctaactctaaaagaaatgtgcctgtaaagatgttctctaaattaataataataaacgacgaaaagcacccgagcgctgctaatagtgaagacaaggcatgagagagtcagacctctgcagtctcgcgtcctcggaaacgtctacgtctaaatctgcagccccagtttgctccaggccccaagctccagcagaggatgttcacggcacattcccaaccaaaaaggaaatgaagcgtcctctccctcaactgatgctcaaatagaccccaaagtcccagtttccctggagaaccaaaccatccaacacatcctgggcagcggaaaccgaaatggcaaatgaatgaccgcgccggggcgcaagggaggaaaaacaaagccacctcccgccgtccgctacctgcggcgagggccgcgcgctcacctgggctttgcgcccgtcgccacaagctgcgggtggggacccggccgcggggcgggagggcgcccccaaagtcgcccggacccgcggccccggcgccctgcggccggtccgtgcgcgccgaggagaaagcaggcggccgggggcgccgccgcgcgttgcatgcagctcacggctgctgcggccgctgccacggagccgagagtctctgcgctgcagtccccgaccccgagaccgcgagaagcgcccggagagacgcggcgcaggggcagagcgcgctcggcgcgcccctcagcggctcttcccgccgccctccgcagcgggctgggtctcggctcgcctttgtgctggcatcttcctagctcccagcgacacccagagctctcgaggcggctccgcgccgccacccacccccgggttacgccacggcccccgcgcgacccgccgattgtgtcgagtcagcagcggcagcggggacgcgcgaagccatggctcccgcccgcgctcgggagggcgccgggggtcctgcgcctccgggaggtttgtggccgagcgcggcgcggccccgagcggccccgcagcgcccggctccccgccgctcgctctccaggcgccgacccgcctgcgtcgccaccctctcgccgctccctgccgccaccttcctcccgcccgggtgccgggcgtccgctccagccgcggtgccccggtccgcggagagcgaagagtccggcctcctcacctccagccgcgccggcgcccttcccgctagacgcttcggcggcatctgcccgcaccgccctgcgggacgctgggctgggagctggcggcacgtcggggaccggtggaagggaggcgggggcagaggacaggagggacagccagaccttggccagcgggacctccctgaggaaggtgcggaagaacggggcgggtgcggctgggcggaggacgagtcccgaggctgcggcggagcctgagttgct

SEQ ID NO: 38690 - DNA, 943 bp, Homo sapiens
aggaagaccctatctcaaaaaagcaaaccaccaaaaaaaccagggacagctcaatgctcttttccgtttcatagctacttacactcagatttacaaatacctattaacttgtagacagggcaagaaataatttatgctgaagagacgaaagacctgaaaacagatttctgtgttttactctccatgtggccatcatggacgaggacgaagagggacttgatttttcctttaacgagaagaatgtttaagctctgaatttttaaccaatttttatgctcgttactctgctgtagggtatgtatttaccaagattagcagaacaccgcgagttcaccaggcggagacaagtcactgtgaagtgggcagcacaggaccccccggagggcaggcgccggaaactacatatcccggcgtgccccgctcgcgagcacagtggagcctgccgccattcggttcacggcgctacgcattccctgagcgccgccggatgccggcctgggtcccgcccagggctgagggccctcctgggccgggaaaactacagttcccgacatgccctgccacgggtgcgcctgcgtaccggagctactgcgccggggagcgggttggtttaaaatgctgtgttagttccacggaaacccgctcgcctgctgcagtacggagcctcaggcggacagatggactgtaaggtgaggctgccgggccccgggctggtgaggggtggtcggaggctcgcgaggcttcggctcagataaggacagtcaccactccctggcgccctctccctgtcctgacggagtccagtctcactccctggacctcagggccctgatttaaggcgctttggcgttggctgccggtgaaagccatttaggagcgaagtttgcattggcctggctccagctgagggatgggagatagccaccgaagcctccagataagc

SEQ ID NO: 38691 - DNA, 1386 bp, Homo sapiens
ctgaaagagagtcagaagttgaaagaagacctcgaggctgtggaggacagggaaaacaagaaggcaaggaatcagtcccttctgaccgtctgtcactgagaagaagcacttatgaaatctttcatgagccatatgtttcgctttcttgcttccattagaataaggattgatcaggggaggatttctttttctggagaaaagataattttagaatagtttaaaatttttcccttaaaaatacattatatgtatctaactcccaatgttttttttttaactttctgtcttaaatactcaaaagagaaagttctaattttttcttttgaaacacatctgatcttggtaataataacctttatagttatgttttattaatgtggtgtaagatttctatgatgctttctccttaacagtgtgtgtatgcttagtgggaatagaggtcacatcccaaacttctctttgtcagcaagtgctggattttgtctctctgaggagggctgtgagttacctcattcttcagcagcttccactttctcttacagtctttttttctcagataattctaatgcgtttcagatgtattattctcatctgaccccgtcagaagacagctgagaggccagcctggcgccacctctggacgcaggttgtgctgagtcaggcctctctggttaatgtgtatgctgtaacatgaccacagttgggaagctgcagagttcaccaacttttctggggatcagcttttctttttctcaacaataacttaagaaaccacctaaaaataaaatatactttaattattcccactagcatcctactgtgtctgcttgtctgctttccatgctctttcctgggagtaatgagatccacaagcagaagagtaaccagaaaggatcaaatgtctttgtgttgtttcattttctgttaggtgggaaactttcagcgacaattggcagaagctaaagaagacaactgcaaagtcacaatcatgttggagaatgtgctggcttctcacagtaagatgcaaggtgctctggagaaagtacaaatagagcttgggcggagggattcagagattgcaggcctcaagaaagaaaggtacctgtggttttttttccctgtcattggtattgctggattgtactaaggagcagtgtcaagtcaataaatgaagtcactttatgtagcttcctttacaaaaaaaaaaattgcaaaatgatatgttgaaagaattcctaagttagagaaaatttagaattagaaataaatattatttccaaaaattcaaaatgcccctattgtgtagtgatgtgaaggaatttctagactatatatcctagaaattcactagctgtactgttgttttacccttgctttctgcaccat

SEQ ID NO: 38692 - DNA, 758 bp, Homo sapiens
tagaaaaaatactagaaagtaacaaggagaaaataaagaatcaaaagacccaaattaagctccacttgtcagctaaggcgaataatgctcagaatatagaaaggatgaaggttgtatgggaaacctcttctcacttcctggataccctgtgaggatgtagtcagtcaatggtgtctagggaagacaggttttagaaccctagcagccccatgtattctctgggaattatagccagttgtctttggggagactttttcagtggagtcactgctgtgtaaatgtttgatttctcatttgctgccagtgtcacattccggctccctatctgtcccttccgtgttgattgtactggactttgctcttttgggatcagtgggctagatgggaaagaaagctcagcaggaactggtaactttgggtctcatattggattctttctgtcatcctataggcaaaaagagcaagccagtttttccactgatcatctttttatgttattttccaattacttttagcaaatagaaaaagaattgaagcaaatggagctaattaaggatcaatatcagaaaaagaactatgaacaggtagatgatttccatatactctgtgtttacctttcatgcaaaatctcaaacttggagggtgttcaccaaatgtctctgtctttgtatccttccagtctttgagtatccagagatttgtgtgtgaaatgactaacctgcagaaagagatgcagatgttggctaagagccaatatg

SEQ ID NO: 38693 - DNA, 629 bp, Homo sapiens
gaaggaactttaggatacataggatttaaagatgcaggcatgtttaaaggcaaagggcatagcttctgaaaaggcaaaaagaaagggagaaagccccttttggcaattggattgttaaaaagaaaggaaaaaaaggaaaggaaaagagggcttagcaagaaaaaagagaagcataaaatcaaaggactcagaacccttcccacaatcatcaacacacacacacacacacacacacacacacacacacacacacacactctctctctctctctctctcacctggaaaaacacctggactttgcacacacctggactttgctacattcacagaagaggacatgacaaactagaaatattgataaacagcccaataccacaaacaggagcaagaggaaagttcatacagagctactgccagaaatcaagaaatgaaattcccttatatcaaattaggaaaaaattccccaataaacaattacaaaggagaagaaactgaaagtgaacacttcaaacaaatatattcagacaaactttgaggatatgaaaaaacattgtgaaacaaattcaaaaacaggatgtggacagaagtggacagaaatcagagataaaagcaagagtcattgaaaaag

SEQ ID NO: 38694 - DNA, 1449 bp, Homo sapiens
caaaaaaaaaaaaaaaaaaagaatctgccttcgaacttaaaaatttaaaaaggttgcattacttttattttctcttgcacttgaagtaagcaagaagatacagtaagttcagatatttctaagtatggggaaaaaaaaggtatgggtgaagattatcttcttatcggacaatacttttttatggactattacttcacaccagtgggagactcctcaaaaacaggagctcaatcgttccagttcagaaaaggagacattggggcctaaagaagagaagtgagctgtccacccaccgtcacaaaacgacttagtggcaaagctaggactagaacctgaaactgactccaaactcttctccccacctcccatttaacttaccagcgttaagctaccctgaaataaaaacgtagtattgggggaaaaagaagaggttaccaccaagacgaaagcttttcggtgggggaaaacgttttaaggagcttagcacagggatgaggggtgaaaaccggagtttctgtaagataaggaagaagctgctgaaagttcccagcccgccccatcacagtgaaagcggtcgtctgggtcccccacacctaagggtatgaaggcaacaagagtgaagggcaccgtggcctagcatcgcctcactttcttctcgcgggtttttctctcttctctccgccgttcgaactcctcaaaggagattttcccttccaagtagtcgatgagttccggactgaaccctgacatgtttacagggtctgtctgtgcaaccccaggaaccgggacagagaaccggaagagcagcgccttccagaagctacctcgccggggccagcaagagcaaggaaccggcgtccttctgggaaactcgcccggtctgcgccgcagctgcagcactcaggttccgcgtgcgcgccagaccgggacgtataaatgggaggcgcgacccatgctgactccctaggccgcgtctttcagccctcgttgaaggttattagatagctcaaaaaaaaaagtgctttaaatatattttctttaacctaggtaatttccctcaattcttcactaagtgttagtttcattctcccaatccattttttttttttttggaaggagtctcgctttgtcgcccaggctggagtgcagtggcgcgatctcggctcactgcaaccttcgtctcccgggttcaagcgattttcctgcctcagcttcccgagaagctgggactacaggcgcccgccaccacgcccggctaattttttgtatttttagtagagacggggtttcaccatgttagccaggatggtccctatctcctgacctcgtgatcctcccgcctcggcctcccaaagtgctgggattacaggcgtgagccaccgcgcccggcctctcccaatccattttcttttctgaaggttctttaaattaatttggtcgctgctgtgt

SEQ ID NO: 38695 - DNA, 1428 bp, Homo sapiens
gaagagcttgtgcccaggatttggggctggggaggaggcggagggacagcggagtaactacgaggacgaccacgaggatgctctcgggaaatcgtctaacaaacaccccaccgtgaagaagggacacaaaggggaggtgaggggggcagaagggggatgcagagtctccccgggcggagaaaacagaggcgaggacgggacagggggcccgagaggcgcagagagccaaggcaggacgaacccacagaaggaaaaaggcaccaggggccagagtcttggagcgcccggctgaggagagggcagaaccttacctgatactccgggtactcaaacatgtagctcatactgcacttattctcctcgaagccgaagaagacatcccacagccccagggttgccagaaagaccatgaagacataaaacgccaggttccagagattaactgagtgaagaaacatggtgccgccaccaccgccgccgccgccgccgccccctctacctccttctccgccgcggggccccaagcccggactgagcgtgctagacactgtccgaccgccacccccggagccgagccccagccgcgcgcgcctgcgctgatgcccggcctgcccgttcgccagccgcgcagtgcgcctgcgcgcaccaggtccgcggcgcctctggcctggcgactcccagagccgagggaggagtaggtgttgcagcgcgagcgcggatctacgggaaagagaaagagggagaaagcagggtgggctgggctggagggtgaggggaaagaagggaagtggggagagaaagacgcgaggagtggctggcgggagggaaagaagagagagagaggaagcatccagagggggatgggcggagcgcgggagccctggagacgagccgggggattgggcaggaggcgggtgtcagatgggtgaatctggggaggggactagagcccagagtccagaggcgattaaggaccgagagcggaccgagagaggggaggaggacttaaaagcccaggggtcatcagctgtcacctcgcaaacgcctctccctgcggcagtttaaaaacgcttcccgttcaattttgaaaagactcaggcctccgcaatttcggttttcccaacggtagtagagcacactcacagctctctggagcagttagcttgaagagggaacaaatggctttattttccctcttctaccgcctacttgggcccagtaggtaacagcgcttaaaagcaccggctcattaaaaaaaaaaaaaaaaaaaaaaaaaaaaacacccgcaagccgacgagattctgctcttggtatcagatgaaagcctgaatcacaaaaagcatcgttagtccttaaaatatgttaccaaaatatctattagcactgacgtccccaacaggtatctgcgtaatcagtttgacgctgact

SEQ ID NO: 38696 - DNA, 2827 bp, Homo sapiens
taagtgcatttctatcttacaattactccacaaaccttgccattttcatttgaaaatttttaaaacttgcttggaatgcaaatgaaatctctttaccgtttgtcatttgaaggttgcaagttaaatattggagattgatcattgacaaccagtgaggaaaataaacatttgccagtttagaagtatgcagagcatgtcagaaaggataattaattagtatcctctaagcattcatctgaaattagtttttcattgcacaaacaagaatgatcagcttattaagttgccttggaaggattgtgagccaaagggtcaaaaatctcacattgactcatcctaacctacaacttgactcttccttttcaaactctatttatttttaaagcttctgtgaagaaaacatcatttttgaacttgtgtaacctgctggacggcatctgaggggggtgcctagggccaatggtgaggtcaaatgccttcagacaccagatgctgtctttggtcagttgctttccctctattgctgtgacaacacagcttcagacaacaaacaatgtgattggatagcagaggtagtctttgcttactaactaaaaaagagtggggttttttttttcattattgtcttactaaagctggatgattctggaaaaacaaagttatgaaaactagtaatcctgactggagagcagtcagagaagcagagaaaactattcaaagtccaaacaccaatgcaatttaacaaaacaaataaatacaaagaacattcctcagtagcatgtttagttgcttcagggagccaaatgctgtgcccatgtggtcctggaggacagaggggctcctgctaggtgatgtcccactctggggggactgacaccaggccctaggggcatgagcttctggagagggagtgtcccagcaacagcccaagattcttcccagaaggaagccaacaaacaggaggtaaaaaaagaacttccttttcttctccccaagggcattttaaaaaatgtcaaatggaagaattcacagttctcacatgtgttatgaatgcaaaaaaattgtcagttgagataagagaataccaaagcatccttttacagggaaaactctatttcaaatataagtgactctcagagtaaacagaattcaattttaaaaggaatttttttaaaacaccattggtttctggaggtcatgtttataagcgtggtggttgagagttcagtctctgatgtcagacttcctgtgttcagatccctattcctcaacatactggccatttatccagacacaagtgacaacctctctgcctcagcttcctcatctttgaaatggagataatcatagtacctttttctcatagggtggttgaaaggctttataagtggtgtttagccaagtgcctggcacactatgaacacttggctttatcattatcacttagctttatcattatatataataggctacatattatagccactatatccttatcaattcaggcccctggaccccacccaatccataagcaagatgccaggacaaccaagaatgagagaggttctgaaacaaagatcccctgaccacagaggataagagacagggtctcttttaggtctcccccaactcaaaagtctagcaacagcagggcacggtggctcacacctgttagcccagcattttgggaggccaaggtggacagatcatttgaggccaggagttgagaccagcctggtcaacacatggcaaaaccccatctctagtaaaaatacaaaaattagctgggcatggtggcacacctgtagtcccagctacttgggaggctgaggcacaagaatcgcttgaacccgagaggcagatgttgcagtgagctgagatcaccccatttcactccagcctgagcaacagagtgagaaagtgtcttaaaaaacaacaacaacaacaacaacaacaacaacaaaaacacaaataaacaaaaaaagtctagcaagaatatccaggcaggacatggaattcttccagcccacatggctcttgcagaggccaaagctgccagcagtcccctgggactgttgtaagcatgccagcaggacagagaggagatgcgtcatagagatgaccagcatggcctgacgcacagggatgaacctgcggggaaggcagtgcttagaaggagaaaagttgttttccctccaaccttgtctctggagcttgaagttgctctaaaagggaaccaagctgtttaagttttgtttgtttctaaaagttttgtttgtttttaaaggggggtggacattatttctgaaaaacagttgagaaatacagtggcataagagacgtgctcgaaagagactagggtcactccccccgaccccctttatttacattcagcaaaataaaacacggtggccttttcaataaaatgaatgtcaaaggcatagcacatatttcaaattagaaataatgggtattgcacggttaatttctgttttaccttccttggctcactggaaacttgttaggatttcttttccctatagcttcactggaatgcatataaatttcctttgctttgctgcagatattttgcttgctaagcataattccactggctggtcttccatccaaatgtcaaatgacttctttgttttatgtcttaagtgactaagacataactcagtgccactaataattcaagtgtatgtggtccgaaattcttatagatgagaaaaatacaggtccaaggaaactgactaatatcagaattttgagaagtagaagtatgggtcaactaaaaataggaactgccagattgacctggaat

SEQ ID NO: 38697 - DNA, 3658 bp, Homo sapiens
tcttaggttattttgtttcctaaatgaaacctttgacaaatgtgtactgagtaaggatgtagaaaataaatctagaaaattaagtacaagtgggaaggtaaatggtttatgcctaacctttgaatacactgcaacatggcagcactggattgacatagaacccttgggatcttaccactgtgcccagacattcccaagtgacagaagcccttttaaagggtctctgctggggaaagttgataaagtaccaactatttgtaaggccctgatatcacttggccaggaatatttcttgagagccagtggaaacagaacatgggaaagggttctggtccttaagtcccacagaatgaaaaactggccaagacgctgtgctttggtgccagcgaaacaggaatatacaaccacccactgccaagataatcatcaggagcttctgatgaaaaccgaagcaggtcttcggagtaccaccttccccgacagcctaaaagctaataaagttcacaattgttctatgcatgaccccaagcatattaagaaggagtgtctttaaacttaacgcatttgttgaaaagttttccattccgttcttgaacacatggtgggaatgttttactgctaagtgtatttaaggaaacccacagattggaactgctctaaccagtgaggcgagaagtctagtttcagttacggccccaccacaggctcactgtctcttttaattaattcattaaccaatttattaaacaaacatagattaatgagaggcagataactaaaagaataacataatcatctgggaaactatctcctattgatgaaagggtaaaaagaaggcagctgctagtttttcaccactgtaaggggctagcaatggtgaaagtttgtcatcagataaatgaacacacagtgtcaggatcaaaatcacaggagaggaagctagaattacaaaatatttaaacttaacctggaagggcatcagagacatccggagagtttaatcgattggctgaaggtcacacagctcttgatggcaatggtggaatctttcattcatacaatagacaaaaacatttactggggatccaccatacgccaagcaccgtgctcagacctgaagatgcagcagccttcaagggacagggtccctgcctttatgacgcctgaaagaatcttgctttcttgactccaggcaggggacattctattacagtagactaatgctagattaaacacacccatcagcaaagagcaaacaaacacacacacacacacacacacatacacacacatacacacggtattagaaaaagttaaacagaaagaaactgtgcaatgaaaggagatgctcaaaggcatctgctctggatataacaataactcctagctatggggttcccccttcttcctttccactccctggaattaaaagcaaaagcttatatatagaacagtttctgtggtccacagaaaaccattttaacagaaatgattagtagttctttccaagtttttttcaacctccaggtggatattttagaaacagagcttatgtgtaatactcacaataaaaatcaacaatgcagttttctggccgaagatatcagatcagcacaagacactaagatgttaacactaattatctctgggtgaataattttatgggcattcctcactttctactttgtttgactgtgtttcaagacttgcagtttacaaacaagaaaataaaattcctcttgtaaataataaaagactttcctattaaaaaaatacaggtctgctctagcaaaagcttttcttaagtaatcacaaatagtaaagcactggacattatttcctgtccaaagacttcaataccttgtagtaggttctgaataattgatatgtgagtgtgtttctttgaaaacgacaaaacattacatttatgattaaacatggcaaaattgtaatttgtctaatgattcataaagttgccaagtactgttctatacagtgcatcagctgattcttaagaaaatccagacagactgatcaagtatgtattattgtcctcattttacaggacaggaattaaggttgactcagagttaagtgactcacccaaagtcacacaccaatatttggtgaccctggatttcctgactccacatccgctgctctctcaacaccactaggtaaggcattaactaaccattaagaattcctctctaagaaagaacctgcttcatcctcctcacagcattttggaggcctttggttctacccaaatcttcctttcttatctaatctttcttatcaggtggcctatatgatagacacacacacacacatacacacatgcacacgcacacacatacgcatgcactttcattataaaaaaacaaactctggagtcagaatgacccaactttgaatccctcctctgccacgtatgagctgtgtgactttgagtaaataaatcaacctgattactcatttttctttttcattctaaaatgaaaaataggattacctacatgcaggcacagattagatgtccaataaatattagctcctcttactactattatcaatgacatctctgtggcttatcccaatttttttagttctccttgatgactatagaggaaaataaggagatgcagacagatcctggggggaacaagtttactggcaagaagttatatttgtttacaagtagaagcatttactctgcccacagccagccaatagcagtgcttgcctgcctcctctcccctccatgaagtagtcaaccattgcatcttgtatcctggccattgtagcctgtcctatcccaacccaaaggtaactgaagcctctctcatactctagagtcgggccttccattctttatccttaatctcataggacctgcagcagtctcttcccctggtagaatcccctaaaacacctatatatcagcgactctcactccctgctcagaatatatccctgctgccctgaaggcctcctttcccatccagtctcaatatctgagcagagtcagatctggttaaaactggacagatgggagcttccctgggggtttggatgttgtaccctttctctcctcacccaaagctgaaaaccttcaaataagtcaaccccaagccagaacatcctcaccaaatctttctgacacttgtcaggaaaattctgcaggccaagactcctatgttatcaatagaagccccttcttagtaacttaattagaagtaaatccaccacagactcattacaggtcctcaggcagataaccagggggtcgctttctgtatcaacaaaaaaaaggaagtattcttctatgccctttctaaattgagccagtgggacagaaaaccgaacacactacaaagattcctaatggagtattctgcttagtgaggctagacctcaaaatggcaggcttcgaagccccttcattacagattgacacgagtgctcccagaattgggagatggctacgtaacagcacttttcgaagataaggcatatgggagatgcatctctacctccagggcaatgtcaaataaacctacacatacttgagcacacccagcaaaaaaacggtcactagggatgcatttagccttcataaacttgggctgtagggggtgtttttcccttttaaagg

SEQ ID NO: 38698 - DNA, 2060 bp, Homo sapiens
tttcaagagtttcctagctagtctcacatgtttattcttctagataaagtttagaattattttgtcaagtttccccactcaactcctaccaccaaatcgccctgaatttatacattaatttcaaacaattaccatcttaagtattgtcttctttctacctaataatgtgccttatttattcacaattacatcctctgtccaaatgcgtatctaatatgaagaaagggccatatcctttatgtttacatgctcaaactacttacaaagtacatttttaattcttatatttttctttgtactacaaaaatgtccagtaattgcaaaataatactaatgccatacacttgaaatgtttctccatagctccaaaacatccatctctagtatgtgagggtacaaatcatataccattataagatttgtctctcttttggaggctgggtgtctggcctccatgtccagtgctggagagctcaggcctcaagctgctgagcatcctccataggataattagtgatgatgcaaaccagacctgcctttgcacattttaaatggccgtgaagccacatctttgaagcctgctcagtgctgcctggagttcataaatcattctttacagggtataggtcagggcttccaaactacagccccacatcctgggcaggggtccaacaaggggggcgtggatgagagtggatggggagtgtgacaatattgtcaggcatgtgctgagagatgggcacctaccctcaagacaaaaagcaccattctcagatctgtgaaaaaaccatcagctttcctccacctcccccaccccggcccctaatcagcgagccagaaacagtgtcaacgtttaaagtgcaggccactgctcttcccagaacactggggcccttggcttcgcaaccatggcatttactttccagatgcatgtggccagagaaaccttcatcactgaatatttgctgatctcatccacagttagcaaaacggtgacctgcaggccggatttggcccacggatgtgttttctttggcctgcacattgttaggtcatcttttggaaccgacatttaacaatttagagatttcctgtattttctcttaaaagtctgaaaagcctgggccacactgcacctgcattcctgcagggtgcttgatgagagctgagccattcatcactcgtgatcactgtgcacttctatcatttatgggacctgagtgtgccaccgccattccctgcagcctccttactcccagtggtttctgattcaggtcttgtttagaaggtgcccaagtctctaagccggcaaaacatctcagtccttcatcttcatatcaaattatttattaaaaagaaaaaaaatcaagtaggatatatgtaggtgagaaaaatacataaaaatctagaagtttaaaaagctgggctacatagtttgtatttctaatgtttaagagtcttagacataatataatcaagcagagaaaaacttagagaaaaacttaaagaagatattaaattgatcatcccaagttctttgagtggagccatattgagtccttctgggtggatttttaaaatatactctattttaaaagaaatagtgcaacacttcaacatacacatacacatgcatacatattacaagcttgctattgtaaatgtgccttatttctttgaaaagtcccctcatcatatagtgtctattttttttctcacttggctcttgagattcaataattaatccatctgaattaattcctgtagtcaagaatggcagctgtaataggtttctctcttgtttactatacattccttagcaacataagcttagcttgcacctccagatttattccattgtattcacaaagcatcccattttggaactggagagagtaagcaaaatacaccaatctacttgggtcaaatcctattagagcaaataataagtgttaacagctttacaaaaaaaattttttataaagtagatggattaaaatgatcaacttggggacaattcaactgaaaaaaggatatttttgaaactactgaaaacaaaa

SEQ ID NO: 38699 - DNA, 2220 bp, Homo sapiens
tttctagctatctgccaaatctgcgtcgatttaaatagatttctcagagtgtacaatgatcatcccatatttccaggccctggtatgccattaaccacagaaaccataaaaagactcagtgtgcccctcctgacccttcagtggctcctcaattcaatctacagattttcaatcttacaaggagaatttccagtcttacaaatgatacctgagggaaactaactaagctggatgcttcctctattcaacaatttatcctcattgggagaaatgaactataagctaccaaaaactggctcagcataagcaataaagtagggttgagtcattcagtcaaatgtgctgcaaggactggactaggcgattgagcagatgacagtgaataagatagtgaccatgtcatcaagcatatacagttttccctcagtatatgtgggacattggttccaggacccccacatacactacaatctgcacatattcaagtccctgagttgggcctgcagatcccaaatatatgaaaagtcagccctccctgtatgcaggtttcagatcccacgaatgttgtattttcatcctgcctttggttggaaaaaaatctgcatataagtgacctgccaagttcaaagctgtgttgttcaagggtcagctacagttttaagcagtagtcaacagtgattaatgcagtacaaagagctgtgggagttgagggtagaagtaggtttctttggctgggttgagaaggtggtagagaagagagcagaaaggaagtgagaagtaggacaacttaatggaggaagtagtaggtatggaaggacacatggaattggaagggtggagaagtgagaaaagggtgagagaatagaataaatctcaatgagtcaagtcatgtggttagtggggcacagagtttataaatactattgggggaaataaagtctggaaaaacacagaggccaagctgaataagatggctttctatatcaggatcagttaatgaatgggtgatttacaccagagaacatgtgacccatcaaaaagcgtggagaggtgagggcagggaaaggtgaaaaactcagaacctaggacagaaaagcataattaagtgaataaatgaggggaaagaaagaaaagcaaggggtaagaagacaaatatggccttccaagttagtgagtagtggctcctgcactatttattttccttccttgacatttaaatacatggttatcagccccttttcccctttgaaatgcacctccaggcttagctctccaatccttatgtgtcctccatctgtctatgccttttcttaacaaccacttctcttaaactacctaatccacccccagcaaaaatagtcactatgactcatccccaagggcattggcaaaagaaaaccatgacaagaggacatgctggataagtgtggggtcaaatgatctttgtacacacctgaaggagcagaaagggggagttaaagggagagtctaaagaggggtgagtagaacaaaagggcctgtggatcccaaaaagtggtaacatcaacctaagaactcaggccctccttgtgttctttatccattcattcattcattcattcaaccactcttgtgttcatttctctccctccctccatcccctgcttatctgttgccacacacccaacagcccacaaaggcaaagcaaattcctatatatctctcaagcctcaggttacacatcactttatcaggtcctcatgattaaccttctccctacatagcatcccggattttttctttcaaaactgcatcacagtgtaatttctcatttgttgacttctctgctatgttgtaagctctatcatggaaagggtgccatctcactgctgtgtccctagcactgagcacacagtctcaactcaatacataactatggatgaataagacatctcccagacaaataagtggcatcactagaattctctaagaccaaaaattggtgtggccaagattgctaactactcactaaaatccatgccgtctctttgggggcacacagatacactaattccttactctccctcgtagctaggtatggccatggctaaattctggtccatggaatataagtggaagtgatgtatgctaattccaagctgacccataaaaatccttccatggtggccgggcgcagtagctcacgcctgtaatctcagcactttgggaggccgaggcagg

SEQ ID NO: 38700 - DNA, 1581 bp, Homo sapiens
atcccagctacttgggaggctgagacaggagaatcgcttgacccgggagatggtggttgcagtgagccgagatcacgccactgcactccagcctgggcagctgagcgagactccatctcaaaaaaaaaaaaaaaaaaaaaaatccttccatgcttttcctccatgctctttttccctttggggtggcaggactgcacacaacccctgtggtgatcttagaggccacatgttgctacctgggatcctgtttggaaaaggaccacccctctaatatgttcataaagagacctaaacttcatacatcatacatccatcatacatttaggggtctatgtgtaacagtagttaacctatctaattcagtgataagttacaactgaagttaggctcccctaacctttaccagctagcaactgttttgtcactttcccaaaaagaaatgaaggccattcaggggccagtacaaacttttttggtatgtatgacagaacaaaagttccatttgctcatgatcattaggaaaatatagtaaccatggcttgggcttccctgggcttgggccacagccacaaaacaggctgggtggattcccgtgatgtcagaacactggaaagggagcttgctggcctggccttggctcagaagcacaggtcgcaacccgcaggccctggacaaatgcccaactgccttctggagtagcctgtccctggcctcatctgtgcttaccttgcaaaaatgtcacaaaccattgtcctgttgtgcttagtgccagctggggagaagctgccaaaagcttttgcaaaagccacaccaacctgcactgccatggaacaatggctacaccaaatgactcgccttctgaataaagcattcagccgaccagacagacgtaatccacctccctgtggcaaagctcctcttacactgaagatgtagttgacaacttctgtttctacttaacactagagactttaaagagaactcctctccctggtggacttcagtatttcacaattgaattacattaagagaattagtagcatgtactgtacataattgcttgttcaactcaaatctaggaaactactaaaagggtaaatcattgactaaatcattttacctttctttattgaaggtttgtttttttgtgtcaggaccttccagatacagtgattcttaatcttttgggagtcagatacctttttaagaacttgatgaaatagtttgattcatttcacacaaaatatgtatatagtgcacatatctactgcctgtgacttcagagggcacacaggatgcctagttcacccactgatcccagacccagagtcatgaaccttttagggcaagggtcagcaaactttccctaaaaaaacagatagtaaatatctttggctttgtgagccacttatagtctgtttcacaactacccaattctgctgttgcagtgcaaaagtagccacagataatacataaatgaatgagtatggccgtgttccaacaaaactgtatttatgaacaccaaatttgaatttcaggtcattttcatgtgtcacaaaatattattcttctcttgatttt

SEQ ID NO: 38701 - DNA, 767 bp, Homo sapiens
ggcatgagcaggcagagcatgcaggattttcagggcagtgaaactactccgtatggccctataatggtggatacatgtcattatacatttgtcaaaacccacagaacgtacaacaccaagagtgaaccctgtcaactatggactttgggtgatgatgtgtcaatgcaggttcatcgatggtaacaaatgtaccactctagtggggatggtgacagtgggagaggctggttgtggggacaggggtatatggaactctctgtactttctgctcaattttgctgtgaacataaaattgccctaaaaattaaagtctattttttaaaaaagtataccttctagatgttctaaataatatcatgtatcctccaactgattaaaaaaaatgggtaaaagtatgaaggaagagattaattctcctgcagccagaaaagaaaagtgtaagaaaaagctgctgcactgtaggagctgccttgtgacgtcacagaatacttggcagagaggacgtgtgtttctgtttgttctagagatgagcaagagaggaacaagcaacactagtcatcagactagtattctctccaaagaaccgtttttaatgctgttgaacactacacagaaaagccaaacaaatccattcaacacacagacaaccacacatcattgtgaagtttatatctagatcttttaccctgttttttgtaaagtaactgctgagatataatacctattttctatttaggagatctggggacttcttagctaattcagga

SEQ ID NO: 38702 - DNA, 585 bp, Homo sapiens
aggattaagacatgattcactgcaaaggcccagtatacaataagagcacaataaatgtgtgacattattaggtctctgccatgaaacaccagcctcaagtgcactctcaaaaccatgtgattgggtcctgaaacaaccagaaaaggttctaaataaagcctttcttttcccttcttctatgctgaagacaggactacagcatactgtttgctttaacaccagtgctctagggagccatggaagaacaagggcagcccagtaaaatatgtaacacgtcccaaggccccacactatgggctagaaatcctgctcccaaagttacacaggatttctagtctcttgccactgccaccgctgccagccactgcctttggcaagaaggtaggtgactcaagtgtgaactaggacttggcaagggaacaccaaaccagaaggcctccaggcaggaagctccaaaaaggccacctgctgaaacagtttgtctgcaggcagcctccgagatgaaagtagtgttctgccatcattaacaaatgcaggtaagaatagtggacactttaaacatgcaacagaacttaccatcctagc

SEQ ID NO: 38703 - DNA, 2007 bp, Homo sapiens
aacaaagttcctttcactacccacgaataaacgggggtgggggtagcaagccgtttccttttttcgtggaaagagctgcaaagagttttgtcatgcaacttggtttggtgcctgttagtgtcaatgtaagagcagcagagtccgcgaaggtggctgttaccattccacagacctgcggcgaggactgtcaatccgattcagcaaataaccccacctctccaagccaggactccagagctgccctgtgtggtgtctcagcaaggaaagccaacaaagctggtagacacaggcagaccgtagcccaccgcctgtgagtggaggctccgagccgacttcacctcctcctcagagggaccggcccgatccgaaagggcggtctccaggggtccccatcccgcaccacgcacacagcctggcgcaactaaagaggaagtcggatgtcacatccaacggataaataaagacagcccggccacacaagagccgcattctgggcaggactcctgctaggtttggggaggggtcccagtctgcgatcctttctccctcttcgtgcagcgtcctcctccccggggcccgggccggcggcgcccacgcaacgcggcgcggtgcgagtcccgagagcacctcgagcccccggccccctccccagccccgccgggcccgcggccgccgcactcccgcacgccggctgcccagcgcccacgggccctgccccagactcgggcgcgcagttccgacggcccagggcggggacggcgcggcggaggggagctgccgccgcgggctctcggaggcaccggcggccgcacacagtcctccccttcgccgcgagtaaacagctcgcgggcgcgctccagccgcgcccccatccccccgccgggctccgcgccgccccgcgcccgcgcgtcccgcccgccggcgccgccgcccgctacctggtcggtgagtttgagcactgccattcttccgctccttcgcgcgcacacacatgcaggtccccggcccgcagatgtcacgccgggagccggggaagcggaagggattgccaggagaagggaaaaaatctggctcccgaatttgacagccctccccctgctcctcctccgccgccgcctcctcccgccgagaggctgacactggctagtggggtttgcagccgagcccgcccgcctttccacaggaagtaccggctgctgccagccgggccgccactgacatcaccgcgcgctggctcgctcgccgcccgccgcctgggccgacgctgcctcctgccgcccgcagccgagccgcgcagcccggcccccggcgctgcccccgcgcccgcaccgggccgccgcctgccttccgcacctgcacgcggcgcccggccgggccggccccgggccctgggcggatcgcgggcctccctgacgggtctcacacatatgggtggggaagcccgcggggacacaccccgagggggcaggaaaggctctcactcacatgccgtccactttaaccggggagatggggttacgcccccttcccctaacccagaatcaggtggtggcagcgccccgaagatcccagggaccgcaattatgatgctccctttgtttaatgccaggaggcagcggacacattgtgattctttacagggtgtttgccaaacatttatgggtggagggaacagaagctctggcccttccaccttgttctccagccactttccagctaaacacacacacacatatgcacacacacatactattgttaaattcaaacaccctgggtttggtttttgctggtgggggtggagtggagttcctggagaagcaaagcagtcctaaatcaccgagttgatgggtcttttgggtgttcccaccagtccttactgatctctacaaaatcccaagttaccaagctcttcaacaaatagaagacagctgtcaaacaccatgggctacagatacaacgggcatattcgtaagcatagtagctgttgatagttctggaatttggagc

SEQ ID NO: 38704 - DNA, 2520 bp, Homo sapiens
tatcagactgtaaaattttggatggcctcagtctcttacctctcacagactaataccgagccaaatacccagaaagaacatatgaaacaaaagtgacttagaagtctcgttctcagtgaaaatctcggattccaagtcagaaatcaaagaatgcagttccaacttctcatgcctcgtcttttctgaaaagtgatcccattttctgtcatctctggatacttcctaatgaactccagtctattcccaacgttttcctaatttgcacactctgtattccataaaacgatcaactagcttgaaagcttcggccattaatgaaagtaatttatgttttcctcttccatctgctcctccaataaccagtctccaaagaaaaagatcaatattatactaaaagtgactaagggagggaaaacaactaccagattttatccccaaatcgtttcgtgcaagaaaaataaacaagtaactgacgcttgaagacacacaagggtaggagtaacggaatctcggtttaaccaaattcgattcagtctgccggaaaagcggctgccgtatttcagtgcttttctgaccctcttctgcacaaactatggggacgacagtgtcgagaggcgagtgagaccttctccccacgcccgcttccccgatcccttgcccacgaatcctactgaggaagccgcttaaacgaggccctctggtcagagaagagaagctactctgaagtagcaggtcccaaacactgaacaaagcgcctgtcgggggtgtaagaggaggacgccattacgcggggcagtggcctgcgccgctggcgcggaggagacgacccttggccccgaaacgcgggctcagctcctacgaaagaaaccatagaaaaaggcagaatcctaggaaaaaaggcttttattaggctagcaacgaagaaaacacgtaagcagggaaagaccgcttaccttcgtgagtcttggcgatcttcgccattttgtccactcgaacacacagacggaactggcgctcccaagaacttccgctcgtcgccgccgccacggagaaaaatagctgggggctgcactctgcgcgtgcgccaaacgggagcgcgctccgtcgggtgacacgtgacagaactgccacctagagggaaccgcgaggtgcattgtgggtgggggaggagacacggttgggccctgaagtcgcctgcgtggtgacccaggaaatccccgagccgagccgtaaggtccttaagtgagtaactttgccctggaggaaagtggattctacgaagggagttaagaacagacactgagtcccagcaactctggaggctgaggcgggagcatcgcttgagcccaggagttcgaggcagccgtgagccgtaatcgtgtcgcgccactgtactcaagcctccagaccgggcgacagagcaagaccccgagacccctcccattaaaaaaaaatgaacactgtacgaaacgctgcggtttcagagctggaagagacctcagacattcaatcccttttcccaaaattcactggaagagctcgaggaaaactttcccttgcagctgtctcagtctttacagtgcttagttacgaagacagtcttaacagtcccatctttcgccctgtaattcaaggtcatttttcattctttctgtttaataattgcaaataatttgggtaggaatttcgttgagcctcacaaatcgttgctgagttgcacagtgacaatcttgccacccttttaaagccttttactttatgggttcctagaaaaccactcatcgtcattattaacattcattagatgtttctcttaaatcctagacggtattcctaaatcaggaattttaatagatcagaatacggcagtctgttttcctgggcatcaattataatataaccttgtactgtcacactggtctttgacttcgacgatgaaaaagaaagaaaggctcagaaagatgggtcccggaagcagccgaggaaaacaggtagttatcaaggttagagccatcacaaagagaggagtacctcgctatgtgataaacctgcaacccaaatactaaccataccatgggtcagtatggtcgtttgaagggagggaaatggtatgggtgtattcctcttgcaggaagaccccatatctactttgggtaaagtgaggagccattttcctgaggctagcggtaggtgggagatatatggacaatggcactggactgagagcttagataacctgtccctggtgactcctgacctgcagccttgctccctctttccctctcaccagactccctcccttcttcagatcaggtgacacaaacgattttttttctgtttttttgacacacagtcttggtttgttgcccaagctggagggcagtggtgcgatcacagctgaccctaacttcgaccttaaggttcaagagactctcctgcctcagtctccagagtagctagtaccaccaacatgggccaccatacccagctaatttttattttttgtagaatgagatctta

SEQ ID NO: 38705 - DNA, 2504 bp, Homo sapiens
taccatattcctccctcttcatctccttaccctgctgtactgtttagtctatgggacatataacaagctgccattgcactatatactaattggtttctttcccccactaggatataagctctgtgacagtgaagacttttgctcacttctccagcatctagtaggtgccacacaaatatctgactacatttaatcaacaatctcatttacacccaaactatattaaataggtagtattgtcatcctcactttacagtttgcaggaaaactattggtgcacaaaccttaagtaaagacctgaaaacaaactgagggaacaagaagtctggacttgatgactgatcaccaaaacaagtaaatcaaagcgaagtcgtctgattagtatggaataagggaaacccaaatcatacgagaacaccaattaaaatgtgggacacgcaggaagaaggcagacggaactgctgctggataactgagtctttcctaatgacaggaccttatgttgccctcacaattaccccgtgagataggcaaggcaggcattgtattagacaatcattaacaagcaggacgctgacagccaggcttcgcagccaggagtggtggcctgtctggctccgcactcacgggttcggacagttacagaattaacactcaagccctggggcttcccgcagcccccgggggggtggggctcactgactagcctcccggaagcggaccccaggagaaccaggcagttggttaatccaggaacagctcctgcgcggggcgtggactgagcagtcactgagtattacgcaaattgcgcgagcgcacgggaaaagcgattggtcggtcaggagagagaggtgtgtcctggcgggcccgcagctccgattggccgacaggctgacgggaacgtttacggtcagcgtgtgtcagcgacgtgcaacccggaagggaagaaggggcgtgtcaggctgcgcaggcggccagtccattggctggaagagaccggagccgggctccgggcccgaccagaggagggcggtgctgcagggctggtccgggaggtgacgaccggcttcggagagtctatcatggcagctcggactggtcatacggccttgagaagggtagtctcgggatgccgtccgaagtcggcgacagcggccggggcgcaggcgcccgtgcggaatggcaggtaatcaacagcgggggcgctgagacgagagtagttttcgattttggctgccgagttgggggaccggaaggatttgggggtgaggcagagccggactcggtgcatttccgtgtctttagaggagaaggcttttttttgcgtttggcatctgagggactcaagagcggcgcgcatcaccttgggcccaaggctgtgttcgtggctcgtttgcctcgtgagaggcggtgaatcatcggcgaagcgactttggaagcaatttggccattggtgcctttgggctcttccggtctcctcccctatggcttgttgctactgctgttggaaagttttaactttgcgcagaagggttgccggctgctggctgtatgggagtttgtgtttggcggtgagcccccttctccggttccttctacctgccagatggtcagatgcgttttcccaatttctgaaagagtgctttgccctcgccatttagtgtttacaaaactaaatacagccagcataagggacttggattttttcactctgctgtaacttacaggtcctgtaaccttgaagcatagtcagctttcgattttcctggttggttcattttttggtaggtgggggtggagatggaggtcgggacacggataccatacttgtacgacttagtttccttttactaataacattgtaatattcttgaaaattaaagttagtgtgtttaaaatgaattcaggtgtacaaaatacgaggtggggagagaaaacacaaatctagttgagccccaggacatttagattaaatgaagatccgaccctactggaaacaaggaaataatttttttaaaaaaagattcaatgaagaatttttaaaaacaccaacaaccttaccaaatccaaatccctttagacaaatgttggatgagacaaacaaaatcataaaattactcctgctttaggaaataacctcaaaaagtagtttcaagcagaataacgccatcatacttgagatctgtttgtattactcttataaaatgttgtcttgcaaataacacttacttttgagaaaaatacagttgctttaatgatcaaattgaggcttcagttccaagataaatactgtttatgataatgagggcggcagtttgcgttcatttccaatgttaagcatcagattctgacctttattatacttaagtatatgagagagtggtactggaagacgagtgacaaaaaagctgttctccatgtggtccagttgtccagtattcatttcatggtttaactgtatatatgaatgtgtgtatcttcatatcgtagtttaagacatagta

SEQ ID NO: 38706 - DNA, 3003 bp, Homo sapiens
gttgaatagttcagtgcgactatttgtgagtaaaatgctattaataataccgtaattacaataaaataaaaatactggtacctttggccccattgtaacggccacagcatcggctaaaaggtctacaccttgaagcattaaggctcgggcatctgcaccaaattttacatctttggcataagcccgagtgagatgaggagccagtaccctggacaccggtctcatctggcgaaagactgtgggtaaccgaagcatttctggggatggaagcaaaaagatcatcagaactaccacccgtggtgcgctgcagaacaaacatgcccacctgtgcaacagagcaagcaacgtgagatgctgagcctggctgacctccgccagccactacgcctgaatgacggaaggcgccgcagcttcggaacatcagccactagcgcaagctaaagaggccgccccggccggcgcctgacctatagcaccagcacaaagcacatgcggctccttccccacggccacctatccctgccgccaaaaacgagttaatctttcaccgcgaaaacggccttgtgggcagacccactccaactgtggcccctgagaaaccaagtcagccggagagaggcaagttacaaatccaagtgaccagggaagttaaaagtattcctgacggtgcaaaaagccgctcagcaaagtgtctccatggatccacccaaggctactgtatcagagcaaccagcaaggccgcgatgctgggggcggcggcccggcccactcggcgcgagcccacgtgtccttctttccgaacgcccccagcaaggtcaagactggaggcgcggtatcccagctgcctgcgggggaaaaaagcggttccctcacgtacaccaccctccccggttccctgaagtcggccaggcgcaggttgcaccagcgggcctaagtggttacaatcccccaaattcaaaccccacgagttgtccctcccgcgcccagccgaggtccaggatccgcgtcgcacgtgatggaacccgcatggacccgcgaggcctggacccgcaggcctgggcctgcggtgcggcgcggtgcggaactccaggttgtcgccgcccgcaccctccagctggaccgcagaggaggaaggcccactcgggggtcgcaggagccggggggaggtggtgcgggaaggccgcgtacctgcggggcggcggcaaggcgtgcgctcggcgagacaggtcgtcggcggcgagtgagggacagagtgcagggcgcacaccgcaatgagcccgtgtcccctccctccgcctctactcccgccccgcggcaccgcgtgtgcaggcagctcccacccacttcccgtcagcccgggccctgcaatctgcacaccctgcgcgcgagccccgcccctccctacccgcgcagggtgtgctagcgcgctcagccctctccggccggcttagtctagttcccgggcctcgctcggttccagaactttccagaaaatgccgcgctccctacggctcaagggtcaaatcgcgtcatttccgggaggggacgaaggggtagttctttcacctcggctgggcgcctagaaaagcctagaaacagctccttttttcttccgcctccgagtcttcgcgtcagcgtcctgcgcagggcccttggggcgaatcgcggtgcgcgtcggggcgaccgccctccctccctgggaggggcgagggggctagcggcgaccgctggggcgagcgcgcctgcgcgctgggtgattttttcacgtgtcgccagggccggactgcgagtctctttgcggcgctacactagagcagagtacgagtctgaggcggagggagtaatggtgagtcccgcgtggccccgaggcctgcaggcccgggcctgtctgaggcgtacggggatccctgacgcccctcttttgttgggctgggcgggagggattggtggccactcagtgaccagcgcccgatggcaccttggagcggcaaggcccgcccgacccttttctcccccagggctctttgcacgcgcgtgtgctgccggtgtgtaaggcaggggggcgagaacccgggcgcacgcgcagcgtctcacctgcttctgcagggcctttgtggatgtgtaatatcttgggtaaaaatcatggtgccaggcagggagcttgacccagcgtttcctgaaaatttctggaaaaacctgaagaaggaaaacatttgaccttggaataaactaaggttgaccttaaagctggtctggttgctcaccggaggagcgacaacgacccctaacagacgtaaggaatcgggaattaaacttggaatattggttagtacattcaaatgcgcttccttaacgaataagctgaggtttggtgttaactttcaaagccaaaacgtgttgagatgtatagcacggtggcgttgcctgttgataatgtgattacatttagtttttgtttcaaaacatttctcttcctacaggcaggacaagcgtttagaaagtttcttccactctttgaccgagtattggttgaaaggagtgctgctgaaactgtaaccaaaggaggcattatgcttccagaaaaatctcaaggaaaagtattgcaagcaacagtagtcgctgttggatcgggttctaaaggaaaggtaaatgggagctgcagtggaactattttttatagtgtgcagtggagggaaaagaagtaattctggagtattaaaagtcgcttattaagtagagtttatgtcgttttcaagatcattaactgctttggttctaatctgtttcttaaagggaaatgactaatataaagttgcttattttatatgaccaatgctatgatgcttattttatgtgatagtttcagagtattaaaaattgtcctcaataggccgggtgcggtggctctcgcctgtaatctcagcactttgggaggccgaggtgtgcggatcacaaggtcaggagttcaagaccagcctgaccaacatggtgaaaccccgtctc

SEQ ID NO: 38707 - DNA, 1971 bp, Homo sapiens
gagagaaccaacttcctgttgttaaacccttcaatgcctagttctaagtcactgacaattactcagctagagacccactcaacctctcctctcctctcaaattccatttctggaagctgttacatggcccttccctcagcattctcaatacaccttctatctagggacacttgatgttttcttcttttggaaatcatgctactgtatgcgttttttactttttgaactgtcttcccatctgctatcccaaggcctccctcaccccagataaaagattcaaggtttctaagcaggaaaaaaagtttgcgaaaatgctgtggtttcttaagagagaacacttaaaatttgcaacaaaggaaatgtggaatcctgtaagatgtaaaaccctcaccacctgtcaaggactactaatttcctcctcctgcttctgacttgaaaaacacgagctaaatctgtctgcctaacgcacaaaaccagatgtccactcttcatctcacataattgacatctgcgtcttttatctacgtaaacaaacttgtcattgaaaaagtccttggctttgaagtcgccggatggcgtaaataacactgacactcaaatcccccgtctgatttcagattgggtcgatttcacgcaggttctatagaatttgccaagactgctggcctgttttctaccctgattccttaggtggcttctgggacagaattacggttctctaagtatttgcttgcaggtgggtttactgaaacggtcgccactatacgaagttcgttcttcccgtgtaactaacgagagcccataccaacgtgcaacgcagccgtgcacactgccgcagcggtcgctgcgatcacgacctttcaaaccgccccgcagccctcgcaaagaggctcgtggcgcccgccttccggtgcctcagtccctgccagtagccacccgacgccgtccggctgttcctcgttcgccctctccctccgcctagcccgcttctacccggacggctcccggcgcaggctgcagctgttccgtcagctgccgctcctcctcccagacgcagagcgccgctctgccccgccccccgcgcaggctgccgtccctacatccgggtaccgactccagccgcctagacgctggcactatggtcatggcggaggggacggcagtgctgaggcggaacaggccgggcaccaaggcgcaggtaccatgtctgcacttttcttgtcgggcaactaggtgccgagcagtgctgcgcccggaagctggccgccactgcggggaggttgggccgaggcggcaggcgggcgggctggggcactggtgcccggcctgctcttccggagctgcagcccctcaatttggctgaggcggtggcggccgccgtgaggcctgcggagctccgacccaggggtaggcgtgaggggcgggtggggtctgctggtggtacctgcctgccgaagccctgggctgcgagcctgtcagcagcaacggcttcttctcgccttgcccctgagccccagctgactagcattggaggggcgcgaccagcctggtggagacccccggggtttcctgaaggtcggggccgctgaggtgggagggggtgtaaacacagcctacctcgacccggcgtccagttcctacctggcctgggaagtacctacccgtttcctgccatccagcttgtctagccggatccgggtgccgatattctcctccttgtttccctttgaccacctctccctgccgctttccctggagctgttctctggtccagcaagttttcatcactaagttgtgacttgttagatgtcattccttgctaatatgcgtgaagcatagtcagagaatgaactgattataattttgtcagcttttttgtagggcattatgtgtggtaaattggtgcttgattaggcattgtttcttagggtttggaaaagatgggatgcctcacattaaaaataaataaat

SEQ ID NO: 38708 - DNA, 1346 bp, Homo sapiens
aatcagtacagggttggtgacatgaccctttaaaagcaaagatacataaaaaagatttttttcaaaaaatattttaacacataggggcttgctttgtatatacatgctatagttaaagacaaaatgtggattaattattatatttgggaaatagatatttatttgcactaattagctgtgtgtgtgtatgagagagagagaaaaaaaaagagagagagaggttatttttcagcttaaataagactgtaacttcctgagaactctctctaattgggtaaaatactgattgagatattcagtctccttaccaggaattgtaagaaagtctactttgtacattcatgagaagctgaaatagattattgtgtaataaccgaatggaacatctgtttaaccagatgttttagttgagagaagtgtaaacatgattctaaatgtataaatatgttggttattcttccttgtctgggaggttgtgccaaagtttacatagattagaggaaaggctgggtctggaaaaattcaaaaatattacataaatgcagagaaagtaatacaataaggtcagttggcaatgattttaacaattatttacagggccttcctttgcttcacctcatggctcacatacaagtgacctgagtcactccatcttcctgatcaaactgtccgtcgtctaattcccggaggacgttgtcactgctgctgaacccagagaagctgttgtgctgtgccagccttccctcctttgtccagcattcccgggagggagaaaggcggcactcctcaggcaggtgtctgctctctgcaggttgtgacgaggttgtgtctaatccgatgcttctactagtggctttattcttgtcttcaccttttatgtggcggctggctttcttctgaaacacaagacattggtgaccaggagagttaaaaagatgggtgtttcctgtccctctggtctagcacatgctgcctttctgcctccaggaatgtccttttccccagctcttcaaaatcctgctcatcttcaacgaccagctcagagctacctccacattcccctctccacccaaatacaaatgaactcccttctccctgttttgtaactctttgtaggttcctggcacatcattcttgttgatgggtatgttatgtacacatctcggccctcagtgacatctctaaggaaggaaatttgttgaaatcatactttgggagaacaaagcaaggtataaatactaatatgtttttcttcttagtgttagttcagatctatacagcagaaaaggtgctttgatggccaccttacacccatgtcatgtagacacaggctgcacagaagagtc

SEQ ID NO: 38709 - DNA, 1204 bp, Homo sapiens
gttccagcaattctcctgactcagcctcctgagtagctgggactccaggcatgcgccaccttgccagctaatttttgtgttattagtagagatggggtttcaacatgttggccagctggtcttgaactcctgacctcagcattttgcccacctctgcctcccaaagtgctgggattactggtgtgaggcagtaccactgtgagtcagtggtgtggtgtctggcctttaagagcttatttaatactgataacatggcagatattagagaatatgatcatatcctcctaggcacataaaattgaatatagatttaaagatacatttaaaaatcacagtaatttcccagtttacaaagagctcatttactgaaaattcatttatatgttatttgggaagtagggttgcatttttcctaaatgtaagaggtaaaattataaaattcttagataaattgtagaaatcagatacccaggctgatcttacagaagtttgttaatgattcatctgttgaaatgcagtgcataaaatacccgggtattttctactggtttttacagcaaatatacaaagcaaacaaacagctttattaaaggggattttgtgagctactgtggaatgtaataccatttatgacactgtttgtacaggaagatgcagccccagcgggttgcatagaaaggagtttattggcagctcagaggcagctcatctttttcttggccaagttaccggagttgagcaagtttaagggaaaaagttgtgaaaggaaaataacccttggggccccaaaatcaccaagctaaaaggaaaagtcaagctgagaatggcttagggcaaacctgcctcccattctattcaaatttacccctctgctcactgagataaatggatatctgattgcctcttttggagaagctaatggaaactcaaaataatgcagccacttttctcttatctacccctgctcatttggagttgtcccgcttttagtcccatctttctggatggaaccaaagttcatcttacatatgttgattgatgtctcatgtctccctaaaatgtgtaaaaccaaactgtgctctgacaaccttgggcacatgtcatcaggacttcctgaggctgtgtcatgggaatgtgtccttaaccttggcaaaataaactttctaaattaactgagacctatctcatatattcggggttcaca

SEQ ID NO: 38710 - DNA, 816 bp, Homo sapiens
ctaaggattgcgtcccaaaacattagccctaattcattagcttaatatgcccaggccctgtataggtactttgcgtgtattatcttagtcatagtgataatccactaaagttgatattattgtccaatttttcagataaggaaatttatcttaaaaaggttagatgacttgcccaaatcatacagctaaacaatgatgaagctataattaaaacaagatctgcttagctccaaagcctgggcagctcataaccattcctctagtgtcagagactaaaaacttcgggctctatcctctattttgaccaaggtcaactgtatataacacttttctttatttgtaaagatgacatcattgaccatgattactatcgttgtgtgtactgaagcagctaagaacagcatgtgacttgtcacagggacagtatatttgcacaagaataaaaaggcagagaataaacaagatttaccaacaatccttgttaccaaatgaccttcatcctatatttcctgtgttgcaggcacttggcaggactcaaattacaaaatgcaaaggaacaaaataaacaccaatattgcacaatgctccttggcatacaaaagaagagtagacattgagagttgtagtgagccttgttgcataatggcaattaatgttaaaattacatttttctgctatcttctatacagagttagtagcatcttcctaaatggaaatctgctaaatagtgatgatgctgccctctaatctctttagtatttgatgatcccatccaactttgacagtttaaaatgtctcttctttttaatattccta

SEQ ID NO: 38711 - DNA, 2072 bp, Homo sapiens
ccctaaaaaaaattctaaggttccattactaaaagcaaacttgagaaacactattttaaaagaacttcaagaccattaaaaaaattaactttttgagaaataaatttgaaaattattctttatatgcacagtgacagcatattgcactctactttcctggatctcaataaactttggcaagaacttggcagatcacaaatctacttttgttgattcaacaaaaactgtttaaagacttctcttccattctcagttcttatccttctctcaaaatgctgtaggtaatgatttttcatcttttttctctctccctcccttacagattgatttaggctctgagataaaatttaggtgacattttagatatcgacagggcatgtgcagagcaatactctgtcttgcagtatgccagccacggacggggtttagacaaacggctgaatataaaactcttgcctacaagcagctcagcctagagggggaaacagattcataaatataaaattacaatccaaagcaggaaacacagtatgttatacgaaggcaaagaggttcgtcttctttcatagcctctcctaaacccggcaactctgagctgtttttctggcaagccgccgtccattggcggcctctggcgccgcggctttcggcgtgcggacggcgcaggcgcgggcggggcggggccgggcggggagggcggtgagggccggcgctcggggccgcgtttcattggctttccggccggaagctgcggcgcgacccggctgcgcatgcgcctctcacacgtgctgtcagaacgccgcctcctccgcttgcggccggtctgcaccatgctgcgaacgtccgtcctccgcctgctaggacgcacgggggctagtaggctgtctctcctggaggacttcggcccacgctactacagttcgggctccctcagtgccggcgatgatgcttgtgatgtgcgcgcctacttcactacacccattttctacgtgaacgcggcgccgcacatcgggcacctgtactcggcactactggcggacgccctatgccgccaccgtcgcctccgaggtcccagcacggccgccacgcgattctccactggtaccgacgagcacgggctgaagattcagcaggcagcagctaccgcgggcctggccccgaccgagctgtgcgaccgagtctctgagcagttccagcagcttttccaggaggccggtatctcctgcacagatttcatccgcaccacggaggcccggcaccgggtggctgtgcagcacttctggggggtgcttaagtcccgcggtctgctctacaagggcgtctatgaaggttggtattgcgcttccgacgagtgcttcctgcctgaggccaaggtcacccagcagccgggcccatcgggggattcgtttcctgtatctctcgagagcgggcatccagtctcctggaccaaggaagaaaactacattttcaggctttcccagttccggaagccactccagcggtggctgcggggcaaccctcaggcgatcacccccgaaccatttcatcacgtagttcttcagtggctggacgaggagctgcccgacctgtccgtgtctcgcagaagtagccacttgcactggggcattccggtgcccggggatgattcgcagaccatctatgtatggctggatgccctggtcaactacctcactgtaattggctacccaaatgctgagttcaaatcttggtggccggccacctctcatatcataggtaaggacattctcaaattccatgccatctattggcctgccttcctgttaggggccggcatgagcccgccacagcgcatctgtgtccattcccactggacagtctgtggccaaaagatgtccaagagcttgggcaacgtggtggatcctaggacttgccttaaccgctataccgtggatggcttccgctactttctccttcggcagggcgtccccaactgggactgtgactactatgatgaaaaggtggttaagttgctgaactccgagctggcagatgccttgggaggtctcttgaaccgatgcactgccaaaaga

SEQ ID NO: 38712 - DNA, 1104 bp, Homo sapiens
attgctttgtttggcagaagaaggtttctttctcccctctccttcacccaacctggatttttgttgcatctcaggctcatttcgcaaatctaaacttcctaaaatatacacggagcgcctccgggtttgcacacgcgcgcgcgcgggtacaccctggctcgagtacattagccccgctgggccggctcccagttgcagaacacattccattcttcgcgctcgggcacacccctccgcagtgaggattggtcgggccgagccccctcggcgaggcgaggctcctaagaggcccagacgcctgccaatccccaagggctgtcaaaacaagtctccctccctgtcacaacagagctgagtggaggccgccgccgccgccgcacttcctgggaccgctgcgccgcagtccgcgggcaggtggcgggtgcgcccggccgcagtcgcccggctctggcccctatcgggccgccggcgtccgggctccagaggccgcctggctgggcgcccggtgccttttgtctggcgcagggccggcgtttgcatcacatttcggatacctccctctctttttcgcctctccttctgcctcccgctcacatcgcctccccactcccgccaccgtcccccgccggactgctagcctcctagaccgaagcccgaggacgtctctgcccgagcgatgtcccctctccagaaagttgccgccgccgccgccgccgccgccactgccgccgctgggcggtgaaacaaagtctggcggggccgcctcccggtgcaggagcgcaccggtgcctagcggctggactccgctgccgggcgtcccgctttcccccggggagccctaaacgctccaggccatggccgagggcgcggccggcagggaggatccggcgccgcccgacgcggcggggggcgaagacgacccccgagtgggcccggatgccgccggggactgcgtgacggcggcctctgggggccggatgagggaccgtcgcagcggggtcgcactgccaggcgccgcggggaccccagcggacagcgaggcgggcctcctggaggcagcacgggcgaccccccggcgcagcagcatcatcaaggtaagcaaag

SEQ ID NO: 38713 - DNA, 1753 bp, Homo sapiens
tttaagtatttcttatgtgctatcccattaacaatggatacagtaagaattatccctgttttgctggtgatgatctgtccaaggtccctggctggtgcacactttgctgtcaaacgttcttgttctacctcacagcagcttttgctgattccagcgtaaagttgcttctgtttgttctcaacagttgtccatctcgctgatgacttatgaggtatttattttgccttgcatcttttggaaacttctgaaatagtccttatttgtcagtttgccagtcccttgcctacggagtaaattttaatgaatttacttggggaatttaatgatgcctttatttttaaattttttaatttttcttgagacacagggtctcactctgttgcccaggttggagtgcagtggcacaatcatgactcactgcagccttgacctgggctcaagccatcctcccaccttagcctcccaaagtgctgtattacaggcatgagccaccacgcctggccctaattatgccttcaggagaaataaagcccatgccccagatgaacatggttatttatctgaatacagtataaatgtaaattgggtggttagattttgatgaatggtatttgaactaaatgttagtaatgagaaatagggataggcccagatgatttgtgatatagatgccaattcatattttatgatatctatacaaaacaaggaaataaccaaggtggatgccttattagatcagaattggggaaattaactttaacacgcaatgtgacctttgtactgtaatcaccaatgtactaagctaatctgcatgaagtcatgttttgggaatttgcttatatttattcatctttttggtggaaatagcaatgatggtattaacaattggtatctcaaacaaaactgtacagatatagtcatggcagagaacatgctttatggtttgatttgtaaaaatgttttacataatatttttcagtggaaatctgagttaaaaattaatttttaaaggatacctaagggacctacattttagaactaaaatgctgaaggatcaacaaataaatatgaatacctattaactataaaagcaagagaaaaaacttttctctataataatctacagaaaaaagctcaaatattcaggaagtcaaatgggtatagaaatgtttacttaaaatttgaaaccttataatatatattttaaccaaatagtatttttacaattggtataatttatgtagacaaaggagagattgatttctatcgagtgctcgcttgcatttttgagggattgaattagagatgccgtggggtgaatggctcgcaaattccacgaaaaaaacctatcccaaaatggacacaagagggcgccaaagatgcagtagctgatggagatttaatggacgaatactctggcacttacaaatgaagccatgtttattttattctgggtaatatattatgcacctgcttgttttattttttagactgattcgtgtcaaatgactttccagaaatatgacatgtgtactggatccaggcagaactaatctttcaatgtagaagtagtactattttgtacaaactatattccatgatataatgaagttttactttattgtactcactctaaagagaattaagagaatgtaacaagatggcacatactttttcaagcattttgtctctgtaactcactaggaaacagtttttgattatgggatatttaccacacacacacacacacaca

SEQ ID NO: 38714 - DNA, 1156 bp, Homo sapiens
aattatttttaaaacatcaagtgaggtcttcataaatatagtaaggacaggagaataggatagttcaatcatctagggccactgctgcaactggaagtcaggggcttcaagtcaggatctgatttctctaacaactttttcatacatgtgaaaaactcaaacaaatatgtgtttgatttggataaaaataatcaagatgttgccattaacaatggagacaaggagactacatttttaaagtcatttttttctgtttgcttgaatagataaatatgaaaaatatgtctatatcctagacaaatatataaatttttatttatggcattatgtttttcttatcagatagcaaacaattcagtggctcactgaatcaatgtaatatttcaaagattaaaagtaaagtttgagtctatcatgcagaggcatttgacttatatgagtcaaagccaacaagttttacagctaatagaaaccatttttgattactggaaaaagtggttactttaaacaaagaaggttgctattttcaaaccatggtgacccacacattatgggtttttaagtcagttaaattggccataaccagatttttaaagttttaatatttaaaagttttaacattatggaacacattggaattaaaattattagaataaattacagtcagtactggtaagtgctggttttcaaaactttagtttcagggtatgtgttatcttcacatactttaaatcacaaaatgaaatatacatcttattgtgaaccataataaaattgttgaaatgccattgcactgagccgttgatgaactttgcccgtctcccaaaactaaaagtgaaagtgttagaaggaacttcagacagtgattgtggcttaaaacctttcattgagtgaacaaaactgttccaagtagttttatgagaaagtaaacagaaagaacaagcaatagggaaaagatttcctatttaataaatggtgctgagacaactgcctagccatatgcggatcgacccctttcttacaccatatgaaaaatcaactcaagatggattaaagacttaagtgtaaaaacttaaaaccctagaagaaaacctaggcaatactattcaggacatagggatggacaaagattttgtgacaaaaacaccaaaagcaa

SEQ ID NO: 38715 - DNA, 982 bp, Homo sapiens
ttaatgactattttattccctaaaagcgaacgcacgtgaacttcatccctacaacagacactccgaggcaaggcaaaagagttaaatcactaaaaagctctctaggaaaatctagaaacagttagctggctgtgacataaacctgccaacacctcagcacacagtggcaaaatgcccaaaaaatgccaccctctgggtaaaaccactttcttgttttaactggagatgaagctaccagttgcagatgagaggcgacgggggcattatttggcaacctggaattcacttcctgtaatcctacaccgcgacagcgcctaatcaacctgaaccctgacacccgggccattatcactgggccgcgggctgcgcgcctccctgctccgggctgttacctcccacggccttggccacggcgccgttgggcctcccgcgggctcccatggggctgccgttctgctccagccgggccaccttcactgggggaggccccttgacgtccgggctgccgctccgccggtcggggctgtcccgcagacacgggctctcgctccgccgctccatgctgctccgactcggagacaaagttcccaccggcaggtcgcaataaaacgcacagggacctagggagggggtggggggaggaagggggagggagaaaaaagagggaaaaccgctcatacacgtgatagacgttcaggccagtggcagagcgctgcaccacagccacacaaacttcctcccacgctgcccgaggggcccgagccgggaagccggtcccaaccttacactgggcggcccccaggaagcccagcgcctcggttcggcgactctgcccagtcgcagctccccagaagtcagccctcggggtcgcggccggggttggcacccaggggcgcctagaagtggtccattcattgggacggggttggcataaaccgttcctgggtgctacagcctagcccgtcccggggtcagggttgcg

SEQ ID NO: 38716 - DNA, 4447 bp, Homo sapiens
actgacacccgcaagaagcaagaccccggcaccgtactgcgtgcgcgctgggaatcctcgtgggcgctctggccgcgcgagcagtgtcggcgccacgggtcaaggagacaaggtgggggtggcagggggaggtgaaaggaaggatgcgagatgaagacacggagcaggagggctgagggcgaggcttccgcctgcattccccgacttcgcggtccgagaggccgagagcggcggggaggggacttcgttggccctgggcttccccgaactcccgagcgcggcgcgggagccctcgccctgcgtacttactgctcacggtctgtctgaaacttggctgactggggctctgtccatggagcaaaagtagagaatccagggtggaaagtttctggtgcttggctttgcagtgttctcctagtcttcctctttactccttccccttccctcttccccaggtcctaatgtttaaggtcctgggtcagggtgtcttcttctggtgcggagatggttgttatgatgatgatggggggagggaggagggggaggaggaggagagggaaaggactcctccaaagggacacccgagcgagcgggggaggggacggcggaggaggggggaagagaaggaggctgaaagagccttttcacaccttcgggaaggagacccgttctggagagaaagggctgagaacccggaggcggcggcggcggcggcgagccggggctgctggttcgcagggcggctagctcgcgaggaggcgcggccagagcggtgggaccggtaacaccaagagccgagaagacgcagggacccgggaccgcgcgcgggaggaaacgcggcggccgcccaagctgtcacctccagcctctcccctctcggccgcctctgccagcagccagagccggactcactgacaagccgcagagagagacacactgagagggagatgattattagttgcgttgagtcatcaggcaaagtgagtccttttgggttgtcctcggtttccgatttctccccctccccctttcggtccccagatctagcgccttcaaaataataatttggggtgggggtaggggaagtctctggattatttcgggatgggggtgggggggatggatctaaacccaagccagactggtccaccgcaagaaaagaggggagtggggggcggggaggagggctggggaggttgcggggggaggggggccccgcctggcaggaaattaaacatcaatcaatcaatcgctgtgagcacggcgacccaacggcggcggggctgcgaaggaggcagagggacaggcgaggggcgggtgggaggcagggaggagggaagaggaaggggagagtcggcggtcggagcggggtgacgaggacctcatgcacgaggcggcgaaggaccgatggcagagaaccgagtgcggcgcgaggcggtggccgcggccagcgggtgggtgcgtctgggcgcaggcgggcaccggggcccagggtctggtcctcctccttgtggcgggtccagggcgcggccgcctcgcccagcccctaggcgcactcgtcccggcgcggaggcggcggcgacaaggcagtcgctgggtgccgcgtctgccggcggagacgcagaccgacgcgcaagaggcgaccgcggctgcctcggctcccagctctgttaactgcgcggagtactttcgactttggagataggagggcgatcgcctcccccacccaccgcctccgcccaccacccaccgcctccgcccctccgagcaacttttcccggtgcctgcgagctccccctccgcgccgagccgaacgtcccggcccgccgcgcttcgtgccgccgcgcgcgcagggaaggccgcttctccttcaaagctggcacggccgcgagtccggaacaatagtcggggtgtcccgaatgccaggagcacggccactgcccgccgggctgtgggtggcacaggaatgggggttgcgtggtggatgcagagcggggtgcatccctggatggcatcgctggagcgctcgccgctccggcgacatcgcgagcggtgcaaaccgggccgcctggagcccgtgacgcggtggcggcgagggcggtggggctgcctgtcctcgggctacaggactggggctcctggggaccccaagctgctcgagcccagggctgctggcgccaacagagctgtgccctgaggacccggcctccccgcccggggggaggccgcacaggagcgtccccagcaggtcccgcgaaggcgtaacagagccacaaacttttgccgactcccgcggccgcggccgccggcagcccgactccggccgcggtgctcatttaaggtggcgcgggcactagccgagcaggctggcctctggccgcgcttttgtccctgcgattccgcttgggcgcgctgcctccttaaggaaaagcacgtgggcaggggccgcagcccccgcgagatacccggggcgtcggcggacattagccgctaggaccttaggcgagaaaatgtggacgcatccccgccggccctgaggccagagaatcccccctcaactggttgcacctcatgtccctcccgcacacgttgactctccctcctaatccccaggaccccgagggctctcccacatctcccgcagcaagagccaccgatcccccttaagaagcgttgactgtacggcggcgccagagggccaaactaagttcggtttcgggaaacgctctcgggagcagttctgtaaatccctgctgggagcagagactgcgaaaagctgagtccgccgatcgtgcccgggacaaggctgccttccactcgccctcgccgcatctacctggtaggcggcatgcgcacgggcttagaggcttgagagcctctggaagagaaagggtcccaggaaggaaacctgcccccggcctaagtgtcggcgcccagatcaccacgaaccccgcacctaggcgccgcccaccaagttccaaagaagtccgaggcgacctgggagtcggtcggatcccagccgagaaaagaaacaagcaggatagcaattcttaggggagccaccctgggagttttaggcagcgtttgcctttccctggttttcttcaccaagccccatcctccccccgcataccacccccagtcaaaagagtgggagaaaatgcacagttcgaagtcggtgagagcaaaaatgggtctagtaaatcaacccgtggtggtagctaaaaggtttggggctgcaaagaaacaaactgtaagttttgagcaacaaactttttcttcaatctgtaatatgtcgaaatgggaagggggtgttgcaaaagccaactaccactgtcaaacttagcccgtttacaacatggggaaaggcgtatttcttactaatatctcaacaacgataacaatgctgtatccttccttaccttgatgttgaactgcgaatcctcctccggatcaatgtccaggaacttagaagaattggtgatattaggagttcagtacttctggaaaaaaatgcaaatggtttagccaggatctttcctgtctgattcgtcactattattatatctgatgatgcgaatggttggagcgattcaatcctaagtcattaatgagctattttataaacaccactgtctgaagatcttcatttacattttgctaaggatcacttcgctaacctcacaggcttgtgtcaacagcatgatttgcaggacttcagttacactcttataaacaacacggctgtattgttaatcggttaatattttataaagtgtaaatattttattatgttttgaagggaactattgattctaaattattaaacccctgagaaggactatttaaatgaaatatacaattaagtacaattaaatgtacattgtggttagtttgttttcagattctgcacccttttaaattcattgcttttctctttactggagtttcctcttgtccatttctgatactgaaaaaaatctatcatgttaggaaaaagcctaaattatttaaagttgcattaaacttagaggaaaatgtcaaatacgattaattatgaccagaaatgtattttggatgtttgtagagttgtatttcatatcacattttacaaatttcttccgatttaaaggagagttctaggaagttttgtgatctatgtccggtgtgggtttttgtcctctcgagttttgtctctaataaaggccttttttgtttcaaattacatacgctttttactgcacaatttttgtattgaccttatttcaactgaagcgattatttccagcaggtttaatttcgacaataagatatattttaatagttttacctttcgctagaattttgtattgtttaaaacagtaaatgaataaatttgctgatgattcaagaatatttgtttggtttcgttttgtatccctcaaaaggtttatttccaaacttttta

SEQ ID NO: 38717 - DNA, 780 bp, Homo sapiens
agaacattttggcgatagtactatagttatttgtctaaacatttgtctcttccactggtgcactgtgggggacactggcttattgagatttttatctccactggtcaacacagtgcatggaaagtgctcaaaacatgatttttaacaaaaagttaacaattaatttgaggtttgaaattattttagtggtttatggataatagaaaagaggtagattacaaaataatatgcaacaaaggattaactttgccttcagaggtttggcctttgtccctgacttctgggggtcaatctctaagcacttggaatattttgcctgataagagcgttcttgtttacttagggccttgggccatgccagatagtctatgctaacaatgtggtttatggtggacctttggtcatgcattaccagcttaaatgctggagggtctgaggctaaggtgagtgatacagccagtcaaccaggtaaatgtgactgagtcctaataaaaacactggacagcaaagctcaggtgggcttccttagttggcagtgctccatgtattaccacatatagttgctgaaagaaataggcactgttgcacagcttcactgggagaagacaactggaagtttcacctggaactcccctgcatcttgccctatacgtgtcttcccttgggatctgtatctttttgctataataaactgtaactgtaaatataacagtttttctcagttctgtgagtcctggtgaattattgaacctacaggtggtcttggggatgcctgaactt

SEQ ID NO: 38718 - DNA, 851 bp, Homo sapiens
ggaatatataaatctagggcattgctttttttttcccccttgcaaaccttaagggtctttttcattaaacatgtacatatgcagtcttcatgctgaaacagaggattgtgatacacaattcaaggtcaaatgattcactttgtgtttcccaaagtccaaaatctcagtgctttaaattccttaactcttaagaaagctcgtttcaatacacagctgctttggtgtgaatgctgaattcaactatcaatgatggtaaagagaaaagcaaataatgatggagtgaagcaaaggtgaagactgtaagggctaaatttcctcctctctctctgtatccctctctcagtactatagcttaagacccacttaactcttccaaaggaactttgtttctattaactcagaggattgcacaacctttgtaaacacaccattctcatgtatttcagttaaatttcgtaatagcaccataaaatgtgacaggcgttgcaataaattctcagtcacaggaagcccaaattgtatggggaaattactagaaaccatgtctcagaaggaaggaagaaatgcaaaattcttcaagaacctggaaaaataatgttaaatgtttccttaaagtgtatgtctctcattgaaataaaatgaagactgtgttttaagtaagatttcaaagtttgaagcagtgtggctattttaatcacccgacttcactcacattcttgaatgctggttcctgcctcaaggccactggagaggagatagcccttcctctttccctaccctctaccacttcggaatcggggtgctcttatcaacagggggctaaaactgcaaggatgcacacaaatgtgtgc

SEQ ID NO: 38719 - DNA, 1982 bp, Homo sapiens
gagagagctcaggcttcgtagctagctcaggtttgcaggcaggttttcatatcatgtccatcatctcatcactgaaaattcataaaaattctgtcattaggtttttctagatattaataacattgttgtaataaagcaacccagacctctcgtttctatgtaaacaaaaaattgctttacacaaggggtgtgggcgtcttctggttttcatttgttttcagtgtgtttatgcagcttaattgtctcatcaggcactttcccaacataattatgctttttaacaaatggtgtttatggcaacccctaacagtgcaaaagaaaggattagtttcatcctctcattccacattttgattccctgtggacagctaaatcacacaaagatggtgttagaaaaattcaccttcacagcgaagctgaaatgagcggcagtaccaggctcagaaagtgacccaaacgcaagccccccaaaacactctgtgtttgggacagggagatcctagtcctcccagctcatccttcaattaccattggatgacctctggtgatagattaaacactcggccgtcccccgcccccgcgcctccccacccgcggagaacctagcctagcaagtgcaaagtgcagcagttcacctgccccctgcgcacgcaccccaccggcacttggaggccgcaaggacgctcgccaggctgccgcaacgcgtgctggggccagaaccccgctgctgggattccctgcgcggtgccgactaggttcctgggtggagtgtcccaggaccacgtgggctgaaagggaacccgaagtgactcccggcctccccacaggtctcgcgggacgcagcagcggcgagggcgcggggttgtggcgcctgggagcgaggggcagccggcggctgcgctgccccggccgagctctcgaaccagcggccgcgcctgccgctctgcggtttgggaggggagcggacctgcgagcgccgaagggcggtggggcagggcgaccgcccagcccaagtcgccgccgcgcgtggcccgcgcgcagcctccgccgccgcgcgtggcccgcgcgcagcgtctgccgccggctccgcctcccggacgcccggagcgcgccccaccccagccgcacaccgaccgggctggctctgcctctccctccctgacccggcaccacgtgcctggcgtccttgaacgcttcagatttttatcagtgttgccttttcgtttgctcttccgtatcgccagaccctccacaattctctagtcaattaatgactttaaaggggcattggcatctaatgatcaggtctttgcctattgatcatgcaccagcagggggctcttctctcgtttccttggaagggacacacgcactcacacacacccttctggtaaatcccctcctggaggattagtgccccccgtgactgtgaactggacccaccccgggacaaaagcagtccttgcgcatacccatttagtcaaagttacaacgaatatgaatcaggcttccgcatttcctttttttctaggccactcaaccttgaaaacacatttcgcttccaaaaaatcaggacctgcttttttttttttcgtgtagcaaggattaaatgtcaccattttgatccaattttgttcctgtagtgaaataatcactaaataactactttgacggaataaattaatttttaaatctattttttattttctaattataatttttaaacacagatttgaggaaattaacatttatgtggacatttggtttctagcctaatgtggcataaaaataagtaacataatgagtgttaaaaaaaatcaggttcatgatgcttctcacatcatcatcattgtacttagatgtcacaacagtattatgtgcgattatgtcagatccagccttctccatctcggagtgttggcaggtaggagggttgttggcaagaggaggggtgttaacctcaggatcctggatccattcca

SEQ ID NO: 38720 - DNA, 1340 bp, Homo sapiens
cttccttcggggcttgtaggagacttcccacggaatcttctttgggaatgtctcccttttaagccctgaaagaccagataaatctcaggtgaacctagagaaacagggagcttcgtatactcaaaagtctatacattacgtattattgaacggcgacctgcggccgcccctgctgctgcgcatgctccataactgccgcttgctatagctgggagtactgtattatctctttgctcttcgccggctcttccccagacttctgttcgaacttcccggccgcggcagaacccaccaatcacaaacgcccttcctcaagccacgcccaccgtcttctccgggatcccaagaccgatttcgcccacacccctcccttcctttccttacgcacgctgcgcgcggacgtcggcctctgacgtcgtcgcctcagcgccggctcccggccgggccgcggccgccgaccgttgagccgccggctgagccgcctgctgaagtccctccctcaggaacccctccgccaccctccacctccgaaccgctctcgcggcggcgacccatgtgggggttcaggctcctgcggtcgccgccgttgctgctcctgctgccgcagctcggaatcggaaacgcctcgtcctgctctcaggccagaaccatgaacccgggcggcagcggcggcgcgcgatgctccctctcggccgaggtgcgccgccgtcagtgcctgcagctttccaccgtgcctggagccgatccgcagcgcagcaacgaattgctcctgttggcggcggccggggagggactggagcggcaggacctccccggggacccagcgaaggaggagccgcagccgccgccccagcatcacgtcctctatttccctggggatgtgcaggtaactcggggcctgcctgggtatctgttccttcctctcgtgtatacgtacgcggtcactgattcttccctcgtggctgctgcctggttcctttccttgcctgaacacacccacacattcactgagggtggctcttcctctactccacgaaatccaaaaccgtgccttccacgcccttggcgccctttgtccatagaaccccatggggaaggtgtccgacgagggctacgatctcgaaagagccagctgtcggtccaggtttccaagaggcggaatttgagacagggagtgacacgcatcttgtatatttattctataatttggtttctcagaggaccgtgtgtgtgtgttgggcaggggacagagcgatggctttcaaattaagttagcacgtagtgtttagaaaacggtggcagtaattaaaaaccaaacaaacattacaaaggtatgacat

SEQ ID NO: 38721 - DNA, 2235 bp, Homo sapiens
gagaccgagtttagctcttgttgcccaggctggagtgcagtggcgcgatctcggctcactgcaacctccgcctcccgggttcaagcgattctcctgcctcagcctcccgagtagctgggattacaggtatgggccaccaccatgcccggctaattttgtatttttagtagagatgggatttctactggctggtcttgaactcctgacctccggtgatccgtccgcctcggcctcgcaaagtgctgggattacaggcgtgagccaccgcgcccggccccagaactgtaattctatgaccacccttataaatgtaaatatcaggtaagaaaattgctgggtatttttcctaccataaactgacttactgtaatcctgtggatttttccttttaataccttgtttttcttaggtctggactcccttgaaaagcactgcaagtaaaagcactttttgtttccctaatatttctctatgagttttcttttaaagacctaaggttctaactacaggtataaaagactccaatgtcggaactagaacctaagtaagttagaattcaagacgagtaggagttttccgggggaatcccattgctttcctttttggctcagtggagtgaaaagttgtgccttcaaatccattaattcggagcagactgacagatgcggagtaaagagtttaggcaaaatacctctcgcactcagctctccgccatcatcttgctccccagaaacatgggactttctccggaaatttcaatagaggagccagtcggcgtcccccgtgcacctttcccttggtctaagggccaaccagtgatctgctgccgtcctgcgcctctttcccacaccctgggtctctaaaaaccagttcccagctgtccgaaaggtaaagacgtgtctctcgctggtttctcgaggttctgccccgcgcgagggcctcacctgtgggtagaggtgctgcatgaactgctcccgagaaacgccctccagccggggtaccgggaggtgctgcccggccatggttgctcacgcctgccctcttccaggtcttcggaacttcggctctaaagcgttcctcagcgccatccgcccggaaacacgagcgacagagaaaaggtccgcgaggccggcagactccagagtggctgggtccgagcgcggggcgggttgccgaagggcctcggcctgggctgcgtgctggagagcggggacggggccgactcaccagaggctgcagcaacaggtccactttgctctccagtctctttctccgacaccgctgaggcggtttcccaccgacttcctttccatacagcaccggcaggcaccggtgtgaagggtcataaaaatggcgctggccgctcgtttgctaccccagttcctgcactctcggtcgctgccctgcggggccgtccgactccggactcctgctgtggccgaggtgaggctgccgtcggccacactttgctacttctgccgctgtcgcctcggcttgggagcggcgttatttccacgaagcgctagggccttggcagcctcggcgctacctgcccagggctcccggtggccagtgctcagcagcccgggactccccgcagccttcgcttctttccctgcctgccctcagcgcagctacagcacggaggagaagccccagcagcaccagaaaaccaagatgatcgtcctgggattctccaaccccatcaactgggttaggactcgaattaaggccttccttatctgggcctatttcgacaaagagttcagcatcacagagttctccgagggagcgaagcaggtttgtttatttccctgattgacctatccgtctctaatgagttcaactattgctcgcagaagtgcttagcagtgagttttcttcactgggatacaagtgatcaaacgtgattagtggcccagacatagagccttccagccattgcttgacttaaagtaagcttctgggccgggaatggtggtacacgcctgtagtctcagctacttgggaggctgaaggggaggatcgcttgaacccaggagttggacgttgtagtgagctgtgatcgtgccattgcactccagcctgggatacagagccaggccctgtctcagaaagaaaaagctatatggctcatcttgtctgaacataattttcaaatttacaaagtgggcaagacaatgcctggcacatagtaggcactccatgaatgtttgctgaatacattaataaatg

SEQ ID NO: 38722 - DNA, 700 bp, Homo sapiens
gcatgtcccatatcttgaatgtgcttgtttttctatggcatcatttctgtaagctggaagttagggcgaaagagttgattagattcaggtgaaacatttttggcaagaatatataagtgatttgcggacctcctattatataacgtcaggcagtacctaatttcttattgttccattgtttagagtggtgattatgagaaccctcagttgtaaaagtcatttttttctctttatagttaataagtaatctgtgagatgatactttgatacctggtaaatattctgctcacaagatgcccacatactaacctctggaacacgtgaacatgtgttccaggggttagttggcaaaataggactttgcaggtatgattaaattcaggattttgtgatgggaggttatgctggattatgtgggtggacccagtgttatcacagatgtccttataaaagggaggcaggcgggtcagcgtcagagagaaggacatgtgatgatggaagcagaggttggaactatgaggggccatgacagccatagaatgtggacagcatctagagtcaagaaatggcaagaaacagattctccccagagcctctagaaggaacgcagccacactgacccattttagacatttgatctccagaactgcaaaataataaatctgtgttgttttaagccactacattgtggtagtttgtt

SEQ ID NO: 38723 - DNA, 3542 bp, Homo sapiens
ttttttttttttcctacagagttgtttgggctccttatataatatattctggttattaattccttgttagataggtagtttgcagacattttctcccattctgtgggttgttctttgctttgttgattgtatcctttgctgtgcaaaagttatttaacttgaaatgatcccatttgtccatgtttgctttggttgtctgtgcttgtggggtattacataagaaatcattgcccagaccaatatcctggagagcttccccaatgttttattgtagtagtttcatagtttgaggtcttgggtttaagtctttagttgattttgatttgatttttgtatgtggcaagagataggggtctggtttcactcttttgcatatgggtatctcctttcccagcaccatttattgaagaaattatcatttcttcaatgtatgttcgtggcacctttgtcaaaaaatgagttcactgtagatgtgtggacgtacctctgggttctctattctgtttcactgctctatgtgtctgttcccgggtaatttaaaaaacttaaatgaagtagagcacccagagaaaactttttgattttagagccattgaagggttgctccaaatgataggtccagatctctgaccctcacatcgtgttgtttataccacatacaggttcctgtctagaggaccctggatacagtttatcccatcttcaaaagtaacctcctccccgcttccttccctattataaacctatcagtttattggacattctatcaaaatttacttgcttagtaaattgcaactctggctcacttttatgtgagatgtagtcatggttatcctgtgactattattctactctctcactagtaataccttagatgagatgtaggcaaagaatcctgtggtactttttaccttcatgtaaagaaattcaccaagaccagtgcaagaattagatggtgatttccttttatgactcatcccctagcttctgactttttaagtgcagagtggctatggacaaagttcatgggtttaagagaacaccctgcctgcccttcccaccacccccatcctggcattactggttttcaaaatgtgcattgcagtcttacatctgactcagggcagctgaaatgcttcaacagtgcaaaatgaaactgctctgtctcctttcttatgataccacatctgaataatcccctatactgcagagaaaagaaagacataatgtggttttatctcaaaccagaagtaagcaaatcaataattgaccatattaactaactcagtgctgggaaagagacttcttgttattactccttaaagcaaaacagaaacaaaaagtaaacaactttaaaaccaatgtaaaattataccacatttaaaaaatcacatattttagttatagtcaattactttgagacatttttttttcctgagggaatacaccaagaagtagcctcgtccaaaggaagccattctttggggccttattggaattttatttgactctctccctccctcccactactctaatttcctattctttctgttcctcagtcatatcaaagttgcccttcccctgacacttttgcaggaactgctccctctgccagctgtgctctttgctcagatcttcaatggctgatcactttctgacagtcaggttatagtttaaatgccacctcctctaagaaggctttcctgaccattccatccaaagcaaccacatccattactctctcctgccaccctgttttattttactacagcatttattatcatctaatagttcattttttattttttattgtctgcaccttctcctcaattagagtttcaatttagcacctccttatgtctggcaaaatagtctctacttcactggtgttcagttttgggcaggctttctctgtcttggattactgacatttgggaccacacaaaccttcactgtggggaggctatgctgtgcattctaggatgttttacaatatctctggcctctattcattagatgcatttttggtggtgacaaccaaaatgtctccagatactgtcaaagttccctaggagacaaaattgcatgtggttgagaggtactggtttaggctgttagctgctgtgtagctgctatggttgtcaggagacaacattgtcttagagtagtaatagctatcatttgttgaatgcctacaggtattgagcactgttctacaggcttaacatttagtatttactatttaataaagtaatagtaactttagtaaaataatagtaaacatttagtctttactattatcctcattttacagattgggaaactgaggcacatgattacttgcttaagttcacaccgttagtaagtggggaagtccggaattcaaaccaggctccagaactctatgctaacaggagtgggcagtgctgtgggattctcactgccgtgtccctggtggcagagactggacagcaaatgggctccctacccactcaaacccacacagttgtttgctcagagtgaccatgggcaagtgacgactttcctctctgagcctcagttacctctgtaaatagtagtaacaataataataaattccatgtagagttgctttaggaactcagtgcaatagcctaagcgaaaatagcaggtttctggcacatagtaagttctgaattcatttcctctctccttcctttcctcttggctccaagctccaagcactgaaagcagatcctaaagaccttggtcagacagcgcattgggaaatctaacctttcagcaatctgcggagccgccctgctgttgaccagaagcaggggaagcagcccccttagcaatagcctgccgggttagcaatcttgttctcctgtgctaataaccaacagcacaagtcatcagcactttcccgttaagccaaaaggggcttttaaatctatgctgattagatgcccctgggcctcgctgacaagtagtcttcctttctccatttcttgatgtgagtcagtgaattaattgcctgacctattgttttctaacacggcaaattaaatgaattttcgggtgaatagcccaagccttttggcctgcagggggcgtcctttgcaaacataaatctgttggtgctcaggctagctggtagagccccatcaaaaattggatgcctttgaaaagtttgcttagagcaggggttctaaatttggtgcgcacaaatctccatggataaaattctgtgaacttggatgggaaaaacgctatatgtttattttcactaagctccaactgaaatttagcattttcttcaattatgaatataggcaacaaattacagatatttacagattccactacggttgttgcagatatcttgaaataccatttacatctcatgacttcaaaattacagtagctataggactactgctggatcttgtcatttaatgtattaataaaaaagcacatacagaattatatcacaaatttgtttttgttgttgatattttaataactgtcttttgatatcattggtttgccttgtaatc

SEQ ID NO: 38724 - DNA, 2093 bp, Homo sapiens
gaaattatgataaaggcaaattaaataagtgtgagcatgtatctcatgtctataaataacaaatgtgaatgtctattataaaaattacatgtcaaatgtggtaaatatttgttgtacaaggggagatgtgtttgcaaagctgtgtatgcaccaacatataaagctgtgacaaagccctcggatgtgacagatcttgtcaagtcatgtccctgtgacaatggcaaagcatagttctccccactctctctagcacagagagcctaaacacaagttgccatcttgcattttgatggtggttctactgtatttaaaaatctatactctacagcactagctcacggaatcaacttagtagtaaataagtaaacttcgaagagctgcctaataaggagtattaaatcaaattcaaaaaatgctccaaatgagaatcagctactgaacctgtacgaatataaaccatctggaatgaatcagcaatcttagctaaaagtgaattaattcttaagacttcttctctccaaccctctagcagacagtctgtcttaagccctgaaaatggacttgaccttattagaaacccatttggaaagctacagaatatcctcccagatggtaagtcaatacagaaataagttttaacacttttcataggtgtcaggaaaagctgtttgcttaaacccttacttacatagttttctatttatgaacatctttgtctcctgtactgatgttagaatgacagcttcatctgaacattagttagcttgggggtgcacacatgtctatgtaaaggtatcacccatcatgttttaaaagaatatggcttacttgctctcattttagctgatctgtatttcctcccaataccacctattttagggtggaaatacaagtttgtaattttttctcttcacataattttgctgctggtgggctgccattgtcagtagctgccatcctcaatctctgaaggtacagtaagattagtggttacaacccagaggagggcttttagtactttctatatcaaattctgtcaatgcttaaccatttgtgtcaccaagagacagatatttattgttcctgccattcaggaagaaatgttaagatcttggccgtgagcctttggaaacaacagccagtggggttttgcttcagagggcaccgggggaaattgcttggtgagcttccctggtgcatttgaactttgccaacagtaaactggaggtggggtttctgtttcctggcatatgttcctattcctttttagtttagttttattttatttatttatttttgaggcaagggaagagggaggatattctgctctcttgttcctatcaggaaggaatttttctcacctcttctttgtaaatacaaatctgggctagttactatggtgtcagacagccagagaatttaatctataacaggtttagcaataatcctattaaatggtcttctgtgttctttgaaatttcgattagcgagggaagtgcccatgttgaaagccatacggtcttgcatgaaaggaattatgctcctagctgcagttggcccataggatcatggtatttttttttttttgagccctatcccatgatgatttctcctcacctaccagtcctccctatttgagagtttttaaaactttgcaaaaagtgaaaatgctttgtggttaactgtgagggtaaatcaattagttctggatcagagtaaaaagacaattatctcgttggttttctgtgtagcaaacacttcatagtcagagaccttgtctgtcttgttgatgactgaatcactgcctcctaagatggcagctggcacattgcaggcatttaataaatatttgctgaatgaatggatgactgaatgacaattatttggctaaactcgagacattgactataaagcactaaacatgatcacttatattctttatcatgatcatgtgtgaagaggagaggctaacataaatgtttttcaaagctttggagtgataaaatgatagttcattatccaagcaaaacagatccatctatataggaatatcatatccaaatttggcaaagccaaactgcatgataaagtcc

SEQ ID NO: 38725 - DNA, 1866 bp, Homo sapiens
atgaaaggaaatccatggagggcagaagagattcttgactgagcataagggagaagttcctgatgatctgggcagttaaaccaagaaacccaattgggaccgccgaccttgagaaagagaagggtcatcccttcattccagatcagtatttgtggggcatttaccacctagaagcataggactaggccaggtgacacttcaaaatcattctcacgctgtaattctaggatcatgggaaggaaaacttaaaggattgaaaagtaaatcacagagagtttgtgaagatagaaaactgaccacttaggtaactgcataaatagcttaaaattacataaattggctataatgttggaaaggggcatgtgacattctaacagaaaaacaaattagctaatggaataaaacagcaattgatggcattgattataatttgtagtgcaaagaaaaaggtcaactcatctcctgaattttatttgggttaatgataattatgtttaggtaaaaagaaatgaaaatcctaattgcaagataatgtcagctctttagagaacattttgtgcccaacctaaaagagatagatagagaaagagaagaaagcacaattattatttccttcatttcaaacccaagttaatataaattatctggaaggaaaaattatctgtgcagatgtaaaatattataaattctcaaataattagacttagatatcttaagaaaaacactcaccagtgctttcaaaccagttttaagtcctaatccttgtatgcttaaataaacattgcacacacagatgcagtgtgtgaagcaggctctgctttaagaggggaaagattacatttctgtgtttacccaagagctgactaaaacacattccatttggctgggacacacagaaattagtttgagaaactggaaagggaactttatgtgttttaacataacagactgaacgtggtgtatattttacagatatcatgagaagtttctctcctccaccttttactgagccatcaaagaggcaattgtgtgaacgaaataacacagtaacatgtcacattccatttacatcgatttatcaaatccaggaagaagccttcgcactttccggactagtgatcagcactaggccagtatgaaaagctgagaaatggagagttttcaaggaaaatacacattaaaaataagtaccaaaaaatcattttttttttgcacatacttttacttttattgacttaggttttgaaaagttagtctagggtagcaacatgacttttgggggccttaggcacctttactttgatggatcccattcttcatttaaaaaatattaaaaattatattctatgactgcattggtatagagatgaatataatccagggtggttttattcttatatattcactattattcaattcaatagtttctcctgattttcaaagaaatgaaaataaaaccattttcatgggcccctagaaatgttgtgggctataaatctgtgtctgctgtgcctgatggatacatcagccctgagtcagccagtacgcaaatagcccatatggtgagcagaggtctggactaggcccaggggcaatgcaaagaagtgtaagatgtaacataaaatgcagctgaattgaggaaacttacattcagagagggataaggagctaaagattgatacgagacactggaaattacggggtagatgggaaggatagacaggggtgaaggtgaagggtgaaaaagatgaaggtggcagattatgtaggaggttattgctgtatccaaattaaagttttaaggacttgagtgagcttgacgacagtgaaaatggttaattaagaaagaaaaagacttgagagaaa

SEQ ID NO: 38726 - DNA, 531 bp, Homo sapiens
ttaaagcaacacagattaattatcttgtagttctcatagtcagaagtacaaaattaatttcactggctgagattaaggtgtcatcagtgctgtgttcattccagaggctctcagagagaatctgtttctgttgccttttttatcttctagatgctgtctgcattccttggttcatggtccccttccagacagcaatcgcatgactcagagctctgtttctgtggtcacatccccttctctctgactctcctactttccctttacttagaaagacatgtgtgattacactggatccacctaaataattcaggataattatcctggatatcacccaggataacttaattatatctgtgaagtccttttgctaaggcagatattcacaggttccaggaattaggatgtagatatctttgcaaggccattattctgtccagcataaaaggggagagcatttctcaattttcttctttttagatcttacgtaagattagaattatctgttctttgactatctaacaaaacttacct

SEQ ID NO: 38727 - DNA, 1177 bp, Homo sapiens
ctggccacccgcttaagccatttggatgtagtggagaactggaagctgtgtcaagggtgaccgagccctgcttctggcataagaagggtaaatatattcaaaatggatgctgaggcaacataaaattataagaattcactacagacagcttgggtggcttttttcatcacattcatggggaatcagaacagccaattcacaaagaatgaatgatgaagcaattgagtagagagaaatatgaagcctgagaacagggctgccctggtttctcctatccctcaagatctggactctgcccccatgaggctcaaatgcattcccagccttagatttctacactcttattaaattccctctttgcaattcagcagtttgagtgggtttctgttacagccccaaagagtcctaagattctctgccttagcttcttaagggcatggtgtgtaggataattctccatttgtgttcacaggaccctcctagtctagtatccaatatttagctggccacacaggatcatgtgttttaaaaagaaagacagaaaaatagattcaaaccaagacaggcaaaaaaactttttgacctaagtaaaaacagacctaatggaagaatttcttccgtctctcataataatttaaatcaggttgcttggtaaccatcttccttaaaatggtacatttgttttttaaaaaaatagtgtttttataagaagctgcggatttccaagccaggttttataacctcatgcaggcccatatgtcttttttccaggccaaattccaactggtttgcaaagggatatgcatgctgaaaagcaagaccgaacatcgagggtcaggtcaagagaggaggaagggtttcggtgtaacagtaatatcaaaagggtgccctaaaatgaaaaaaaaaaaagacctcagttcttctgctgtatatttactctcttagaaagaaccattggataacactggcaaaggctatcatgccaatgactacatggtgtggtgttcccattaagtcacaagaagcggtatccaaggaaggtagagaggaactcaatcatttggatttaatataaaactctaaagccctgaacaaaatgcaacctaggaggtggaattatttaaaaactctcttcggccaggcgcagtggctcacgcctgtaatcccagcactttgg

SEQ ID NO: 38728 - DNA, 4171 bp, Homo sapiens
cccagctactcaggaggctgaggcaggagaatggcatgaacccgggaggcagagcttgcagtgagccaagattgcactactgcactccagcctgggcgacagagcgagactccgtcccaaaaaaaaaaaaaaaaaaaaaaaaaaaactcttttcatttaatgcaatttgtgtatccaatctctattatatatcataataatcattattacttaatactatattattactacattgatgtggtacttgttagtttttactgaccatctccaagaacaagaatgccttgaatcaaaggatgaaacagtataatggtttgttttaaaaaaaaacaaaactatatccacaccaattttttgttgcccttggggaaaaaagtatatctccttgcattgtttctgggttacggtgtctttctctgcttgctgtaggatacaggtagatactagaagggaaaacactccatctcaaacattctaagtcaaggaagtcaaaaagtcaagtaggtagtgctcaattgaagtaattagcagaatagtgtgtctaatgtcgaagtgccagcaggtaactaaagccacatcttgattattgcatggtttcaatgcactcctaatataatattctactacaactaaagaccccctggcattttctaagtcagcttcccccttagattcttgttcagtcattttccctggggttaagatggctggacaatatctcgttggaaagaaatatgaatttcaataagactgtaaaggaacatgtttgaggggctcagctgtgcttgagttttcagttaataatttagaacactcctttctgcttgaaatctccctaattgaatgacaagaatgaacttgtcataggagctgacaggcatcattctgagtcacccacccctgatcccagtgtccaactgaggtgcatttttcttttcatatcatcacaatttttttgtgtgtgttttgagagtgagaaatgaggtcacctgcaaggtagagttatagcaggaagccccagctcaggggccaccatagtcaggggggcttaggatggctcctccccaggccaccacacctcactccagcagccagtagtggcagcagtgtactctggagatggacagaaaccttaataatggcccagtgacccaagagccactttcaggagctattgcagcctggtctagagctcacagcccagcccttcagacaaatgattttgcaacaaccatgtctgttcatagtgaacccggatacttcagaggttgtttaaagccttacaatttgtggctcctattctcatatagcttatcattagtagtcacatccagatattaaaagtttgcaataccttatgaattcctttgcatgtacactatattatttaagattcaaaaccatttttcccataactgacaacaagtcatttctaattagatgaaagagatgtacttaggggatgagagtgggaatctcagctccatccctctatgtgaccacagtcatgtcaacctctctggtcctctagttccttacgtgtaagatgacaaaggacaggtattatatcatgcaatctctaggttccttttcagctcaaaagtcaatacgaagggagacttaaagtcactaatagtttagcagggccatactgtcataaaaagttatactcaggttaggttcttcaattcaaccatttatagcacattttcattttggttggaatccagctccacttagaatttaatgtgtcatcactttaatgggtcattcaagttgtgacattatacaaatatttattcggcacccactgtgagctgggtcatatgctatgagttggagataaatgaagaatgaggtatgacctctccctcagagacctcacagcctagtgcgaaataaagctggaccagctggcaattgcagtacatcgtgatgggggtcaacagtcatgctgtggggacacatgtgggggttggaagggccaaatcacaacatctgagggcagacctgacagagaggaagtgagccagacaggagggagacagagacagggagcggtatgtgcacaggcccaggcagcgtgggggctgtaagcaggctggaacccaggaattgagaagaggactggagagtgataaggctgaaaaggtttgggatagttactatttaatacaatgagccagaaatcacaaaatgcaaattaaaccactgtaacatattattctacagtcaatacctcggcaacaatttttaagtctgaccataccaagtattgtcaagaaagtggttttatagaatcttctgtatgtcatgtgtggtgagaatataaactggtacaaccactttgtaaaacagttttgacataatctcctatgacccagcaattctggtccattcatcacaacattgtttttaatattcagagccagaaaacaactcaaatgtcctttaatagtaggatagctatgtgcattgtggtatagtcatacaatgactactatatagtaataaaataaatcagcggtaaccacatacgacaataggattacagaccacaagcttaatgttgaggaggaaaaagacacaaaatacatacagtaatagtccatttacataaaattgaaaaacaggggaaattaaactttactctttagggatgcataataaaagtgggaaatacatttttaaaaataatattatgataaaggataggataagtttacttctagggaagaaaaggggcctgtgctttggaaggggcagattgggagtcctggcgtgtagcagtagtatatccacttagctggtttaagggagagttttctttttctcactgcacattatattgcacaataaaaatcttaaataaggaagaaaacattagaaccagatatgacaaagaaagaggcagttgcaactcatggagacagagagaataatggttactagacactgggaagaataatcaggggaaaggagggagatggttaataggtataaaaatacagttaaagagaaggaataagatctagtgctgagtagcacaatagggcaagtatagttaacaataatttattatgtatttcaaaataactaaaagagtggaagtggaatattccaaacacaaaggaatgataaatgcttgaggtgacagatgccccagttatgttgatttgatcattacacactcaatacttgtatcagaatatcacgtctcccataagtatttaaaaagaaaaagtttcttaaaaaacaaactaatcaatacaaagaatgatttgttgtcattgctatttttttaaaaaaagaaagaggcagagaagaaaggaaagaaagaggggagagaagattaatatgtatacttggtagccctaattaatttggggctatggcaagaatgccatggccaaaagacatttgggagaaatggttgtgtccatgtaaagaatggctcattctctcatcctccagttctaagtattaagtgaggtctttctccttgaagactagctaaggaaggagaaagaatggcagacagagacagcctcctgccctatcacttttgccttcagggctcccttcccttctcctgggaaccccattgctgtttctgtgtcccctcaccctgctgtgggagtgcaaggctctgaagactgtggcaaggaggaaattctcaacctttgcactcagatttccagcacctgaggtagcccaaccatggggcccaataccatttactcacattttccacttcttctgctgtattgtctgtattgctgaaagccatttcatgtgttttctcatttgatgcctcaaagagcctcctgacatgggtagagcaggtattgttaatattcatggaaaattggagccgcgaatgagtcattcagggtcactcagcttggatgagaatgcaggcccccatatctgaatctacttcaataagccatcctacaagccccacatatcaccaaagtgtagcatccacaacccacaccccaagtttaagtggctctgtacatttgagagggccattgaaagcccagagatgctatggaggaagttgtgttaaccacgtcaaagtactaggtgacaagaagatggcattcgtatcaaattccgatctccttaacttttcagtagagtctaaatatctctgcagagcttg

SEQ ID NO: 38729 - DNA, 834 bp, Homo sapiens
atcttacttttgggtcatcaacggtgtttatctttgtggaaataatgaagtagctcctattagtaaaagaacactatattcttctgacaaaattgagtcagtgctagtctgcacgcacaggtgtgcttcacatgctaaaataaacgtgttcctgaaaggttacgtataaattgagtcattttcctattggcttatattatcttgtcaaagatgttatgtcttccttccaggttgaactttaattcacttctcacactttaactttcagtttctctttactcctgaaatctttccaaagggttttcatattaatcttggtgatcttaaaaacacaaaaatagccaggaaacttcacaacttggagcatccttttattcagacaaatattgctcttttttttttttttggatggagggtgttcctataaataataaacacatttggtttttattggagaaagtaaattgagtgaacggggagtgaatgtgccgtattctctgtgctggctgtggctgagtcattggggactcccattggatcctaagagaacaagatgatgtcacaggcatttctcaatcaccatcactttggaacaagctgctacttcaaggtgctaggaaaaggtcaatattctgatacttttagtattctccttcttgtctttctggtaaaatgatgagggactactatatggtacacatatatgtaaaaagtcttagagtcactgttatcacattttgtatgatcaagcactgaaagtgcttatctgaaaccagatgttcagttctcagtagtcaagagtcacattaatttctcttttccctcttatgccat

SEQ ID NO: 38730 - DNA, 575 bp, Homo sapiens
cttagctttaacatacataaaaaggtgcagcctttatcatagagataagctctcagccatttaaattacttttgaatgcaatgagaagctttgcttatgcatgaggtttccactgtgctttgtgattttcatactgcagaaatatgtgacctttaagcctgacagcactgctcagagtacatgtaacttatcagggagttttcattgatcaccccacctccttctcataaggaatgtagtgtttgtgtcacactgcctggaaaaactgcccaagggcaagggaaagcaccaattgagacatggaggagagaatgcagggttagtgaactcaccctttaaaagccacaacactagaatgtccctggtgaatacagatggaccaaaggagcatcctgaggccaagtggctctctggatccattcttgctctttctgaagagcctcacaagcatccacttgaagacactggcattcagcagtctttcttccgaaggccaaaagaataagaaaaaagccacagcatatttctgctgtagaaggagcatatcaccagcctgacagaggaagccctcccct

SEQ ID NO: 38731 - DNA, 604 bp, Homo sapiens
taccagactgtaagctgtttgagagcctgggacatgtccgactcttcttggtatcctatagtgtgtctagaaaagtgcttgcacatagtatgtgctaattaacatttataataaatgaacgaatgaagtataaatgttatccaggggcctgagttggccacatgcttgatgacatcttatgctaaaaatgcaaaccaggcaagatagcagtgttgtaagattggtttgagacctgccacctctactccaggcacacagcaatgagtgatatgtatgaaacaactatttaaaatagagagttcagaaacaaaaccaaaacttgtcttggatgaaaatgaagtcataattgaaagcagtgagccaggagtgaagctgcaggcctgcagagctccaggtacgcaagcaggcagaggcagctggaggccaacctttgcactacattggggctaaaagggttgcataccaggtgaaatgatgagccagtgtttcttttatataatgctgcataacaagccaccccaaagcttagtggtataaagcaacaaacattttattatgcccatagattctctagctcaggaattcagaaacggcaaagagatgg

SEQ ID NO: 38732 - DNA, 3061 bp, Homo sapiens
ttcactgcaggattgtttgtaataagataaatggagagaacctaagtgttcatcaaaacagagaatggatagatagattgttggggggggggggtttcatctatcagagcactatgttacagtgaaaatgaataaactagggctacccgcatcaacatgtataaacctgcagaacaaaatgttgatagaaaagaaaggaagttgcaaaatgaaatgtagagcataaatcaatttatggaaggctttaaaccaggctatatagtacatattattgaatatatatgcatatagtaatagtaaaagtgtaaaacatggataagaaaggtacactaagcctcaggatagtgattacctctggaaaaagaaagaaaaatgggatcatggtgggagacaaaatgggcttcagcagtatcagtgacattttatttcctaatataaaagatgtggaccaaacatgggaaaatattaacatctgttaaatctgaatgctgaagtacacagatcttacttacattagtcaggaggtttgatgagaaaagggttacaaagagccaaacagatagtttttggccctggaggaggaaaaattgtctgctacaaaacaccaggaggttttccactctgtctgcctaccctactcctgtcaatattttgaaactgctccagatatggatgcaaagaaaattagacaaaaagagattagtaagaatgagcaaactccattccatctaattctgatcacttgtgggctttgggtttaaatctcagacacacaaattattgcttgttctggtgacatgtttgcctgtttcatgagtcagcaaatcaagttactgggtcacagaatcaaggtgcctttgtgcaaagaggactgaggttaaagggagttatttcactcacctttttttttttcctttttaaattaaacttttatcagaacatctcagtctcttcttctcctaggggaaatgaaaaggactattatagaaagaaaataacacccaaattttgttagcaaacattaggaaaattttaaatcatggcgaggaaaaactgccagatggcctgaaagtaaataatactgtgcgtgtgggggttgggaggtaggatgacgactaagctctttgctttaaacatatgagtaaagcaaaagccagaaaaagaacattgatttttaagtaatataaggtttgatacttttttttagcagagttaaatttactgtcattttatttttactgtgttacttcattctaaaaatgttttgaaattgaaatgtacgcatatgaaaaagcatctgaaattgtacaagtataatgtaggctttctagctggtttttgctgtggatccatgggtggctgtattaatatgtattaatggtaaacagatgacaagtctttgaaatagccacttaattgaagaaaataggattgttggatgcaagaccacgaagaggctagcccgcatattttccaaaggcactcagcctgaaatgaatatccttgccaatttgcaacgttgcattcaacattaatctgaatggtttttctgtggaataagtttagagttattatctgcaattctgaagttgctttacagtggttattcataaaggaaaaatctccctttcctcttcttctccttcgtagttactcatgaaatagttctactttcaaagtaatcctgaatttttccacttctctgcatcttcatggccacccctctcccaccctccttcaagctaccctcaatgtgagggcaatggctccccttcaggtctcccagggccactctggcctcctctatgtgttctgcataccgcagcaagagtcatcctaaaatataaatctggtcctacaattcccctttgaaaaactccttccttcacttgcttcctattgcccttaaaatcctcactatggctgacaagattccacctccctgcttcagaccccaccccctctctctcctgatagccctgccactgcatggtttttatttttaatttaagttataatgcacttacagaaaaaagtcaaaagattctgcaaacttcgttatgcccccatctgaggaaatgtcatcccctcgcttctgtctccccaaaggctaccacttgcagctagtcagctgattcttggggattttgcccacacatctctaaataccatgttttgaaggccactttcatttttaagcttctcctgttgagtccttactgtggaagatgacaatgcatcctcctgcgttgctctcccacgttctcccctaacaaccccttccatgtgcctgtgtctccatatagtcacctgatcactgaggttcaaggaataccctgtgtttgcactattttgactaagcaaacatttttacagctgagccatgtagtatcaaaggttactcttctcttcctgaataacttttttgcccaaaagttaataattgtccttttctcccccactggcttgattttcttatcactaagttaaccttaaactctcctgcaggtgtgtacacatctcctccatactctcaaacaattaagtgcatgataatttttatcttcttaaatctcccttgcccagacttctatgtctgatgagcagctgtcatcctggggtctgtctttatcatcactttagtggaatttcaaaagaaaaccaagtggtgcgtgtgtcccatttgccatctttacccaaacttcctggctttctttccgatcttttctaatgtgcctcagggcctttacataggctttttcttccttaaatctcaccctggtctttgcccaatttcttctctttctttagacctgagcttaaaggtcactttttcaggggcaggtcctgatttcccaatccatcatccttgtaaatcacactttactctttcataatgtccttgtacttctccttggtagcacttatcacaagtcttagtgttgtgcagtaataacttgaaatattcactttgggtttttttccttccacaacttatccatgacctttccccaaatcagatgcatccatttactcaaggacaagtataatttttataaag

SEQ ID NO: 38733 - DNA, 1234 bp, Homo sapiens
aaaattataaataaagccgtattctcattctatagaatacagcgtaagacacacctctgcttgttagcctgagaaccaaccaggaattcatcttttggggcaagggcatacctggagttgagggattcccctcacagatattttcctgtctcttctgaagggccagtcttctcgggagttgaagtgagtggttgctaagtgtggagtcagcagtagactgggaacaggagggcagagggcctggcaagagcccatgggggtttcccggggtttccaaagaggcttccagttgggtgtccaccagatcacacccacagaaaccacttcttccctccagaaacttcccagacctcttaccaccacacaagggatttaagaactgaacaatcttttggggatgtccagtaaagggaatggtgaggcggctccaaaaggaaacaaagggagtgtttagctggttggtgagctcaggtatcagtcccagagagccgatttctctgctttgctttgtctgttagtactcattttgctttgcaaccagaaacacatttcagtttgaaattgtacccaggctgcaccctccctctccgacgttagggtgcacccactcttctcaggcccaatcaggcagcgatgtgccttgcatccagacaaggagtaaatatcattctggagccctcagtgaatatcattctggagtaatagcttcttcataataaggacttacaagtaactcattacctcctcaccagccaaaaatactcatttctccagggcacatctacaagacggtaagtaaatacgggaggaaagaagtgctttacaaggacatacgcattaatttcttttcatggaaaccggtttgacaaactgatagttctgccctgattcttcagtgggtgcattcctggttgattaactctcaaaacaaacaagatgttggcatgctaactagttgcccggtccccaaggtagaactaatttctctttctctctttattgcttggcatgcattgtacatctcttctggttataggtcttgtggtgtaattatttaggtacacatcttatcttcctcactatgttgtaagctccttgatctttgtgatgattcatctttacaccttgcacagcacttagtacagggcttccctttcagtaatcgctctataaatataagcaatgtaaagataatgtgtatttgccatgcaaaagccaattcatacatactgag

SEQ ID NO: 38734 - DNA, 709 bp, Homo sapiens
ttatttcagttgttcttcctatcaatctgtgaagcagatatttttattaccctttcactaaggataatactaccaggggaaactgtggatccaagaggttaaataatttgcctgagtatattagtcaaggatctccaaagaaactatatgcagtctgtcatatatctatatatctctcagagagagagagagaaagggagagaaatttattatgaggaactggctcatgctattaggaaagccagtcatgtaattcagtccaagtctaaagtcctgagaaccaaaataagccagtgatgtaaatctcagtccaagggcaggagaagaccaaagtcccagttcaaacaagaaggcaagaagcaaaaagtggaaattcctccttcctccacgttttgtgattggatgatgtccctctacattgaagagggcaacctattttactgggtccactaattcaaacgctaattttatccagaaacaccctcacagacacacccagaaatgtttaatctgggtactccatggccagtgaagttgacacataaaattcaccatcacactgaggtaaccgaatttattggaaattttattgaaaagtagaaactttaaaatcaggcctaaccctaaaacatcagccatcacactttgccaatctcgtatgttacctgcctagactcttcccaaggtctttagctaaaggaaatccttt

SEQ ID NO: 38735 - DNA, 673 bp, Homo sapiens
tttaggacacagaagcagtaactgatttggggaaaacgataaattagacttggccaaaaagaagggcactgtttattaggttgtaatcaggttataggagaaccaatagagatggtgccagaacagagctggtaacagcagagggcaaggagaggctaccacaacctagaaggagagacttttgcagcacacatggttgtgatcttcagaatgtgatctggtcaaggttgcgtcagccagcctgaggcaatccagtaggaagagagccagggaaataaacagtctaacagcattctcctccatctctcccatttctcaccaggtttctctcttggcagaatccaaccagaagccaaaggaaaggaagccggttgatatgattgcaggagacactgtagggaccccacacacatcaccttgacatttagagtctcatgttatatttgccaaaatcaccttttagcatttttattacatgattacataggaactgccaacaggttcattccagtagttcctatagacacatgttcagatccctgttgactcagcttcctagatccttcagtcttctcatgcttctcattgtaagtatagggattccagaaagcatactgtcttggacaggatatatacacggtgcctagtagactcccttctaagaaagctcttg

SEQ ID NO: 38736 - DNA, 3529 bp, Homo sapiens
aatgcctgaaacaatgaaaagataacctaatatttagctcctgtatagactgaaaaagttcagccaaagtgcattgtttgggtttcttctttccaacatgttttaccctcaggccagcaaggttatactttctcttctcaccccaagtcttcatcttttctggaaaatttccaagctgagccctggtctcaggtcataacaacttgatctgctgcaccagaacaccaagggagtgagtcatccctttggatttgcctcggcaggtcttcaacaagtctttgtttctctgcctatccatccctcaactgcttgacattggccagtgtccatgatgggtttttcttctagtttctgttgccttccatctttttactttttaaaaaattataatgataaagaagcgcacaaagttaaaagggcaggtttcacccctttcaccatcaccctaagggtcaaagggttaccagggtcaacagtgtgagtatccttcgagagacaggaatttccatcctccccgccctgcccccttgctgtttagagctcatactgtacacagtgttctgacttgctcttatcactcaaaaatatatcatggacactcttccatgtcaacacatacatagctccctcatttttaaacagctatttatttttctacagtgtagatgtgcccaaatagagaagtagatgaaccattcctctatttataaacgtggaatgtggtccaaatttttttggcccttacaaataatattacaatcggcatatctgtaaatatattttggcacacttaatatttctgtagatgagatcacttgtagtggaaaagtgtgattaaaggatacatgcatttttaatatctataggttctgcaaattactttccaaaaatgtttattaattcacactccagtcagctaagtatgaaagttcctatttcttatagatgcaaacacctgatagtaaaacatatttttgccaatctgacaaataacagatgctatcttgtttttatttatgctatgatcattgatgaagttgggtatgttttcatatgcttattagcacatagtccttcttttgagaattgtctattttctttgtccattttcttacccttttgctgcttctcgtttcatactgatttcaagaagttgtctatattacccatattaaccctttcctgttgtgtatacatgttgcatgtattttctccccttaggtaacattgtttatggtacccttcacttgatagaaatgttaaatttttatagtcttctctgtttaatttttttctgttatagcttgtgaaattttttcatgatatttctaattagtattataaagctcttataaggagcccttatagctcctacctacagtacttactaagaagcagccttcgattataaatattataaatattgtaaaagtctcctatattttcttttagtcttttatagttttttatgtttagattattaatccatctggaattttttctggaatatgagctaagacagtgtattagtcatgcttcattcaacagaaggattttttttttactcagataacaattgtgggtgttcagataacaactgtgggtgttcaacaagcagacacaggtatattaaatgtttatattaaatgttttaatatcaggtgtttgtgagtgtctataagaaatagtgacagggtgactcagagacccaggctccttccatcctagctctaccctcctcttgataaggggtcagcaaattacaacccataggccacatgcagcccactgcctgtttttgtaaataaagtattattggaacatagccatacttatttgtttacatagtgcctatggctgctttccataaaacagcagagttgagcagttttgatagagactatatgatccacaaagcctaaaatatttactatttggccctttatagaaaaagtttcctgacttctgctttgaagtctcagggtccttagtttccacatggcagatggggaagagagatcatgtgggaggctttccacggatgaggcctggaaggggagtacaacactttcgcctacattccattggccagaattcagtccctggcttcacctaacaatttgggaggctaggaaatgtgaatttattgtgcactgaggaggaaagggaataattagccatattctgccaaggtgttccctgcaattatctgtttctttcttccttcctatttttaaacagaataggctagattacggtgcagaaacaaccaaccatcaaatctcagttgcttagaacaaaaaaggcttatttcttgatcatactacatgtccactaatgctcagcagggatggcattgctcattgttgtcattcactccagtctgatgaagcagtcaccaccacgcaccttgatgttgcagcactaggaagaaaagaatgcggtgactgatgtcccaactcttaacttctgactcaaagttatactcatcacttccggccacctttcattggctgaagcaactcgcagggctatactatactttagtcaggtggggaagtacaatcttatcatgtgcttcaaaggcagcagagctggaatatttgtgaacagccctactggattgcacattaacaaacacagaacacatattcatccccttcctatgggagataacccagattccattcattcactgcacacaaagtccaagatcctagatggtagatgccctccccaataagtttgaatattgcctagtgatctggagtctagcaactaaaattcctctctgtccccactacttattcagatatcaaaatcctaacagagtcacaactgatcatggcctgaaacaggtttccagaatctgagctatatccacaaatgtgagccctgctctgaacgatcatgcctagagaatcaggagcctggtacaatctaggggtggcaagcgggaaatacggcattttgcaaaaatcaatactgcaagaaaagagtcatctttattgaaggacatggcattgtttctccaggcttacaattaagcaccctgaataaagagtgtaggtgacaatgtggaggaaagcagtacgcacagattaaaaatacctacacgtaaatgttaaaaaatataaacgaacatactttgttcatccctcagaaaacatctgctcttatggttcttgttttgtttgcttaagaaaagatcttcacatttctatttagtttagaaaatagtaaaatgcaattcaatctctgaattgtaatcacagagaatcattttgaacaatactgtcaaactagcattacacagatcaagatttcaaacaatgtaatttttcaaataaactttgaccatctggtgaaaacatcaacatatatcttattcatattttgtttcttcagacttttctatctccctataataataggaatataatgcatattttaaaaatcatttatgcctaattcagaaaaataatgctttgttagttatatgatgtgcaagaagcttttacatgtttca

SEQ ID NO: 38737 - DNA, 6433 bp, Homo sapiens
gcgcaggggtgtgatcctggctcactgcaaccttagcctacctggttcaggtaatcctcccacctcagcctcctgagtagctgggactacaggcgtgcaccaccatgcccggccaattattattattagtttttttgttttggagggatggagtttcactatgttgcccaggctggtcttgatctccagggctcaagagatttgcccacctcggtctccgaaagtgttgggattacaggtgtgagccactgggcccagccctcagtttatctgtaaaacaggacaaaagtagtacctacctgatggggttcttccaaggattaaatgagctagtacttataaagcacttgctaatgtctgttaaataaattatattatccacacaccaatccaaggcgactataaggtagcaagaaccactccaagtcacataagaaaatgaattcctttcgttttagctcctctctttatttcagcagtgcgttgtcaacagggccacattatgttagcagatttgaactttatccgaaaggtgtttgtattttatttcaaattatgaattcctgaacatcggattatgtacgattctgcagtgccctcggaggcccattagagtctggagctcgagaagcataacaaactctggtctgatatttgtaaggagcttgacagccaaggagccactcagaaacagttattggtattgccaaaaaaaaaaaaaaaaaaggaagctaagaagtcacccttctaaataaataaataaataaataaataaataaaaacctgaattggagagctgcctgcatttcactctactgcctctggaagaagagtgttatctaaagtgcttccatcatgaataatgattgagaaactgcttttactctcccgactactgtactcccaggcagaaacccacggctgaagcccacgatgcccatgtgtaacttggttattacacacacgtttggagcccagtgtgcagacccgcagcgcagaggaggcggcggaacaccccgggttggtcgggtttccaagggctgacccgagctccagcactttttccgcgcctgatttttcaggtcattttcgaatgggctatctttgcttacattttgagcttggatcctctccagaaagcattactaccttctaaaaggaaaaacatctcgtatttgcagacagtgctgagggagcaaagttcattttctcgggtaggagaagatgattctcttgcaacacgtgcggattgtgacaaaatctttcattaacaaggggagtttcggtgaagtggaggtttggggaaaggcgaggaagtcggtctggagcaagcaagcaaagtgcggaagctgtactgggattcttctagaaagtggggtgggaaaggagctagggagggcgtgtggagggacgagatctgtgtcagaacgtgcgtgtgagcggatacaaaacccgagagaggcgtgagcagcgctgtgtttgcgagcgggagcgaggggcgccggctggggtgtgtgctcctggtgagtgacaccgaggggaaggcgggcgggtcggcgggcgggggcagcctgcgaggggcgggagtgtccctgcgtggggcggccgagccggagttgtgtcagtgaaggaatccagtccgggggccgagctggctgcgccctccgctgcaagcgccggcagcgcggggcgagctccggacggcgcgcggcccaggcagcggctcccgctcggcccgccctccgagccgcaggggccgccaccgccgcggcgcctcccctggcgaccgcgcccccgggccccggctccggcccgggacggaggagccggcgctcgacacagaggtaagcccaggaccccctccacgccgggccggctggggatgcagggcgcgggcggacgcggaggggcctgcgcggccgggacggagactcggctgggccgagcattccgcagcccgggccgcccagcctccgccgcctcccggagcgctgggtgtggcccgcgctcggcgccgaggcgggctggtggcgcggaccggacgcgaaggtcgccgtccttcctttctccagccggcgcgggcaagcgggaggaggcgccggctgggacgcacagtggcgctccccgggcgagcgtgtggccgccgcgctccgacgtgtacccgcccgccccggatctgaatcgcccgcggccgccgtccctcgcctgccgtcctcccgcgcgggcgcccccgttccctcccaagccggaaagagacccaccgtcccccaggctgctctctggcccggagccgcaaagcccacgtcagccgcgaccaccccgccctcggatcccagccgggtgcgggggccgcggccccactgaaccccgcgcccctggcgcccagcgggagtgggatgcgttggcgtccgcgctgcgcgggtgggctggggtggccggagcagacgcggagcgccctggccgcgggacgaagcggtcgcgccgccgcatttgggcggggggaccccggagtccgcgggctgcggaccccagcgggagacggggttgtcgtaggatgcgctcgcgctggacgccggcgcactctgaatatcatgctgccgcacacgcggggctgaagggccgagtcttcacctgcgcggggatgcggcggaagcgtcgcgtcttcgcgagtggaggtttcgtgttcccgcggggttggtgtgtttttgaacttcacgagcttctcatcccccccgcaatcctggttttagcagatgtcggggttttggagacctgacacttttcgtgaaagattctttctgtacgttttcttttggctatattacagggtttgtagcttgagaactagtgaaaacccttgaacttcaaacacagtctcattgcttattttttgaaatttaaatattaaaatatgtaccagccccctcacaagccgacagactttaagacaaacgactgtgaaattttagaacctgtgcagagaaagtggttttataccagtacttgaaatagtaaggtcgtgtaacctttttaacatcgttttagtttgtcttaaaggaaggtttcagcaccactttgactggtactgttttccagagtttaagcagatgtatgtaatatagcagggaagaggacaggaagtcagaaatctcttcactctgaaaaaaaaaaaagacttcaaataatacaaccaataccctgaaaatagagtggccgtctggataaagtatttgataggccttatgaaattgtgttgcttaaccagaaagcaatgtgttgttagatagggcagttttatctagtaactgtcgtgtttaaaaatatctgtgtatgatattctttgttgaattttaactggggaaaaatcaactttgggaatgggtttctatttggacaaggcaaatactgcagtttctaattagagttttggaataagctcaagctgtgttaaaacctattgtatggagcagcagaacagaaaacatgtcaaatctgtatctgtgtggcagaaaacatgtcaaattctgtatctgtgtggctttaaatacacacacacacacacacagacacacaaactagagactagccccaaaagataatttgcataaaaatacaatcacttgaatgcagagaatagctaaagacgttagtaaaaactgaacatctgggaaaagactgtattaattggcaattttctttctttaatccctgaaaatattaaatgattttctaagaatcaacttagtttaatgtgctcatttagacaggcaaaatgatcaagactccttttgtattcattttgttttagggagccccctaatgaaagtcttcagtaaatagtttttctgcatgcactgattttcctgaggccattgtggagagagttatctgtgggcttgagaagctgctctgccacaccagtaaggatcagggaaagaaaatacttaggccacaccgttgcagtctttgattgcatgccagtctgaagcattttatggacccgttttgccatgtaagtggtaagcttttacatcagaagttaagctttagaaatatctcactttggggcctaatttttgtgagtttctcagtctgcgatcagagttgtgttatcaatcacagtgaatgttcgtgaatggttgtgtgttgaaagggcataggtggtcttcattctattactttacacagttttaatcagcattttctgaggtgagccaggacaagaacttctggttacagtttggataggatggaaaaagttgtggttgctcttcgtaagatctaagctgctactacctgtcccactgtatgacaagagtggaatgcattttatgtgcacttgacaggtactgcttagtcactgcttcatagtacttctttcctagccatcttctgtagcacttttactgtcatttgactgtgataattaaatcatatgttttttataatttctgtgcacagaagagtagattttacaagcatgacacaggacatgagagtaggtgtctcatatggacagatttaagtgattgggtctgtttattgatctctgaatgttgtgcaacattcaactaatccatttcatcactgttttgccttaaagtgtaatcacacaattaaaataagattttcatgttacaaacagttaaaaacccagtaaacataattatagaagaaaaacaaacctttcttttttcttcccttttttgaagtagtcttgctatgaaggtgttatgtctttgacacatcaaaatggctaatttggagttgtgatgcttgttatgtaaataggccatatgttgaatttctgcagaagcttattccttcagtgttgtggtaatgggtaggatcccctaagtaccatagctgagaaaaatagtcttatgaagatatatttctctctacaacttatgtaattttttattatttttgataatagctagtgtttttattttctgataaaaaaattttaaatgtgatgttatccttccttgcatcatacaaatctttgtctctagtactgatccaaactccattcctatttatctacttccttaattaatagactttttatggtggatggcctgctgtcaagctaaagactacatgcttgataacaaactttttgtattctctctaaacttcttccttttatgatgaaaagactttcctttcttgatccgtttagcattctcttcatcacccagactggagatgtaggaaccattgctgactcttcgctctctcactgcctctgtgaaactgtgttatcaagtcctgttaactcttcctttttaatggtttctctgagccacccctgcatttcgttttcattcttcactctccctgatcggatgggaggccgtcagccatcaccgtttctaggataattatagtctacatcttggtctctctgtaattgagttttccccattctacgcacttccaccgtatcaaccttcctaaaactcttccctcaaaactcttcaaggattgtttcacaggaacaatactttagcattgtttagtattgcaccagagtgcaaatactttccatggcctcccccattgcccagcctctcaacttggtttcagtgtacctcacagtcttgccccaaattaacttaccaatgttattttctacttctttccaacatgaaccttctgttcctactagttggatctcactgcccttctaagatgacatgctcattttcatgtgtccttttttgttcatgccctgccttttagaatgtgtctcttctttttttctctgacctaaccacattcttcaagttcaagtcagcctgccctgatcatgttactctcattggttctttctgcccttttgtttgcatcgttcctctagaccatcacatcctttcttacgctgttacatgcttctttctttctttctcaactagatagtaaggcactgatgtgccttttattctgtctaccggccctggccgtaagaagcacttgataaatacaccgataaaatgaataaatgtaaggatgattttttttaaatcatgggctttgatactgactctgaactgctcaccattgggtcctcagagcctaactcatagcctgacacatagtcatgacctcaataaatatttgttaacttagaaattcatgttgacattggataaaagggacaggcatttgaaggaggcgtctgtcaagatttttttttcccatttttcttcagtagttctaatcagcttctccattcatcaactgtgagaattctgaggactcggcatttcccagagttgggataatgatggagtctggcagttgtgagttggaattaagaagcttgtagttattttaaggtggagtgatgggccccagtactgagcaaaaaaagcattgaggctttatgccagtattttatacgtcaaacaattaggctaaagtt

SEQ ID NO: 38738 - DNA, 2726 bp, Homo sapiens
agttgccatttgaaccagccaggaacgaggagtttggtcaacattttatgaagccaaataatgctaatgacagtagtctgcagtgctccggaccctaagcccatttcgatttggacttcatgttatttgtgattggaccaatactccatcaagcacaggtggacacagatatttgtaaaacctcttccccagtggtgcactgaaacctgcctccctgcagcttccctgttggtcttccatccgccctttgaatgccacagaataaatatgcaccttctgtgtggtcgctcttcaaatatttgaccatagctattgtatctcctcctcgaagtcttctcctttcagggttatgcagtgctagttctcttaactgatagttctcatcctgttaacattcctctaggcacccactactctatcaatgccatcttaaaaatagtgcatctggccggatgttatggctcacgcctgtaatcccagcattttgaaggccgaggtgggcgtatcacttgaggtcaggagtttgagaccagcctggccaacatggcaaaaccccgtatctactaaaaatacaaaaattagctgagcatggtggcgtatgcctgtaatcccagctactcaggaggctgaggcaggaaaattgcttgaaccccaaaggtggaggttgcagtgagccaagattgcgccactgcactccagcctaggtgacagagcgagaccccacctcaaaaaaaaaaaaaaaaaaaaaaaagcatcttgaatgcaacagcctactcctgactgagtattctgaacagtagaaaacaccaggctgctattcactcccttgatcagggcactcttttattaatctagtcaaatattgtgtgggcctcacatgtaaatcaggaacagcacattgtttgttcacatacgaagctaaagaaaacttccaagccttttttcctaacaactgctacaaagccaggtctcctttgttctttacttgagcagtgaatcatgtgtgcctacttagaggactttacatacatttatccttctacattttgtctctttttgttaaattatttttcctctttatcaagacagctttgaattctaaaatttttaaattcgatatattaatgatgttagactcttacttatttatcaattgcacacttggaaatgttactttgtcgttgataaaatgttgaccaagacaggccaaagatagggccctgtgacattctgcaagagaattattaacatcagtatgtgaattttttttttaaactagcttgacagtctttcacttgtttactttgttatccaagagcatagagtcagggaaagacttagtcaaatgctttagtaatgagatcattattggtctacttattgccacacagtagaactctatgataaagaataagattcatgagagtaatttttagattgcattaatttttcttctgaaaaatttcttgaaaaagcatatctaagtcaccttatttttaatgtatctaagagaaaataattttgtaaaataaaatcaaacttcacctatcatttcaactcatgaacttgtttggttcaaaggaattgctatgtaatacatcattctattctctttacagaatcattactcttaaagagaattggtggggtgacaggaaattactccataggtgtcactccagcacatcatgatattctcatctcctgggacagagtcgtcaggctgaggcatgtcctaacagtgtgccagcctgtgtagatggctccatgacagtatcagtaacgtgaccatgacagagagagctctgatggcattgtgtcactaatggatgtgttttcactaagctgaaaattctgtattatttgaaaagaggtttatttttcttcccacacaaattatttgactctcatattaatgtcaaatagctgtcaagtaacacatatggtgctttctgtgctatattttattgtactcatgtacaaaatagtttttttaaaaacatgttctctgccttggactagatagaaaaaataatttaaaagaatagtattcttaagaaacacaaatctataatatatcaaggaataaatgagtgcttcataaaaatactagtatttgtgtctatatttttcagagtactttcatgcattttcttttttgaaaaaaaatctgatgttaaaaataatacatactctttgaatttggaagctactgaaatggataaaaaattaaaagtcagctcaaattccacctctcagagattgtcactgttagcatttggtgtttccctttcagatgtgcatttgtgtgaggttgtgagtgtgtgtgcatgtgtatatttgtgtgttttaaactagctcttggtggacccaggacgtttgtacagaagaatcagcatgacatagtcggtaaagagctttggaatcaggcacttggagatttcagctctggctatacaacttacgtagtgactatgaattccttaaactctctaaaccttaatttctacttctataaaatgaggataataatactatatacctagtaagtttattgtaaaaattaataagataatgcagataaagtacatagcatggttcttggaccatagcatatgctcagcaaatgtgaactatttttattatgcaggttttcttttctgctttcttcacttaaattatagggtaaaaatttccttgtcataaaatattatttgaaaaatatt

SEQ ID NO: 38739 - DNA, 944 bp, Homo sapiens
ctgttacgcccatttttcagatgacagagctctgaggggagataagtcattcgctcaaggtcacagagagatagtggtggtagagatggtgtttgaagccagcgtcagatttcaaagcttatgctttttccattctggcatgtagttcatgcctatctttttgaggcttgcagaatgaatagttagcattgtgccttctacaaaatgtcacttggtgccacatgaaagataggatacttggctggaatgcttgacttactcaatatagtacctcttgcgtgtgtgtattcttatatgttttggaatcaagcctcattaaaataaggtgttaactaaaggaaatgaagcattgatatgattatttgatgaaaggaaacctcaaggaagaaaatattcattgagttgataatatgaaactcttctttgttttagttgtacggactaagccagaatcacttatctccccaggaatcagggtatttcacataagtcagtttaggaattaagcaataacaacagccaaagtaaattgatgctgtcaaaggaattgtatgtttcattacttgtatatcaggggttgaatgtaaaaaaatacctctttagcctttgctgtaagctgatacatcaggaaagagctgtaataattgctataggtataagtataggtatacgagagacaaagtatactaggataagccctcaaagaattatttggtgaactgacaagttgtctttaaaaagtcagccattcggaacatttctcttggcagctctcaaatctgacttacagtgtgtactgtggcagccaattttgtaggaaaaatgcataattaatgtgaagatcaaggtacaggtattgccagtcagtacctaacacacagtttcttagaacaaaggagcaattgaagttgtcttttgatagggtaatcctgatttgtcatttt

SEQ ID NO: 38740 - DNA, 691 bp, Homo sapiens
tggcagggggccttagcctctgttcctgaaggctcttttcctcctgctcccttggagagggaagcattattaatttttccccttcccttttgattataggaaaaatcaggtagacagtaactcagtgccagcacacctgaattcagggttcagctctgcagacaattgctttcttgttccttagcctcatgggctggtgaacagcgaaggtgaaggggtaatgaattcctctaggtgctgataagagctacattccaagaggattaacagcacaaaaacctgcatgtatgagggaaaaaaatgagaaagcaggggaggggaacacccacattgacacacatgcacagccacacagtgaactttctagtgttctcaaagccacattccaattttagctgcccaaagtctgaactactctgacaacagcatctacatgttgtacatggcatgtactttctttaaaaggtttgggaacattcttgctgtggttctgagaaaggatactctggtagcagaatgacatctggcctctatcaaggacttccttgatcaaaacacagaaaaattttcaaaaataccttgattttagacttttcaacctagaggagcaaagaagaggagatgaaaaagtccatgtaatctgttaaccacatctgagaacagttctggaaatggaaatttggctccattt

SEQ ID NO: 38741 - DNA, 886 bp, Homo sapiens
ctgcaaagtcgtaatattattgaaaagatatacctgagaggataaaacatcagtattctaagtaaactcactacaaataaattttagtctgtatttcgttaaacattttcttgccctgtacagaatttcttttatctttgggcaaaaactgtgtttagcttagcttataggctaattaacattaagttgggtttttttcccccactctctctttcttcattactttcatgccttcttgcttattttgcaatcatgatgatctctgacctgcttactcagcaaagcccacttccaggtcagggccatgacctcgtgtggacagaacacagtcttctagcaacacaccaggaaacagcaaagacaaatggatttgttgtttctgtgaacacaagttattctgtactcaaatcgtagtcagtgaaaatgatctgatgactcaaaatcttggtacagaagcctagatgaaaatctatacttttcaagaaaataagagtatgtctttatttcatatggaaaataaattatgtggtttgtttgcgtgcagcgtttgcatttgatcatagattacctaaattactttctaaaaagtagattgaaaaagttaagaaaggaatgcccatatttacatatcccagtattgaaagtgaattccaatttttatgctacatatggagtaaatgaatgtgtgaatgaaagttcagatcctaaaagttattgatcatgttgatgatcaactgaatcacattgtaaatttagctgcattctttaaaaatgttacttattttcagattcagataaatggttcctaactggtaagtgataagagttgtagtttataaacaatgtagtattttgtctcatggttctgatttttaaattactatac

SEQ ID NO: 38742 - DNA, 1234 bp, Homo sapiens
tctagaggggtcgcattctgtctagtcaagtatcattcgaaagcttggaacaaaaaatgaaaccaagacttaaagactggctggtagccattcagaaatagatacaaatgtagattaagttttgaagacatttttcttttctaatacctcctcgcatttttaagagaagcatttagtaaaacaaacaagagtgtcttttcagtgtctggttatctctttttccagactgagtttggtaaattatgtaatatttggtgttagtcatctcacaggatgtaaaatcaggtaaaaataaaaccaaaaggaatcttaaatataatttatgagttactttcctagaggtaagtgtaactcgcctatataattttatttttttggagtcctttaatatttgttagattaaagcatatatttttacaaaactgaaagtactgaaagtcagcttgcaccaatttgaagttattttaaaagatcctgttttcaattcagtatttcaagaataatagagaaaatgcataaggtctagattcagaaccatgtaaccaaaaatgacagtggggtgggagggagaattgggctgggataggatgagaaggaactttcccatttactaaaagaaaaatgaaacaaggatattacctctagctgcattacgaacagaacaaatgtaaaccacaccatatagacaccttctcaaatactgccttctgatgtcatctcattgcttactgcctgctaatcttatctccctgcaggagccaatcttaaatttatactgcatcataattaactaaatacattgcatctagcagagacaaatcgtggcctcccagtaaatatttattaactgacttttgtgtgctaagcaggtaggttttatttctggctttacacattagtcactgtttctgcaagcgaagtttcactttcgctcttcctcatacctgcagtgccattccgatcattgccagtattgcctcaaagtagtgcaaaagagcactccctctctgaagccctctttgattaagctcacctaaactaaagccatctcatccctccagaagccactttatgtacatggttgtagtcatttcagaatgatttgttgaccattttgttacattcttatttctcttggttttgatccccctgtgcatggcaatatacacccccaccaagaataggcattgggtctcagttgtcacagggacacacacacacaggcaccctctac

SEQ ID NO: 38743 - DNA, 2884 bp, Homo sapiens
taaaaattcattgcaagcaagacaggaagaataaaatgagaggacatttattcctttctttccatgtgtcttcattgaacacttagcttgtcaaaggcattgtatttggaactttggaagagagaaaggcaaagtggaatttatcagaagcagtctttttaaaaggaaggaattctttttgtaacgtattaaatctgttaaagtcatgtatatttgaagcactttaaaactatttattaatttcccattacagcatatttcaggtgacaaatttctattttgtattacagctggaaatggaaagttcactaagatagtaaatatgaccccctagaatcctgagcatataataaatgatcaaaatgagtttttattatctgtgactgcattagaataaactaaagggaattaaaatcatatgaattctttcttttattcatgttgatacaattacctgaaatcatgtatggaaagaggtttagtaatttttagattgttcccttattagctccaaggctttatttgaactttgctctttctatgttatgactgtttgttgtcctttgaagacaagtaccttaagctgtgaatttggtcacgaaagcactgagcacatctgatagctacaaggcaggaaatcgtgacctgacattggtttccgatccattctatgcagaagtggtattgtagtaatggatttgcttctgccagtgcagctgttttaaaagcatggaacacaaatgaccctgtggacacagacagagccctgagagttcgtatttccttagcagggctgcagtcaggcccctagcttcgggccgccaccctctcctctctggagtcaccccacctctcccatcaggtgacagtatgagttggaaaagggacgggtgtagccacaccaggacaacttgtggtcagaaggtcaggtttcaagggccggctccgttactggctggatgcatgttggtaacctcataatccttagattctcacctgtaaaatgaggacagtgggaaagctaccacatgagctatgagagcatctatttatattcttttatagcacttttatagcacttgctgtgtgccaggcactgttgtaatcactttacaaacatgaactcatttcatccttcttaccacgctatgccgtagttactattattatccctattttactgatgaggaaacacggcctagatcaaagtacttgcccaaatcccaaaactagtaagaggtagagctgggattcaatcttggtgaatcgtaattgcttgttttcggtcataagaacataaggaagaatctgtattgcagaaaataggcagtgtttactctgcgagattacttaagggcccaagatcctgtgcttggtgacagaggcacagggctggtggtagcagctttctaggccaactgcttgtgtgtggtcagctagatgggctctgatggtggggcctgatctgagagggaagtgagcctttctaagaacatgtagaatgtatgtgttagatttctaaaactcaaaccagtgaacaggtaacatatataggactaatgtgtgtgtagatggagcaggtctgacaggtaagaaaaccctctccactctgccccaaatgtactctatcacatgcttctcaccctggctttttgccgttaaactgaataaagatcaggcaagaacttcacttccttgtgtgagcacatgccccttaataaaatgtatacccctagacatggtttttacattttccatttaatgcaaaattagctaacagatgttttcaattaggtgtagaaccaggaactggtttcagggtgcagtgtaagaatgtgtactaattgattgatatgcctgtcctggtgtcgcctggaagataagaagcccttagcagacaatcatgcccagaaactgacctttggaatgatgactacagtcccagcctataccttctcagcctcaggggcagtgagtgtaaaggttgcaagttcagtcttagagctataccttccctaagataagaaggatgaagagctggcattcactaacaggaccctgaaggcaaaaacactgggcagtttcacaaaaagggaacaagtagtctctctgaaggtgagtctttctgttgctcaggtgaccaaggccaccaaccccctgctgattactcagccacgcccaagatcctgctactaccctggtttctggctccacattcgtcactattgagatgacttactggtcacagtaaaagcaagttgataaaggtggccagtgggggaacagagcttatgtgcctcctgagaaagccagtcgctggaaactggactgagagccctgatttggagcacgaggaaaccttaaaaagtgagttgaggttgcatttgctgggaagccataggaagaacagtaatggggtgggaaagggggctggctgcctgggggtactctccaactggaagtccaagccctgccttcactccccagtatttctttcccaccaagtgccagtgcgtttaaggcagtacatcatatactgtttttgttccgccagtgccagtgacatttcaaggaactaggaagaaaactgactttctctgccactttgagaaaattattaaatgtttactaggagtgttctgactcaatgaactaggatactgtgagtttgttggaacagagatttttgaaaccagaatgtgctgtgaagagatgatgggttccttttccacatttttattccatgacaaccgagccagcttcccagagttagctataaacacagagcttttgtttgccaggtttagttaggggttctttttgctggttcagagttatattgcagaaccacaatccatgttttctttggacgtgaatatgcagt

SEQ ID NO: 38744 - DNA, 2934 bp, Homo sapiens
atctggaaggtatatttttttaaaaggtaatagttggtgggatagggaaagacatctccttataaggagggaggaagagaagtgtaggcctttgtttctcaaagtgtggtccattgcattcatttccagttgctgctgtaacaaactgccacaacttcagcagcttaaaacaacacacattgattatcttctagttctggaggtcagaagtccgaatgggtctcattgggctgaactcaaggtactggttctggagccctggggagaatactcttccttgcattttctagctgttagaagctgcctgcattccttggttcgtggccccctttcatcttcaaacccggagaggctggccaagcctttctctcattgcatcactgtcccattgactctcttccatctccatcaaattataaggacccttgtgattatactggacccactgagataatccgggatgatctccccatttgaaggtcagctaattagcaacctcaattccatctgcaaattcagtttgccatgtaacctaacatgttaacaggttccaggggataaggccatggacgtctttgaggggccattattctgcccaccacatccctggacaagcagcatttacatcagctgggagctgattagaaatgtagaattcaggacccaccccaagcctctgaatcagaatcttcatcccaatcagatccccaggtgatcagaatatattttaaagtttgagaagccacaactagaatgtttctaagatcctctccacttttacttcccataattctataaaaactgcatttttttccatcttcaaatctgcattattctttctcttcctggtttcctgccaaaaaaaaaaaaagttagttttgatttgtacccctggtgttaattccccaaaagtcagccaagtagaacatgacagcacctcatgcatattttttgctggcaggaagtagatgttagaaaaggcaattaaattatggaattatccatgatgtgaaggtactggtctgcaaagagtattttcttccccaagaaaattcataggaaaactacctccattactgtgtagataatattagtggcccagcaagtgaagcaaagcatacacagatgagctgtttttaaggcatctctgaatggctcagcatttgagaaatgtgaccaaagctgattataaaactcctttcaaagttgcaggaacggcaaacccataaataactccagttcccattggtgtgaggaggaggttgctggctgcttgattgctgtccttatcataggggataaggttaagctcacctccaagattgcaagcttctcaaggaaagagccagccatatgctctgcctggcacccaggaggcactccatacattttgggcttgaatccattaagctttttaatagtgtgtaatacttaattcttaattagagatgcacttaaaaatggataaataaaactagaatatgtcagtaaccatcttactagactccctgcttccttttactcattcagtgagtcatcccttttacaaacatttatgaatcatctactgaatgccacccattgttctagaccctgtggatataaagatatgctccctgtcagtagagcaggaagtcacataagtaaataatggtggcaatgtcaatgctggaagaagtgtgtgagcaaaggtctcaggcctctcttctcccagctgtcatgtacattctaatgggacttatatttaaaatcttccttttctcacctttgccaatcgggattatttagctttattatttttatttccagccccggctattaatgttgcctccaggcacaccatacttgctctagaaaatgaaaccctctcaaactagcacaagtttaaaaaaaaaaaaaaaaaagaggttattattataaaggtctggcagcgtctcatgagacttcaggaaaagttaaaggagcaggaaggagagaaagtgaggcagttgcaagtccagcctctcttcatctgcactccagcttctctccctttgtgttgaatagctcagaccttcaaggcagagggtctaattgtttcactttgtcttttctagccaggccacttcctgaccactgtaattcattgtcactgtgttctgattgcttccttcatagcactcacttagcacaagttgcagtgatatattttaatttctgtgtttatatccgtttccctctctagttttggcagtgaccatatctgttttgttactgctgtatccagcctctagtgcagtgcctgatcatagtagacatttagtaaataattaaatgaaagaagaagagggggtaaaaccatgttaaccaccctaaagatagactttctcattgtaccagttacaccatagagaagggaaaagtggggacagagtcttgggtccactgaccccttagcaagtctgtggaggtaggaggttctctaagaagaagggtagacaaggtagtctcccccaaatacgtcttgaccaacattcaagccacatggtctttccacttcaaagccacacctggaaggaccccttaatgcaaatgctcccacttttttctttttaaaatctattgagtagctaatatatgccaaattctatatgaaacactttacaggcatcatccctttccatttttacataggctctagaagataatatcctcattttacagctacagaaccaagtttcaaaaatttaagtggttcacccaaggtcatagagctagcatgtagcagaagcaagattagaacataggtctgtctaactccagcgctccttccatgacatttggctctctataaagtactcacccttactcagcaaagttaattccttctctgtagcaccacagtaccctgttcataaggacagtacaacacttactacctacttttattgtaga

SEQ ID NO: 38745 - DNA, 1726 bp, Homo sapiens
tctgtctgctaagctgagccttggaaggatagacaggcagttactgtgctttttcatatttttaaaactccacaaaataccatgagtaccttattctacagaattaaaattgtaagaatgtaaaaatctcataaatattcctccagtctctgttattgaaatttaaagaacatatatatgttctccctacccatattatgcttaatgacatcaatcaagtgagacctgcccactgttatcatgagtggtagatgcagagtgctgggatggtccacacaagatggtggagtcttcctttgactcagagcagccgcctggtgtagctataagttggcattctctcactcaacaaatatgtattaaatacctactacatgcaccgtattagtcgcttgtgaatgggcatggtgattatccaaaaatggccaagatgaggattctgccctcacgttgcctaccatctgggagacacgacacacacacaaatactggagctataaaggaaaaggggctaagacacttgctgaccaagggctgcaggagttgaggcaaaggtgacctctggcagggggtatggagaaggatttcatggaacacatggcatttcacctggaatgtgcaattcagacatatcttggaaaagcccggcctgggggtgggggttcaaaactgggcatggggagcttgtctgtgaaggggtaaagtcagagacatttagaaagcaagttggagcccaattgttgctggcgttgaatgccaggttgcagataatgaactttattcttaagttcttaaggaagagggtaaaatggtcacgaatatactccaggaagagcagctgcctgggactgaattgcaggggagagactggaagcagagagaacagttattttatgtttatttgataatgccgggtctttgctgatcacacagctgtgtgggtggattgaaaactttggtcagagccactttggaaactcagacatagtttaagtgactcatcaggaagccaagaagaatttctaagggtcatcacagacaggctcaaaagatgcacagtatgaatgaggaaatctgttaacggctcttaaccagacagctcaggtgcagagaaggcaagttagtttgggaaactgaaaccaaacaacgtccatgaaagtcacactgcctcactgcccagttagtgcaagcaaaaggccagcagggcgggcctgaggcgccatggggcagagcctgcggagtcagatagggaagccccagagagaggagaggatcatgactaaaacactcaagagggggcatcaaaacatcatgctgtttctagatagcacatggactttgccaaaccagagtgaaattagcagaagcaaaatacgggaacataattttgggaaggtaaagcagttgctaaatgaaccgctaactagccatcttgactgtcacccaacagcggccgcctggtgggaccactttgtttatggcatgagagtcctttagcggggcagtcaagtgcagcttcaaacggtggcttaggtgttagcctgggctgtggcaatgaagtaaaaggctgtgtgaagctgcgccagaaacagcctctgcaaaacagccgctgcgggcgtgaattttatgagttctccgtatgcaaactactattagtcacgcattgattgatccattccttccaggagcatccgtcctcagaagcttggtttccaactgcaaaggc

SEQ ID NO: 38746 - DNA, 917 bp, Homo sapiens
aaggaggactcagagctgattagatgaagagaagcaaggttaagcagaagagttgtcttcaaggtagagggaagggcttgtttcaagcccctgtggcaaggagaaagccaggcttgctcctcctgggatgtcaggaagcttagatgagatcattccaggaaggcactggcactctacctaatgtgcctggcccaccatctgcactcagaaagtgatcagctcacatttcgaggcaactgagggctgatatgtgtctgcagaggtgtacctcgaaagcaagtgtgtgaccttgcagcttccacagtaggaatgtggttgatgatactgtctctgattcttctgtgactcatcaactccctaatgtcattcctctccaagggactcgctcctccctccatatctggtaactccataccagggctttgccaagtgccctctgtcctatccagcctgcagagttgtcaagccacacttgaccacccatacgtgtctgtctctgtcctggtacctctaagaagattccacagaacatggaaatggcaccgatgaaattactcccaaaactggatgtgacacacccagacaccccaggctttgtgggcatttagaaggatttaggcatggtctttcctctctgaccttcttttagtctggcactcgcttgatgtaaggctggctcctcactgtctgacagcctgccaaaggacaggctggctttactacttcctccacatccacttcccaccattattcttcccttgacaagcctactgcctggaaagcaaaactcaaggaactctcaggtctacacattgagattctcaagggcaggccgggtttatctgccctgggctggcccctgatcttggtttgcatcagttcatcagctccaagctgggtcctgagtcagcagagat

SEQ ID NO: 38747 - DNA, 765 bp, Homo sapiens
tttcagacctcctttagtcaggcatctaaataattgtaagcaacattttagaatcctgaaatacagcaagctttgttaaatgaaactaatgtgatccagggtgaagctatggactatttaggtagttaaacaatctctttgattgtgaaattattttattcttatgaaatttgttgacatcttcagtaacagtagattatatacacaacttgggattttccctacttctcaagtatagcttacttcagtttcatgtcctaatgataaaaatgctaacaaccaacacagacacaaatgatcctcttgaaccaaaatggaaagtcactagcacatcatcactttcttagaggtcaagaaaagacctcaggtttcatgtacttatttttccttcttgagacatgatagtctttgatgccaagacctgtggaatttggagcatctctggagagcatcccattttaaaaacttactcaatcagtaaacacacgcgcttccttgtgtccaggataaacagcaaacagacaaatgtagagcctgcactcaccaagctttcaggctagctgaaactgctagattggttgacagagttcacctaacttgagtaattggtatggcaggtcctggtttttgaactaacctcagccctggggaagcccatttgcatgcttttgaggcaggcagaactgagttcaagtccaacctccatctctaactggctgtgtgtccctgaaccatgttgttgacttctcaaagtctaatattcct

SEQ ID NO: 38748 - DNA, 873 bp, Homo sapiens
ttactgaggcagcagtgttggaggtgcagctcgtaacactgagcactttattattgcagttacacatccaaagaacaactattcctcaagaactccctgcagctccctgctgcctctgctgaatgcgcacgcagcaacctctgggaaacagagtaacttttcccgaaaatcatccactcacaataagccctctgaaggcaaagcggcaaaccccaaaatggtgagcagtctccccagcaccgccgacccctctcaccagaccatgccggccaacaagcaggtaagccgacactggtgcagggtgccagaggaaaaaaaaaaaaaaacctgtttccagaggaagaaaacagcaactactagattctgggcctcctggggtcacactcaggctcccgccacctgccctcacccactccccacccagcagcactgcccagctggcctcttgggaactcccctggtcgctctcatccatgcctgccaggtgctttcccatgtggaggaagtggcctgcatgcactcttgaccacgtgagcagagtccaccccagtgacacagttcttctcatggctaggactgccaccatccctggggccccgaaaccagcccacacgtggaagggacccacagagactctggaacaagactcggaacctactaaactactaatgagaggaaatctggcatttgttttttaagatattttaatccccatttatgtttagctgatcaataagaggctaaagttagtgcagtcttctcttctcttgggatttcagtaaggagaatacatttcaaaatggcattcttcattcttatctattatgatgtctaaagacacaagtgtccaaagaaccatcttccttctctcct

SEQ ID NO: 38749 - DNA, 1837 bp, Homo sapiens
tcaggtgatccacctgctttggcctccgaaactgccggaattacaggcatgagccaccgtacccggccagctcccatctcttaattatcttagctctcctttcctccttgggttgacattgcattcagaattgtggcaaagggccaccatgctcttaagactcaagtctattttccacactgtccagaggagagaagttatcctagtagcttctacacagagcaagtgtctttctcagaaatcccagcaaaggtcttgcataccattgctggtaggcctgtctcttaaaccaatcatgaaaggggggagagaagtgaatgggatgaactaatttgcatagactaattagagcccacccctggagcctgggtgtggccatcttcccagagttcctgagctagatggagaaggggtacttctcagaaagggaaaatggatacccaatggcccaaacccaaaatagccccagttcccctaactttgactacagggcagtccagtttgggtgccgcttccgttgcactcacatgtcctacatatctgttgactactcacaagtgcaaatgcttattctcaactcaacattaacattttttctggcaacccaggttcactggttctcttccacagagcggccctgagcagctgagcctgcaagccacgcaagcatctgtttcttcttttgccaagtacaggaggatgtttgctctctctgtagagagctttctgaggtctctgggtgtacccagagatttaatagaaattcttaacgttaagtcacattccaggaaggaaggaagagttgttcgttcaaataagaaagataaatgttcggcactgtaggccctgtttaccccatctgaggccctgaattcatatattacaagacggaaggattttgcacagttttttatgtagcaagattttgctcaccactgaaaaatgtcagtgtaaatgtgaccgctttaaagatgagtcaagtaattcttggaacagggaaaaaaatgaatttgccaggtcaggagttcacctgcctttgtcagagttgaacccaaccactcttgacctcgactcactcccttagggttaagaaagcccaaacacattcctgagcacagagcaaacactcccatgtcactgaaaagaaacaaaagaatgctaaaaagtgctcagacctgatcacattttttccaatattttttcctttttttttttttttttgagacagggtcttgctctatcacctaggctggagtgcatgtttttgagacagggtcttgctctatcacctaggctggagtgcatgatcatggctcactatagccttgaactcctgggctcaagccatcctcagcctcccaagttgcgaggactacaggtgtgcaccacaacgtcccagctactttttaaatttttagtagaaacgaggtctcactatggtgcccagactggtctcgaactccggagctcaagtgatcttcctgctttggcctcccaaagtgttagaattacaggcatgagccacctcgcctggctggtttttgcctttcttatagaccctgggcatgtaagcatttattagtttgcatttttgaaacagtaatttcaatattttagtgccaatgtcaggccgcttaaacactgtattacatatcttcatctgtctggtggaactattggtgtgatcctagagaactgagtcctattctgccattcatttaaagtgttttaaactctaatctctctacttaatgcacagtagtcagattattctcttaaacatttgcctagtagaggttaaaatagtttaatccttatgaagatggaataacttcaa

SEQ ID NO: 38750 - DNA, 503 bp, Homo sapiens
aacgttaccagattaaaagcagttttttgacaaagtaacagatttggaaattctgactctctgaaagccttgatttgaacctcaaacttgatttcaccatgagaagtggggatcaagggcctgcgcagttcttttcctaaatcgattcggtgctccccaccccgacgcaggcacaggtccgcaaccagatagggagatgcctgaatttcaggctacctttgacaaagctttcttcctccctccctccctttgcacgctgcatcccacgctgcctgcttaaagcgccctcatgtgtctacagatggtaaaacgtttatttctcaacagacattccagtgatagcatccaatgacctatgtaacggcacccttttttgctgtacgcgttttttgagatggagtctcgctctgtcgcccaggctggagtgcagtggcgcggtctcggctcactgcaagctccgcctcccgggttcacgccattctcctgcctcagcctcccgagta

SEQ ID NO: 38751 - DNA, 1723 bp, Homo sapiens
ccaaggaagccagggcctgtgtcactcttaataactcccatttactgaatgcttattatgtgccagccattgtaagagacacttgacacactttacctaattcacacaaaaactctattggatgggaattactgtccctgttgacagatgaggccattggggtaaaaaaaaagagtgatgtgtacaggggccacacaaggactgactgctagtaggttgtggagccagccccaatccagaacggcaggacgaaccccaagttcttcctgcttcaccccacaccgcctcctccagcactgtttcacccctatggatcctgacccagccctttcactctctaagcatctgtccatctcaagacttggctacgataacacagcagcaccccgatcccgaggatttaagagctactcctcctaccccaaccccaggcagtctctcctaaggataggaacatcatcattccaaggccacaccaggggggcactccgcaggccccatcctcaaaagcacccagttaggctccctgctatgtggaaagtgtccagccctcggggacaatgtcccccagagtgcattcctatgatcacctgcatcaaaaccatcagggacgcttgggaaaacgaagacactccggccacagcacacagttcctcagaaagtctgaggaggggtcgggatctgcccgcgaaccccactttgaaaaacatcgctcaaggggctcacactcctcttccgaagcgggaagagccgggaggagctggggagccagaaagccccgccacggtcttccgcggcctggagaccccaaatcggcccgaagcccgagcctgcagcccggggcgcgcgcgttaccagcgcggcccgtgcccttcctcagggcgccccgccgccttccgggcccgcggcccatcccgcgcccggctcttccgcaccgggggggtggggcgggtcggcagcttcccagactgacctgcggcccgccagaccctcggcgcggccgccggacgccgcggggcggacgcggaagtgaacgccttctcagctgctcggcaactcgggagcagagcggccccagcggcgcccccgtgcggcccggctctgaggcagcggctcagggagggagggaggccacgtcccgggcacgccacgccacgccacgccccgcccccagattcgtctcgccccagtgggccgcctcggagtcgggtgggtcttccatcccggaggtaagggaaacacacggtagagaaggccagggctgaaccccaagggacggtcttgtgtgttcagaggctggttttacaggtgaagagaagaaacagccgcagaagttgcgattgtccaaggtcacttaataagtggcaagaattaggatgttaagtgttctcacccccaggtcagtgcccatccctccaaacagggctgctcagtgccaacgtgtgttaatatattgcacttggataagtctatctggatagtgtctgcagcttacaaagctttttcacacacagcattcttgtttagtctgtgtgacagtgatataaagggtgatatttatttcccattatagcaaggaaaattgaggcgagagcaaacatttattcaacacttttgtacacctgacactgtgctaagtgctttgcatgcactacttaatttcctgttaacgataaccctaaaacagttcttccagtttctagcaccatcttaccttgtgcaa

SEQ ID NO: 38752 - DNA, 721 bp, Homo sapiens
caaggatgcagaagaaatggtaagatgtgggtgggtagtatcccagtaaacaacataaaccttctaacagacttgaggtggctgtcaagcctttcagacatgtgattgataatgaatgtcagaggagagtttccttttccatcaacgcttcaggagacagcggaccgccaccaacacagggcggaagagcacccctgtcacgcagactgtgccgcccccggctcgcctgggcacgccccttcctgccctagcagcggcgtcccgccctttccgcctttcacttcctagtaaccgccctcccttgctccatcttcgcaggacccgattggctgatggggcaaccgccaacggctgtggcgtttaaacccaagccgcagccgctgctgctcgccgagctcccggagctgggtgggggtgccccacgctgaaagagaggtaagttagtggcctgcggcagttgacgtgaccgccctctccctgtcgggatcggtgtcgttcttgagtcggttctctaggcgctgtccgcctcggtctccggctcgtcttccgccctctgtcctccgggatccgggacggcggcccctctccggctacgaggggttcgttgacggagtcctgttttggctttgagtcgctgcctcttgtttctgagatttgagcgtccggcagggcgagcggggagagccaccagttaggtcagctacttaagggaagatatttc

SEQ ID NO: 38753 - DNA, 3779 bp, Homo sapiens
ctgtattttccaagtttttttttttaagttttccaagatgttttacatctctgttcttatttaccagataaactttgtggttagttactggataaactgtaaatagtgataaaatttttaagtttatatcaagatagcacttcattttaaaaccagtaattattaggttggtgcaaaattaattgcagttgttgccattggaagtgatggtaaaaaccgcaattacttttgcaccaaccttatatttctaaaagatcaagttgtaaacctatttgttttccctaagatccgctcttgcagagttggaataaatatgattgtttacacttaagagtccaggactacagcaggcctggttggaggggagttactaatgttcccagacttaaatccagctggaacaccacctaaaatatgcagtaacataagaccatcaaaagcaatgtcccaggacttacaatgtttgctaagacgcaagagggtgtgacacagacgctaagcgccactggcgaggagatgaaggggtcgtcttcatcttcgccggatgatttccgcccacatagagggcgccagtgacgcccacacacgtgctggtgtcccgggaagagttcctggcaaagagctcaggaacgttggatcttaatcaaggctttctccgtcggggtggatgggttggactttaggctccagcaagccccgccccactcggcgggtcggtgccgccgggtcccaggtgcccgctacttcccagaacctccgcctcccgctccgggccctcgaaccagcgcggacaccacaatggaccgggcgtccgagctgctcttctacgtgaacggccgcaaggtgagcgcccgcgggcttcctctgcccccagacctgcggccagggccggggcagagaggagcccctgccgttcgtcccatcctttcgtgcccgccgtttaaggcactcaggcacggactggctttctcccgtaacagcggctttgccttcgcattcccacccctgcctccggggcagctaaaggctgcgttttcagggactgtcctggatctttgggcccccaccttccttatgttcccctttcctctccttccaaggctcacaagctgatttccaaccacacgccctccctaaacagtaagataaaaagtattcttgcccatcaggggtcagcactcccagatcttcgttccctcaatcccagccgataacgggaacgtccccagtacactgagagcagcctacagaaatggctgagcctcagctcgcggggtgcgtttggaagcgcagagagcaacttagattcgggacaagaccgtagagacgaacacattcaaaccacccccatcgtttctcagatgaagaaatcgttactttccaaagtcacagctagttcctggcagagctgaacccaagtcaggctctgggggctccaaggtcctcacgggttccactgctgggtgcgggctctgtcgcctcagaagctgggctcgctctgcgcaacccgagggacagttccaggcagtgtccgatgtttgggagaagcaaagccccctgggcatcctttaaaacaccccccttaatgtgagcatcaactctgctcactcttaatgttccagtttcattgacattactctgaaggaggaaactgaggcaggaaggttaaggagctcccttgagagctgtggctcacgcctgtaatctgcactttgggagaccgaggcaggaggattgcttgagcccaggagttcgagtttagcctgggcaacatggcgaaaccttgtctctacaaaaaaaaaaccaaacaaaacaaaacaacaacaacaaaaaaaaaccggtgtggtggtgcgtgcctgcagcccagctactggggagggtgaaggaggattgcttgagtctaggagttcaaggttacagtgagctgtgatcacaccactgcactccagcttggacaaaagagtgagatcctatttcttaaaaacaacaaaaacagagctaacaaccaagcaagagcagtggcacctgatttccctggtgctcgtgttggtgccggttcattcagagccacctgtgaccactgcttctggctaagggcagccacaacacttttcccgacgggcaccagctgcctcccctggaagctaaccagtgtgaagcaccaggccctagttgtgaggcctgttctaagaccctgagcctaatttcatttgtggttttgtattatgtttcttaaagaggatcccccaaattgtacattaggcccctcaaaaactttgtctgcccctgctgcctgggttctacattggataagatgagctagtttttcctgatctgtaagggtcattaggaccccttcacaggactgctgtgagggtgaaatatgacaatggggtgagatgattgacattatgtcatttttttcttcttttgcataatagaatggtatagtaaacacaacactggctttgttgtttagacaaacaagtcttcaattccaattctaattctgattgagaaaacctaacctctcagaggcccagtttctctgttaaaaggggatcataccacttacttcataaagagtgatcatgagcattcaatccacttatttgttaagggcctaccgtatgccagtcagtgttccaggcttatgagatacagcagagcacagaaataacaagtccttgcgtgcatggagcttacattgtgctggggagatagcaagcatataaatacgtggaaatgtgtaatgtcaggaagtgagaagtgctaatataaaaaataaagcacagcgtggggacagagagtatgcaggatacttagaggggatggatgttttggcctgtctgaaagggtggcatttgagcagtgactgggatgcagtgaggagcaagccatgcaaacatctggggagacagcatccaggcagtgggaatggcaggtgcaaaggtcctgaggtaggaggatttctgtgtgcttaaggaggtaggttggtgggcctggcaacatgggcagtggcctgattactagggctttataggtgatggtaagggtttgggttaaatgaagaaacagggattgtgagtctaacatctcctcgcttctccttcccccacttccaaacaaatattggtatttttaacataatggccaacaagtttgtgctctattgatttttaaaattagataagctagttcttatctacggactcactttgtctatgggccaaatgtcctgtggttatttgtaaagtataatctggagatattgattctgtttttgcaattacccattagaagaaattgtgttaatctttccctttccttctcctcccttctaaattctgttaggtgtgtgcttcggtacttaataaacaagcctgattacttacatggaaagaactagaataagctttttttttttttttttttttgagatcgagtctcactctgttgcctcctgagtagctgggactatgaaactgcaagcacccaccaccacgctaatttttgtatttttagtagagatggggtttcactatgttggccaagctggtctcaaactcctgaccccaggtgatctccctgactcggcctcccaaagtgctgggattacaggcttgagccactgtgcccagcctagcataaactttttcgttccagagagtaagggattgttgagaagagtgtgagagaaaatccaccctagaagagggcttttgaagtcaaacacaatctctggaattaaaaactcacctttgaaaaagaagcttaga

SEQ ID NO: 38754 - DNA, 704 bp, Homo sapiens
agggaaaattactataatatggtgaaagatgaattcagcttctgaaatggcaaagcaagtcatgcttctatgtgttctatgaatccaaaagaaatgtcaaatttttgtgaaaaaagagaaaacatgatcactttggaaaacataaccaatcttgacattttgatgtcatccttgagaaaaaacagcatgctgttctgctgctatgtgccaggctgctcccatgaacttgcctaagtatgtccttgctgcacagttttgcatcacttagcatacatgttttatcttcccctttgtttatttgattggggccatggctggttatcttttactggaaaccacaattatttgaacaagataaacaaacaagtctttttaaaaattaactatatcaatttctcagaggctattctattccagcaattcccctccctcctttcctttcttatttcatccactcctcccccaagtctgaatgttctactaatgtctttactctcacctgctttaaactttctagaaaaaactggacaggaggtagtgtttctgttagcagaaacaacaattgccttagagaacagcgataattcaggaccaaggacaggagcacaattgtggtggggctcaagattacacataagagtggtggtttgcatatcacagctgttccataaagctgaaatctacttgaaaatatgagtaaaagg

SEQ ID NO: 38755 - DNA, 2838 bp, Homo sapiens
tgcaactgatcatttgctatcccatgtcttcaccagactgtgggctgcttcacagtagaggctgtatatctccgggtccagtcaccatatagtcattgagtagctactcaatatttgttgaatgaataaatgaacaaacaaagttgaaatgaaggatataagattgccctctggaagttaaacaatgaattcagtatatcatagataagaacagtgatgacaataacaatacctgttaatatttattattaatatttaaaatactaacaatattaacagttaatcattattaatatttactatttaatgctatgtgccacgcttagttataagatctttatgtcttttaacttatttagtaatcactgctattcaaaattttctgtaagctcaggtttttcattaatgttggtttggatatgtttaagtacaaatggctctctttcatggcatctaacgatattgattcagcattatgtttcaactggcattcacctgctttatttactagttagtagaatcagcaataaattcctagtgatttgttttttgtccactagacttcgggctgctgtcaaagtaaagaaaatggggtttgctgtttggatcaaggaatcaatggattgccagaatttgaggaaggaagtaaggtcagtgaaatgtaaagcttttataaggctttctcaggacatgaacaggagccaacatactcttaggaagaacaaatggctacccaagttgactaacttgaggtatgtcaacatgtgccctctcccattctcactccatctctctataaaaaaaaattatatcgcagcaactttgtcctcattccagatattattcccatttaaatacagttatctacaggagggaaaacacattggttccttagtgtctcttagcttttaaaagcattttttcaagttatttttcaagggccagaagtaaagtggagatgtcatgaaaataaaagaacaggtagaacaagtagagacaggagaggttcagggagccgttcttgttccagctgtgtctgcggctgctgcctcctcttctactgtccccagactccaaagagaaggtacagggagttgaggcctccagaggcccattggcatcagcactgagttgctgatgacaaggtttgtgttagagcccttggtttggagcgcggggattgtggctggccagtggacttttttgtcggtttgctgtatctgactgtgtatctatatcttttgaccttattccacaaaggattttaaagttgctcgataacagtaatttctgatatgttctctttttagacaagtccaaaactcttcgcagaagaggagtttctgccattggatccaacccaggaactgatatttcctcctgagctaatggtgagtaaagcaatgttgagctcatcctagaagaattcatggtgaaatatcaggaagggtatttgtttatgggttctctcaaaagctgattggcaaataggtgaggcctctctgtcatccttagctcaaggtctaaagagtatggactaaggaagaggaggaggaatgggggtggggtccccatgggggacagctgagttgactgtaagaagcagcagatagcttctataaaatcgtgaaatcacagtgtttgtaggtatagacatgtttcctactttcacttttgctgaagtttattcctccatagaatgatttaacaagattcagcatgttactatatttgctaacattaaaatgatgttctttgagacaagagcaccaaagggagacagaccaagcagttcccaggagtaaagaaccatcgtgcttttattctgaattctaattccttgtaaagctctacttttaggtcactttgtactttattttttagaagatatgtattttctcattctgtatctacagtgctaatgattgagtggaaacaggtggagatggcatcattgggtaccttgaatccctattgctttttcaatagataatggctgagaaacagtcgcaaaggaccagggtgtttggcagtgagagaatgatgtggttttcccccgtgaccctgaaggaactgctggaatttaaattcaagtatccccaggctcctgttatcatgggaaacacctctgtgggtatgtagaaccccagggattttttatagggaaattgagaaaaagggcttgggatggggccggggtgggctggggaaacttcatatacatgtgttctcaggaaaagcagtctgaaatagcatttttaatcatttgagctagacttcctgagcattgctcaagagactttctaactgttattaagtagattcctcttgcctcttattggagcagtgtcaagagttgtaccgaaggggcttgctccatagcaaaccagcagcaggagcttcagtgacagctgtcctgtctttccttttggggactaatctgggcctcaaatttcaaattgctctttgtttcctctctcagggtgtctcaataggtatatgttttacttaaacaaccgctacagggtcttcctgttgcatccagtgtgtgctcagcttgaggagcagcccctagagtcttcccagagagaattttgaacatgccatatggcccaagtttcaaggttgacaattccagagtcttccaagtttgatgaaaatctatccagccattctctctgtatgtgatttggcaataaacagatgaatagaaagatacaatatttttagatatttaaagatattagtttaataataatttcaaatttaaaaggcagttagttcctttattctagtcttattgatttttttttttttttgatcctttagggcctgaag

SEQ ID NO: 38756 - DNA, 2713 bp, Homo sapiens
aagttaatctaaatactaattgtctgaatagttcagtttttactgaagaacttcttctgtctgcaatatcagagaaatgtaacaactattcaatgaaggatacggtgctaagtgctggacagaagataaagatgaatataacacagtctttgctctttaaaaccacagtagcgagtttatgtattcaacagcttacagactggtttttctactcctgtagaggaaattgatataatggcaatgataagaagcaatagaaatgtgggtttgcagtacagcctctgaaatctaactcttgacaatggcatatattagctgtcagatcttaggcaagttactcaactctcagtttcttcatctgtgaaatggggctattaatatctcataggtatgttcagatttaaggagattatctaaagcattcaacataatactcaatagagtgagtgttcaaagaattcagccttcattacctccatcaacaccacttacatcactaccaccacctctatcattaccccaccttcatcaccaccaccacaccaccccctcaactgctatccctaccaccatcgcctcaccaccactttcattactaccattaccttcatcaccatcaccaccatcactgcccatcaccaccatcaccaataagcagggcagcatgtatccagtataaagattctatgtctgtagctttggtctaatggacattttcagatcagcagtgatcgcactgtgttatttacaaatgacttcatttcaggactcacccttggtgctggtctcagcctagcccaggtgaaggacattttggctgatgtagtccagaagcttccagaggagaagacacagatgtaccatgctctcctgaagcatttgggaactctggctgggtcccagatcaggaacatggctgtatgtatctgatgacagtaaactctggtatgcatcccttgggtgactctccctgatgaatcatgacattttcattcttttggaacagacaaaaaaaatagttctccaaagccttgcttaatccttattttagcacttgcttttttatgattacataaatgaaaataactcattatttttaaaagtctttagggggacacatcattagcaggcatccagattcagatctgaatcccatcctggctgtgggtaactgtaccctcaacttgctatcaaaaggtaagtgacagcccctacttggagattattaagctgtttctctacccctttttctctctggggaggcaggaaatccagtcttgaaaatgacttttccctataatatcaatacatttctctgcttttctggatactggaaattttgtgagtcttgtcttaatagcacaggctttcttcccctgtgtctttctggttttttgtttgtttgtttgtttttcctcatactggtcaccctacactggacatgtttgtgttggttaatgtccggatgtgatctgattattgctgggaactacatactattgagaactattgggtccctttgttgaagacattctccaggtggtacaggagtgttgtggcacccacatcgtgctttgagctcacacttaatttatcattgatggaaacatacaggtctttttcaggtgaaaaatgattgggcctcattctatatttatttacttgatttttgttattaaaactaagtccacaacatctaatttatcgcttcttccaacttgcttgaaaattattaggaagttctaattggtcctctgtaaatttgtggggttttttttcgttaaaaaatatggactagttttctatcatctgcattgttaaatacttactcttcataccatttaaaccataaaactatctttttttttttttgaaatggagtctcgctctgtcacccagtctggagtgcagtggcacaatctcagctcactgcaacctctacctcctgggttcaagcgattctcctgccttggcctcctgagtagctaggactgcaggcatgtgccaccatgcccagctaatttttgtatttttaatagagatgtggtttcactatgttggccaggctggtctcgaactcctgacctcgggtgatccacccgcctctgcctcccaaagtgttgggattacaggcatgagccacagtgcttggtcacaaaactatcttaaagaggaagatttgcattcagggttttcaatttgagtaacatcccctaaaagtcatactatgagaaacaggtttgtgatgtgaatatagacatcaaaagcttcttagctttcagtattttgttatagttttaaactgttcctcttccttatatattaattaaagaactaaaattcttcaggtgttggaacaagatataaaaaagtaagataacatctcagtagtatacaaatttattaaagataatttcttattcatgactgtatctagtggggttcctggttataaacaataaatatttgttggctgacttgatcagaatatcaaaagagatattaatatttactccctacttgtaaagttttaagtgaattgtgttgtcaggaagaggactgctaaggttctattctacctgaaactctgggctactctgtgagatcttttcatctattttttaaatctattttttatttttaaaaaaattttttagatggagtctcactttgtcatccaggctggagtgcagtggcatgatctcagctcact

SEQ ID NO: 38757 - DNA, 6804 bp, Homo sapiens
agagagagagagacagacagacagagaagccctccctcaacagtgcaaatttgtattctttattttgggagaataatttgccatgatgaaaaaccaattatgtgagtttgttctataataaattgttaaaggcatttgcttacctgacttcctatatctaaagatgacactaatagctaatatttcttgagcattacttggtatcagctgccataacaaagcatagtgattaaaagcatgagctttaaaacttgagaaaggcagactggccaaaatctcagtttaccctctgttaactcctccatgctctcagtcagcttacttaattatattggtactttggttccctagctgtcaaagatgggtgatcatacctacctcacagggcagttgagaggattaaatgagtgaatacatataaggtgctaaaagcagatcttggcatgcaataaatgtcctagtgaggacatttattagtgagtaaatgagggtcagttactcctggactgtggattttatatgagttgtcatttatttctctagatcattctgtgagttgggttctaatattccccttttacaggtgaggacatggcgagacccaggctagccaccttgagaatggtgggccaatttgaactcgggctgcctgatccagagcttgtactcttatttcctgtattaaactatggctatttgtcttacccattagatgaagatatggggtaataaaccctgtcaggctaggagtcttctctttggactttccaggcactggaacgaacagatgctggatatagcctgcaggcttattctgaatgaagtctcccttttgggctcggcgccaggtgggaaagtggagttcaagaggactctcatcatcagcttcctcttcaagttctacctggaagtgtcacagattttgaaaaagatggtaaacaactgtttacacattaacttccccagtactgggagctatgatgacaccaaaagtagaggcaatgactccctaccaaatagctgtagaataaaaaagacaatccacattagaaacacacgtacttgctgaacatccctcagcctgtctgtgggtgggtatgagtttagggaagaattgaaagtagagccaagagttgatcaggcttttatttaacaccactcaattatttggtttctgactgttagtttttccagatcatgttcagaaaacttgctaatgatttgggtatgttttccctctgtatgtcatttctttctcttgagctattaccttcacgttgaggttgacttcatgtgtttggtgttcttttccagattcagcttcatttccctagcccataaggtggccatgatggcagccactgcacaagatgactgtgaaatgcgtcattgtaggaaaagggcttcatatggtccctagtgcttcagaggaaatctgtagtagtagtcataataatagtagtgacaatccatgcattcttttgcctggtctctcttagggcaaacaattaaagctacaagattcttggctggggaggacacaactaaaaaaaattctctgaataaatccattagacccaaaggagacttgagcctcattggcctcacaaaccccatgctataaccagctgaccaaaacagactggaagccaagaacagtcttcctgtggtatagaagttagtatggtcactttaaatagcagacacaaagtcctctcttatccttgcttttgagggtatcttctcagtgtaggtgggagcaactaggaaccagaagggtagtatcacattattaagaatgaaaatttgaaatcatagataagtgacatattgtcaccaggtaaccaattatagactcctccaattagtagcaaactaatataatttctgggtgactcaagcgatgtaatttaaaacttttgccttgtagtcttatacccctcctctctttaaaaataatagcttttgttggttttatttaatttttttttttgagacagggtctctgtcacccatgctggaatacagtggtgtgatatcatagctcagtgcagcctcaacttcctggactcaagcaattctcccacctcagcctcccaaatagctgagaccacaggcatgcaccaccatgcccagctaatttctttatttttttggagagacagagtcttaccatgttgctcaagctggtcttgaactcctggactcaagcaatcctgctgccttggcttcccaaaatgctggaattacaggcatgagccatgacacctagctggttttattttctattaaaattatgtaaattagaaaaaataaccaccatgtgtattgttgaaagcctttccccccatccagctctaggctgtgcaatgttcagtcttgtgtaaagaaccaaatgactcacttccctcagtcctgaggaatgttcttgctggggaccagaatccttcccctgtagggcagcgacagggatgcagcctgtgtccccctttctacacagctggcaggcaacatggaacctttatgcttatttgcaatggtgtactttgactctgatgttttcctggcttaagtattttcttcctttctattttatttacttagcttctatcttcttgttggatcagtttgtaagtcctcatatcatttaggagagtatatgagagaatcataagaaacatagagctggtggaagccagttacctaccgtattcatctggctattcataatatgaggaaatatgtatgcacctttcagagtatatgtccttgagtcagggagctgcttgtatttctggggttctgaatagggtgagtgcttaatatacgtgagacttcagagtagagatgcttgctaagactcatgctagcctcacttccaaaatcattctggtgcattcaaactatttaaaatatctgcaatggttctacttttcaggatccagttcactatcctagccttgcagacaagtatgaaagtgctttagaagatcttcattccaaacatcactgcagtacattaaagtaccaggtgagcggtatttcttgtttttaaaaattcacaatctgggctatagtgatttgacctggacattcccactgtctctccgtgaaactcaagctctgtaagtccaagctccacttctggtaaactcacagcctctttatgggtaactaaaattccaaaatcaatgaagaatttgattaaagacaaatctagcagtggtaatattaaagaagaatgttgatttgggtcttaaaggttacgtgctttgcactgtggccttgtaccacagacacgcatgagatggccaccttgtcacgtgttttctgccctgggcactgcaggcatcagagtccaataaagccacgctctgcggcaaggccatgggctgctttgctttcattttcagaggaaaagacacagcccctagaggttgatgaaaattcaataatgcttttaaaaagaactgctgatttgtttagcttgaatgttaagatattttactcccttagtctctattcttctagtgatttttctgtgagttacattttagagttgaatcaaacgtaagtactaagagctttttgtgctctcgtaatgaaggctattagaaaacaggattcctaactctcaaatggaattttctgccacatcataaaaatatgcctgaagtcaccctgttggtaaagtggatacagtttggtgggtttttccttgaaattattatcaggaaacttgacctcgagagttttagtaagtcaagaacatgaaaaggctttttaaagcatttgttcactgaaactattgttggatttggttgtgaaagcttatagtatgtcgtaatgaacattgacgttggtgtgtattccttgaggttttaggttcaatatgtttaaaaattaaaatgcaccaaactccattgaaaatgattgttttgaaagttaaaaacagctgccatctccccggtgttcttttcaaatatgatagttgaaccctttggcttataaataccctaatatttcttagacaatggaataaacttcagaaagaaacaacaacaaattaatggatattgaaatcatccaaagaaaaaggaaaatcttcacatagtgcatgatcttgaatgagagtttatcattgattgcaaaacaaagttttagatgcaatatgtctgccacatagatgagttttgtttttgttttgcccgtggtttttcacacacacatacaaacatccacattgctagagcaacgtcagcactcacgaagagcatttttcccctaaatcagttcatttgctttgaaaatattttgacacagcttcaaaagatcaccagtttgaggagacagcattcttccttccatagtatctttagccaaatactaagcagaagcaggtaattgaggacagcttctttcaccagtagatttatcacaactaactgcaaaaaaaaaaaaaaaaaaaaaaaaatgtatgatatctttgacggtaggacaaagacattttttggaatttttcctcagttttttggcaggcctcacacaacatggtttcaaaagactttttttcaatgtgatgaagtgttttgtttgttacagtgaaatgtgttatgtcagttaactcccagacccattacagatacctatgaatgtctttccttaatgtctgagcttatgaattatctggaattttgcttttcaggatgaaaaaacttcttagggttttaaaaagaagatgtgggtgattttttttcactcaaatgtggttcaggttgagagcccaagcagcatcacagctcagcactttgggggatattttgcagaggaagtcaattcctaccatctgcaacatatgaaaaaccacacctggtagaacctcattgttggtttttccttttcatcactatctcagctcctcgaagcagagggggaagaggagaactgaggggattcctttgccatggggacagggcagtgtgagctacgtcaatagagctggagtgttgggactgtctccaatctgtgctcatgcctgaaccccaataagtaaacttttctctcattttccctagtcccctacattcgtggcctaatatctacctttattgaatggagccctgggccaaggtctaaattatttttctcgatagtctcctgctttctagctgataaagtcaggatgactcaacaataactgaaaatgaaaaaacaaaaacttagtcaatactccgttttttgttcactgtattatactaactacaaaactgaagtttacatttaagtaaaagaaatatgaaattagaacaataaatgcttatcaacagtgtttattttgcagcaaaacagtaaattttatataaaataggaataaatgcatcctacacacatgtcttataccaagttaattgtagaaattacactactttctgtgcatagttgtcagccacaatttggttgacattttacttcttgtcatttatgttatgaaaataatatggtttttttattttcaaatcaatgttgaacatgttctgaaataacacatgccactctgccgttctctcctgatattccagccctgccacctgcctggagaatctctgatctctatctccagccagaggttttttgtttttttgaggcccttaagtagttgggtagtgagtggggagcactcttctcgagttcctggagcagcagagggcactggagaactgtacatttcacagctgtcttaagtaaagctctcattataaccagaggtctcctccatttgtgggattagatgaattaaatccaaatgttcagaaaggaaagcaaaacatctgcatgaaaaggaaatgtgttaatcggggggatccagacagcttgtcttcagttccatagagcaagagccttggagcactttcactggaccagggcagactttgaaacaggaaaccctgcagtgaagagtgagatgaaataccattttagatggattcaagtatctaacttattgttcatatgtgctgaataggctttctcaaactgcacattctggtaatcaaatacaaaagaatttagcttttctccccgctcagatgccttaaaggatgctatgttggaaataggcctgtttcttcttttttctcccagtaaagatttttaaccagtatgtgttggcgacttgttctctcttccctcctgccatatgatgtgtagcctggcattgtaaggctcatctaaaaggaagatccagggctcagggtgatcctgtgagctgcaggatgggaaggggaggtgtccatagcttttctctgacctcaacctggccaacatgactgcatgcccctcacccccaggtcttccagagaaagcctctgggagtctggcctcagtcccagtaccgagtgcaatgttgacacagtgagttacagatgggggtacccaccagggcttagcaggccactcctcagccacagccttcaccctggccttatgtctgtctcttcacctgctctccttctttcttcatatcttcagttcttttcacaatacacacccgactgggaaagccataaattcccatatttgaaacaccagggcagacattgtgctgattaatgtctgctttgattaatgaaacacatttaaggtatttacagagccaacagcaagatattctgctccatggggctctaagaaagagcaacattagtggatcattactccaattgcaggtccctttggcttcattctctatcaggattgtctaagttaagagttttgccaattatttcttatatttcctcactcaaa

SEQ ID NO: 38758 - DNA, 3484 bp, Homo sapiens
gtgaatcacagcataaagtaggagagagaactcagcaatgatggtgacttcttccagtccagactgtttttacctttctcaagtcttaaggtttcttttccccatctaaatttctgctgtggtccctgtgtgaactcctgagcctagctgccccacctgcaggcgaataatcctagctgtcaacccccccaggaaggggatgctgtctgcttggtcacgtcttggctaggacatcttttcatgaaaagacagtttgtgaggagagatgtgctcaccatcagggttctgttatcacaggggactccccttcccaggtcatcccctttttctctctggttgagatgatctgtgacttcctggtcctccctgtccgtgcaggcagaggctgcctctctcagaacagctctgattgtcgtgtgacagccaaacatcaagccatgggacaggctggccctcacacagcctcataggcttggcctggagcctgagcctgctgtcctcaagacagcatcactcctgctcctctgatacagcacaaggatctaaacttcccccagtgcctcggatcaggaggccagctgtggttatagtcatggacagatgtggaggggtcacacctgtgtgtatctagccctagccctactgtaatcgagtactaggagggaggaagaaaatgaataaaagagaggacctgatgcctgccctccttgacaacaaaggtctttctgtgtcgtaggtgttctgtgtgggtcagcttgtctgtgctgtgcttgccgattctgaggttcaggcaaagcgagctgctaagcgagtgaagattgtctatcaagacttggagccgctgatactaacaattgaggtaatgagttctgtggaatggtggtgccagttgggagccagaacaaatatcagttaaaatgcttttggctactgtaacaggaaaatgtggctcaaagtggcctccaaagcacacggactttattaacctctaaccagtctcagtattaacaatttccccaaggacatggcttctttttgccactcttctctgctgcccacaatacaagctcaattcctgtggtcacacagatggccgccaggacaacctggacttccttgttcatgttcaaggagtaagaggaaccctattgccccagcattctaagcacaaatcctgagatccagcctaattaagccacttaggtcacatatccatctccaaattaatgactggcagaggaatggaggagctgttggttacttctaggggtaggagttggggtcaggtttctctgaagtaagtgggctatgtaggggagtgtaggaaactgaaacaaatctgagccctgtttggaaagggaaaggggaggggatgctagatgggaaacagtgatgtccaggaaagtggatccactctatgactttttacccaccttcacccaggcacatggtgaggaccaacaggatgttccatgaagtgagtgtcagagacacgatttttagatttttcaagagataagtcgtatgatgcctacaggtattttggcaacttaaactggagaattgcattttctatcctgatttttagaaaggagttgaaaatttataaaggctataagactcatctccatgaaatgataggatgttctcttgtgtgcattccattggttcttataatttcctggatgatgaaagaatgaacactggggaggcagtgtaaatagatgagactcagtccatacaggccgcatgtgctctgggacacaatattagcttcacagcataatgaacatgttgttctctgggtgaccggcatggcctgaggcagaattgaggaaacaacctgggcacgatcagtgtctccaggagaactgggtgttgggggtgcttcttgccatgctgcttgatgcttaggaacatggagtttgtctctgggaatttttcttacattttaaaataaaaataaaatcatgtcaaatagacaaaaacgtagaagtctaattggagtcgaagtgtgattaggcctcccaaattttcctggccagtttcaaattcaaacactctgttcccttctcaggcccttttcatttacatgttgcatgctgctcttgcttcatatattctgtcccctgaagtttgctggagagttagaattacttattagaaattatttacgtaacacttcatcaatattttgtttataaatctttgcccaatatcaggggctaaatatctactctccactccccctaccttccagccaaataaaagccccaataagcaaatataatagatgccactccccccaccctcaccacttcaaccagcagactcgtgattgtctgccagagaatcccagcatcagatacaagctctggctttgtggaaaagagttgcctcacattgtgttcagagattaagctctcaaagtctaaagatcatcaactggatcagagcaaatttaatcaaagtttagagcagggaaatatgcccctctccctatacattacagttcttttatcactttcctgactaagaaaaattcagaaaattggctcaaagttattcaaagagcaagcagccagtgaagttgaaaaagatgaaacttttaaaaataggatttataaaacctagcttttttttcaacctggaatctctttaatcttagattaataagaaaagcacatgaacagattccaataggaagtgtgttatcaatcaaaatagaacaaaaacaaatatatctctgtcactatcacaaagatttaatctggcacatgcttttcgagtttttagtagattgaatggggcaacgatcaaaactcttgaatcaaggggtaaggctgatgaccataatggaaaaaaatgtgttccctaccggaatctgtcctgaataataatcatcaacaacaacatgagcatagctaggacctatacagagctcactgtgtggtcaacatggttctaggtcagtttcacacattaacttactaaatgctcaccacaatcctatgaggcaaaaactatttttatccccattctgatggggaaactaaaaggcagggttacccaaggttacatagctagtcagtaacaaaaacaatcaacaaacactctgtcaaagaacctgggccccaccggtgctataaacaaaccaacccagtttttgaatgggggaaatggcagaatcacaatagcccatccctctaaggggtgttgtctagacacctactggtggccagaaggaaacagagataagagaatccccaactaccaacagaatggaatttcatggatggacaataacccacagtagataatgccagcaggagctggcacaccacatttgccagtggacacatggattactgcaagataaattctcagggatagctaaaaaccaacctatgttattgtaactacatctctggttttgtgcaccactgtacccttttactgggcacccagggagagccaataggag

SEQ ID NO: 38759 - DNA, 750 bp, Homo sapiens
gtcctttgtcttccactaccagagtgaatagggaaggaccatcaggtgggggcagggctaggcatgtctgagctcagactgtccttgggtgggtcttgctgtggctgctgtgggggatgggtgtgagattcccaggtcactggagttgtgtacctaggaggattatggctgcctctgctgagtcatgcaggttgttagggaagtaggggaaagccagcagtcacaggcctcacccagctcccatacaagcagaagggttggtctcactcccaatgtgtaccccccaacagccctgagtttgtttgcaggcagacagtgtgatgggcttgaaaacttgccctgtgctgcacccctagctgagagagaaaagggcttggtttctccccctgcctgtggagtctgcacaccagatttgtgccctcccactgagctctgaccaggaggcttcttgccccattcaaattgttacaaagttcagctagagatttctttctccctgtggagtttcaccccctacttctctggtcccccgccccctccgcccccaccatggatccctgtgttgttaggcaggaatggcctggcctgctaggggacacagcaagctcctagggcctttctgctgcttcctctacccctgcattttgcttggctctctaaattgtctcagcttcaggtaaagtcggaatcttctcctgcaaacagaatttcagcttctcccgtgggggtgtgtgtctgggagaggaggat

SEQ ID NO: 38760 - DNA, 1020 bp, Homo sapiens
ccgtgcctgatgtgcagcccaatatccttgtttttagcatcgttggccaagaggaagagataaagttgaaaccgagcatacccgccctgcatgtcgcacactccacgtgcggctatgaaaagaagtggaggctcagagtggttatgtaacgtgcccaagatccctcaattagcaagcactagagggaccctggctttcattcaactgctcccaaagaatctcccaaagatccctcaattaacaagcactagagggaccctggctttcatctgactgctcccaaagtttggtttttttctactgcttcgtatttcctccactagggagatggcaactcttctagaatttctctgttaaagggaggtgctagtggattgtacgaatgttttcctgtggataccaaaagaatgctatttgtctactgctgccaaggtcttgcttacttaacttttcaaatttgatcaaagaacaaagagtatgttttgcaagtggtgatgagaattaaaacccttagttcaagtctccattcttttattgaactgtgaatgcaagaattttaaaagtgtatagctacccaatatttcataaatttttattattttcttcaagccagggttgtgttacaatgcaaattcttgttggttatcctctgaaacaaagccaaatatttgtcctgccaaaagaaagtcaaatacagtacagcgtcatgtaactctgtaattgctaaagagatgtttaatcaagccaaggaaataagatcaaccaacctattttaaatgattcttactattcagaaataatgggccacaggaaaactgactcaatctatataatcaattcctctgtggaggtcattgagataaattcagaccctgaagtaactttactgttttttctaagaaaatatcatatctttttgtttgtttaagaaagcaaagcaaattaaaaaaaaaaaaaaaacctctggatactgcaatttctcttgcacttacagaacattttccttctgtcatgcatcat

SEQ ID NO: 38761 - DNA, 1630 bp, Homo sapiens
aacacttttccctgtattttctacaaacgaatctctttgataataaaaagtaggttttttaaatgttgcttttttccttgtagaaatgcacaataagagcatgcataatgctagaaaaactttgacctaaaacagccttttcagtcattttatagttctctgaataactggaaaattgtagtttacacacactcacacacacacatacacacaccccccgtaggtttctgttgctgattttacctgcggtttcaacaccgctgagtcaacttcatggtgctggccctttatctgaaaaattgattcattctctcagtctttgcctttgaacctaaatcaccttgttgttaatatcctttgaacatcctttgaactctcaataaatatctgttttataatctcaaagggcaaaaacctctatttgtaagttttcaatgccaaatcacagtcatgttaaaacaggtcaaataagtgcatgttctgagttcagggtgtaataggaaaagccatagagacgtaggtaacttagggacagttaccttctttctagatgaatccttagattcctgagctgggatgcctggtctaagttggtctatttggtaagcaaaacagaaccttattgaagaaaactctgccccaaaatgtcgcatctgtttatgcaaatgaaaatcaaaccattcttaagcaactggtctcggcttcaagaagtactgtgaacaagtcttatttaaaatgagagccacaaagcctacttcaggttctttttacaagagccttttctgtccaatttcccaaaattaaagcatgagctccctctgctgagtgaattcacatgtgttgatgaaacagactccaaaaacatttgtatattacctattgaaccattatgttcctgtaaacataagcaattataaatataaaacatatttatattttctttttttcaaactcataatacagaatgggatggaaaggtaaagaaaagtaattcacaaggtagagattcattagttgaggcttttcagtttcacaacaatggtcctgagcaacagctgctggtacggcaatgctttgtaatcaccatgatgagttaccaggggttgcttgcaagcaccggttctcacaatcaacctattacccagctttggttcttcatagcacttatcatatctgaaattacaactgacgtattcaattgtctggttatgactgtcttcccctaagagaatgttgacttcctgacagtggataacatgtctgtgctttcagcccttagaacatgcctgacacacagtaggtgctccgatttgttttatgaattgagggaggcagaaaagcaggcaggcaggtcagcatatacctatagtgtcacttaggattatggttcaactagagaatgattcagtgccaatcacatggaactggatacaaatttagtaggaaatgatagagataagagagccaaaggacgtacggtgaaagaggtgtggaattcaagctcaaccataaagatgggaaggacttggtgaagttagacaaggaaacaagcatggtgttaagcactgaggatacaatgacttaaagaaaaaggcctggactttgctctcatgaagcttataatctgatg

SEQ ID NO: 38762 - DNA, 1555 bp, Homo sapiens
tttgactatataacagagaaaagcattagtataaaaagaaacgcatttacagcaaaaacttttctaaatcaataaaaaaagattaaaaaaacaaaaaaagaaaagtatacccactggcaggaaactggaaaaataaactattttgagcctcacttagaatttttaaaatgaaaattaaaacagcaatgagataccattttcctctattagattggcaacaatttaaaatgttgatagtacccacgactgattaaatttgacacattttttcctccgagcatacttttcatgtaataaagttactgaaaccaaatactgtattcttaaaaatggttagggttactaagaagccagcaacagagggcagcagagacctcctctggggcgtccgcgtagttcatgttccagttttacaaaagcagctttttctctgctgtggtctctgaggtgtcagagtgcagcaaaagggaaatgcgtcatcagttcttgtcatctcattggtgacaatgagtaatcaggtggcggtggcgaggtggtgtctctgggccctctctccaggccagaacgggcacgtcccacacgcgagcaaggcttcttgctgtgccgcccgtcagagccaagtctgtgatggcgcctctgttccaggttgttacagagctgggcagctcctcaggaagttggcattaaagagagctggtgttcaaaatctggattttcttttttttttttttttaaccgagagtcctttcccctcaataaacttgacaaaggagatcaaggaaactaggaaactaccagaaattctcatttgcatttccaagcaaacgcccagcaatcttagtcatattagctgcatggctttggggttagaaaggaggtgaggttgggaggggaagataaaggataaaatcagagtgaataacacagaagaggtctagccagctgcctttcctgcttacaaggggccactggggccagagcaggcctcctcccccggctgttgcgtccaggctgtttcccacactgtagacccccttcctcctttggtcctctctgcccttccctgggtctcccatttcagaccttgctgtgcttcccagtcccccacatggaactcagactccaatttccatcagtcaagggcttgcctcttcaggcacatgtcctcagctcccactaagaggtcctcagctttaggccagctcggcagactggggaaatggacgcctctgcactgacccagcaatgcttatccagatcagtgttcagggagcacctttctctctatgtcctgtggatgcagggtctgcctggtcaacggcaaaggtgtctttatgcatcttcgggaggttggcctgttactgggtatagagttagggaaagtacagcctgagaaattaatatagaatgcatgtgtatatacatacagacatttttgtgctttctttttataaaagtaaaacatgtcctttaatggacattcgacaaatacagaagaatataaaaagaaaatcaaaatctcctgtaaacctaccagctatatatggccattgcc

SEQ ID NO: 38763 - DNA, 3240 bp, Homo sapiens
acagagcaagagcctgtatgaaaaaaaaaaaaacacacacacaccaaaaactgatgtgtatgctaatgtttaaatagctttctagattcttctgattgtaaacttttggaataagctaagcaaagcaaaatatattatctctctctctttctctctctctctccttctctctctctctccacccctcccctgaccatgattacaactcaccctaccttgtattccctgttccccaaccacagctcaccccaagagcctgctgttctaaggtatctgattttcacagactcagatgaagaccctcatcaaccacactcaccaggataatccttgctgccatttaatttctgaatcaagacacttgacaagtttcagtgacacccagagcaccctccccacctctaccgctctcccaggagagttgagttcctgagaaaagcaatctggctttgagtccttttgtgtgcaatggatacctgcttattctgggatggcttatctagcccattttccttgcttctcctcctgcctctacccctactctctggcaggcctctgcctcctcagggtggcttgaggatcagattccaagcagtcagtccaggtcctcattatgtggagggaggaggggaacaagaaacattcataaaacatgaagccggggcaggcagtatggatcctggttatgcacactatgctggatacattagccaagtcagtttcacgtaaaccaaagcccagtttaactgtagctaaccagcttatctttattgttttgaatcacctttcaggacagccgtcatcattctgaaatttcagaccaattcctaagcgctctcgaagatttcccagtcacaataccccagggagtccaaacgtaccaggtcagtgagtttgatttaactgaaacctgcaaactagagctgtgctgagcgagcaagcttttcagagctgtggtttcaagtctgacattctagtcgtggctctttgcttagtccgcgtcagggagacgctggaatctgaggtcaggcccaagctgctgctagatgagctcaaggctgaaccgtccagctaatctacagtctaatcattatagtctcttcaaagtgatattctctgggcatttgtttgatatttactcagaagagcaaccgagccagaaggttcagcccccagctctgattgcaaatgtttaatctccagtcagcaaacaaatgccctgcgagtaacttaactcaccgttctggcaggacagtttagaaattatggattcttgctacagcacaacgcctctcccaccccacctccacatacatgcacacacacacacacacacacacacacacacagagcttccctgagaggagctccagaataaacactatctccacctccttacagcctagtgatgtttttgtgccactcccaagggcagccaggacaccttattctggatctggggggactctgttgccatcccccaaaccctgtgccagaggccccaaacaagtccatacttgggcttcgggcttggattttggcatcccaccttgggaactgtatcactttaccccccatcatcatgaggacagtacccgtggacagactgatcattggaaaggtgaggaggcaggacagcgagacccctgagaacaccaccagggaaaagaaaatgccagaaggagaagctggggtgccccttcacctacttcgccatttattgccacataactgaaataacaattcactgttctagtggcatcatcaatgtgtcacactcatcatctggcccactccagtgtttgtcacccgagggtgaccatccgatttctcaatcctagctcaggagtgttggtgataggccaggccacttctgaaaattaaaggcttctgaggcaactcttgtcttccctgtagagtgtggatcctcaccagcctctccaagacccagttggacaccctatcatgcacctgtcagctcttaaacatgccactggggaagccatgttttgtgatgacattcccatggtggataaagaacttttcatggctttggtgaccagtagcagggctcatgcaaaaatcatgtaagtaaacgaagagctttcaagagccttttaaaagcacacttggggacccctcagaggaatgcgcccatgctcctgccatgtcctgaacttaaaggacctaaaatggaaagaataaagaaaaggttgccagctccaggaggaagggagagcatctagaaatgaacatcatggagagagaataaaaatcactggctaggctcagtggctcacatctgtaatcccaacactttgggaggccaaggcgggcagatcacctgaggtcaggagttcaagaccagcctggccaacatggtgaaaccctgtctctactaaaaacacaaaaattagctgggcatggtggcacacacctgcaatcccagctactcaggaggctgaggcaggagaatcacttgagcttgggaggtggagtttgcagtgagccaagatcgaactactgcactccagcctgggcagcaaagtaagactctgtctcaaaaaagaaagaaaaatcacagttacaagccttttgtttccctcctaacctcacaaaacctcagctccctgctacagcctcagacatgactcaaaggcacaaccctgatagagagctggtattgaggtggtggtgaaatacccacttcatgcccaagaatgaatggcccctgtcccaaccttcaagaacgccccttgccaaggccacactatcccttctccacctcccaacccccaacagctaaagtgttgtctcctggcccagcaggagtctcttggaccctactccttggcaggtctgttctgattggtcaggacctaagctggatttgttgtcatatattccgattttcaaccatgttctatccctccctcaaatttagggccctcaaagcttgctgatttctacttcctctttttttaatttagagacagagtctggctctgtcatccaggctgggggcagaggcaccatcatagctcactgcagccttgaactcctgggctcaagccatcctcccacctcagcctcctgagtagctgggactacagacatgcgccaccaccacacctggctaatttttataattttttttgttgagacagagtcttgctatgttgcccaggctggtctcaaattcctggcatcaagcaatctctcccttcttgaccacccaaa

SEQ ID NO: 38764 - DNA, 3530 bp, Homo sapiens
aaggcagattcccaaacctcacccatcatgcacatttgacttatctcatgttccctggagagtcacatttaaataagaaattagtattcatcgtccgggatcatcatagtgtccccagccctcagttatgaacgtagcttccttctgaaggtttcgctaatccttcttgctggttttctctgcaaatctagaagacctttccttggacttcccatctctgcagccagcctaccgctctaattctcccttgcttgtttgacacctttcatctgtcccgggagacagtgattttccagagcatactggcttttaagaaaaaactaacagtggaaggaaaagtcggaagaactggcttttatgcttttttgtttttctgcaatttaggatgccataaaacacaattcattcctgtgccgtgaaaaaaaaacttgaaaaaggaaacgttgaggaggcctttgaaaaagtcgaccaaattgttgaaggtgagctcccagggatacttaatagactctgcctgattctattctgaagcaaccatcaaaagtgtatgatttcccctcagaaagtccagcctctaaagtcttggtgctttgccaaatttctcttacatctcttcctttcaaattgtgtgtgtgtgtgtgtgtgtgtgtgtgtgtgtgtatgtgcagttttggcgttggtgggtagggagcaatagcataaataaaagaaaatctctaagattttggtttgggcagagtaaggaacaaaacttggcacttttaatttgtgatccagaactattgtctctgaaacagattgccacaggacaaatgcctggttccttcgtcaggataaatccaggccagccaggcagggcacggtgactcacacctgtaatcccagcactttgggaggccgaggcaggtgaatcacctgaggtcaggagttcgagaccaacttggccaacatggtgaaaccccatctctgctaaaaatacaaaaattagccagtcatggtggcaggagctgtaatcccagctacttgggaggctgaggcaggagaatcgcttgagcctggggggcggaggttgcagtgagccgagatcgcgctgctacactccagcatgggtgacagagcgagactccacctcaaaaaaaaaaaaaatccaggccagccagtccacatcttactggcttttgaattctccaagacggtggctctccaagacggtggcttcccaccagcacacaccttaggagttgttctgtgcttatgcttaacaggagaggtccatgttggaggacaggaacatttttacatggaaacacaaagagtgcttgttattccaaagacagaggacaaagaactggacatttatgtgtccacacaggacccagcccacgtgcaggtgaggtccaggataatacccacgtccccaccttcctaattccatgatcacagtcgatcccacagcctcacaatcactggccattttacctgcagaaacctggaatccaagcattagacatcagacatcaataatgcagccaagacctcagaacctttttttttttttttggtcttttcaagtaaataaaaaaatagtcacagtaattttaggtttcaagagtacgttcatttgcatcatgcttagatgagctctgtgatgagatggcatcactaaactatttctgtacttgatttttctctaaaataatcatcacagataacctttggagtcaacacatcactttatagtacattttcatttccccagtcacaaagtgctctaggtttagctgcaaacacatcatctccttggtaggttgtcaggagttcgccggctttcatctccttgggactttagactaggaacccagcttctcacaggaatccagggctctgacagttttccttctggaaaataccatttttctgctagaagggctgctctgtgcggaccaacggtgtttacgagctaaacagagccccaccagacagattcagactatctccattttttttaccaatggtagatgtgaatgaattctgctgggatgctgtttcaagaaacaaaaagcttcttttccatttcactcttataaaccttcttgttatctcacttttacagaaaacagtgtcctctactttaaacatccccatcaacaggatcacctgtcatgtaaaacgagtgggtggaggttttggagggaaggtaggaaagccagctgtattcggggctattgcagctgtgggtgctatcaagtaagtatggttggggatgcttagggatacagaatggcatcaaatgcacagagctgagggcaaatcagtggctgacagtcatctgggctgccatcataaccatgtgtgtgtccttgggcaattcagcctcctgtctgtttctttaaaaaatgtaaataatcatacctaccctcccacacttttagagttattgcaaaagtcaaatgtacacaggactttgaatagctgacatgctattgaaaggagcagtggtactattagctgaatacctcctgagcttcagggaaagtgagccgttgaggggtggggcaagtcaccctgcccaagtggagtgctaggggaggctgctccctgactcttctttcctgctctcagaccaagaacagggtgaggtaaggaaagaaaggctcttcatcctctgcctccctgcacctgggaagggctgcgtcctcagagtctgctcaatggacagatgactcatcctcaaagacagctcccaggctgacctcagcggaaggctcactcctttgctgttcatgcctcagatttgtatttagttggtgctgctttttctgttaatggttcattttctgtggctaagtattctgtcagagccccagagggcatgcaaagtttacaggccctgcttcatttgacaactcttgtagttcagagctaggtcctgaaacactcagacatatgtctcagtcctcagtgagaagtgggaaaaagcaggatctgaatcccatctccaattctttccataattaaatccactccactcacacccactggggattcagcacaagataatcagttcattgaattccccccaggcgttgtggctttaagacttctcaaacacgactgcacgttagaatcatctgggcagcatttaaataccagtgcccaggctgccccatactgacccaggcatccgtatattttaaaacttcctcagtggttccactgtgcagccaagtgtggcaaccagtgccttaagatacaactctaccttggtacccaagggccatgcattaaatgatccccagagtaatgttcccaaacctaatagtaagtaagagttgcctgatgtcatagaaattcctgcctcagctgggcatggtggctcatgcctataatctcagcactttgggaggctgaggcaggaaaatcacctgagcccaggagttcaagatgagcctgggaaacatggtgaaatcctcatctctacaaagatttaaaatagaataaaataaaaatagctgagcacagtagcacgt

SEQ ID NO: 38765 - DNA, 1995 bp, Homo sapiens
aaaatatctcatttcttagagcattgagctcctccctgccaacacctaagagaaatatacagaactgtccagagcagcacccctatctgcaagcatttttaatacagtgcagtatttgtttccttcttgggaaacaaatccctaatcaactgaagtcaggaagacctgagaaatcctcggctctgtattgaccagctgtgcaacattaaattattcaacatctctgagcctcagctttcccagtgataataacaataatagtaataacaataactctgtcttaagattgatgaggactcagtaagatagtgaatgtagagcagcacttggctgggttcctggaacactgtggatgtcatccagagcatcactaggcccctcccaggacagctcagacacacctctcagggctcctcctcctctggtgggtaggatgagaccccctgaacctctgggtcacatgttcaggcccagcatgccccttctataaacaggcacaagaaggttaactgtcatgtctgcaagctagatgcaatcaaaggctgtgacatcagagaaacttgagagctgcctgtgtggtttcctctctgatgccaaatattgtcttttccaaaccaactccaacaccaagtgggtgtccaaccattctgttctcacactaactaccagagttagtgcagactccacagatcaagggctgagtcccacaagaccgcccctatttcagacaccagcttcaaatggagggccctagctactcacactcctgcctggccgactactaatttggaggttttcactacccccattcaggtttgataatttgctagaatgactcatggaactcaggaaagcactttacttatgattattaccagtttactgtgaaggatatgactcaggaacagccagatggaagagctgcctggggcaagggatgggaaggggacagagcttccctgacctctccaggcacacaccctcccagcacctccacatgttcaccaacccaggagcccccagactgcatcatttggggtttttatggaggttccactatacaggcatgattgattacagcattggccattaatgattgaactcaatctctagcccccctcccaagaagatggggaggaggactgaaagaccaatgcacaccgcctccaagcccccatcctaaagctacctaagccctcctcatgagtcgtctcattaggagaataaaacagtaaattccaaggctttacgaactctgaaccaagaaccaggggcaaagatcaaatatttactttttattataacacacttcccttcacctgtacggccacaccgcatctaaaccacagcctacgctctaccatcatccatgggaacaaacatctcatctcatcacaaagaaaaccttcaaatcaagcaatgattttaagtctccatttgaatatcctccagctgctccacagagttctaaattgaggcaccctagaatcacctggctaggaatagaagggtgttattccaggtcagctgatgactcacaaagctggaacacctaccctctaaattggcagtgagagctctgtcctcagtgggagtcaaaagacccatggtgagtaaatcctattattagcagctacaagccttgatgctcccaagcccctctgagccaaccctgggcctccaggcatctcgagacacaaatgggctgaagccttcgttcctccttctcctggaaagaaaaaaataccacctttccctttgtccagtttatcaaacattgatgtagtgtccctgtgattttttttttttttttttagacagagttttgctcttgtcacccaggctggaggctggagtacaatggcacaatttctgctcactgtaacctccgcctcccaggttcaagcaattctcctgcctcaggctcccaagtagctgggattacaggcacctgccaccacgcctggctaatttttgcttttttagtagagtcgg

SEQ ID NO: 38766 - DNA, 3332 bp, Homo sapiens
atttctcccccaaaaaagcttctatttataaagaaaaaacacattttctaatctgaaggaataactaacttagtaaatagtcttgagcaaacattttgaaagcacatagcaatgtgctgtttctccaaagtcaattatccaaaaagtattactggaacagattttgggggaagagaggtattaaaataattgttacattttctatttaattgaacagccaagaaaccacacattggagacagggaatcatacttaacccaaaattaacaacttgcattataaaggatgcaattttacccaagggccttggaataaatccctaaagatatgaaacttatgaggatcttccagaatttatgatgctagaaaagtcaaaatgtggtcttttctgtgcctttcagtttacatttacagtttaaggttcaataatttcagtatcactttgatcccttaaaatagtttatttcttaaagaggcaaaacttcttttaactaaagagaaatcagagaaattcagtgacaggcctgttgcagctggccatttgtggttggtgaactaaatcatccatcaactcagtgttagtgcacagccatctctttccactgtccagcacttatagtgcaaaacacaccaggtttcaaggtagaagtaaactgaaggcccactctgaggtgtgtccaatctccctccctatccaggttgaggatagatgaaggctggtcccaatgcccagagtaggttgtccaagaggccaaggtttgagtcaaaagagaattgccaagtccaaaaggctagatagaaagtaggagcccaggtattgagcccaaacagagaatgatgatcttgtcagagcaagcactgggaaatggggggcagaagggaagccctgagacactccggagataggccacaggcacttaggggcttttagtggctccttaataacctgcaggcccatgcccagtgccaaaacaagggccagattcatgtgatgcttctcagagaaggaagtagattagcaaatcaaaggtggtctcaacatttgccatgaataccttccaagatcttgcaaatccacaaactcatacatgccagtatggctctaggattttcacagtaaaatggcaatagtaccacctgccacagattatcatgaggactacatgagctcataaattatattccaacaacaaattcaggttgagaatcagatgaacaaccaggcacaacaattatttaccaagtgactcactcagacacactagcatgtcatggactttggagtcacttaagaggagtcaaaaccatgaatgtacaagatcttccagggtcatggacagtcctggcactaaatttgaagagttcagcaggcatcttaacagctctaatgttgacagggttcaatgcagtgttaattagccagcaggagttctggaaaaactggagatcatttgagtatacctgaaaatgatacttttaattcaaatttttatggtgaggtaatttttattttgggcagaaaatcagaacggacatcatcatggatgcatgttgcagcctaaatccagccattgatattgggcaggtaggtgctggcccatctgggcagatgccccttcctgggagtcatttcagggtaggtaaaggccttctaaaaatgacacaatgtcacaaagcttgaaattgtccccctccagattgaaggtttgtttattcagggaatggggctttataccactgaagaactgaaatattccccagaaggtgtcctgtactctcggagcccagatgagtacaaaattccaaccatcactgatgtcccagaggagttcaatgtctccttgctgccatcatcacaaaccccactaaccatctattcgtctaaggtaagcatccaaacctaccactgcacggtgtcatggatcgggtagcacaggacagatgaaagcaggtggacaaaatagtaaatcaatgttaactgttatcaggaacaaatcattatagactgctagaatttggagatgactcacccatggcaatcgtgagccaagaattttaataatttcctctttcactgaaaactctaaaactcgccaaaaagctttgacttcttaatagaataacacttttacttaagaccctgaagactataatattaaacaggattggaggcgcaatgcgactgaaatcctagcagtggcagcatggacagaaccctggactgaggtcgcagaagacctgcgttcctgccacagccctatcccctccccatggtcttaggcaaatcactcacctctgaggggctcagggtcctcaccatacccagaaatgcatctagaacagtggttctcaactgggagtgggggaagtgggggaagtgattttgtacaaggcagcccccgaccccattacaaagaattatctggcacaaaatgttactagcatcagaaagcaaagacatcaacccttaataattgctaaagtaatgaaactgcaaattaaaataaagatcattatttgtttgccttgctctatgcagattacgtgaaaaccaccctcagagtaagaacttcatctagggttgagatgtattgttaaagtttcttgactcctcttaagatattaaaatatttcctggccatggtggtgcacatctatagctccagctactcaggaggctgaagcaggggattgcttgagcccaggaattcaagaccagcctgggtaatcaataaataagatcttttgggagacttcttgctagtacccatcctccaaaaaaaaaaaaaaagtatccaactccatctgtagaaatttcatcatgtccaaactggatcccactgtcagcccaggaacaccaggaacttcctctagacctatagtgatgaggtcagggcaaacctgaaaggaaggacaatcaatggggcctttggattctcatcgaactggaaatcactctaaggggaaaaggcaaaagggagctaagagcccacagagagcagcttttaagccaccaagagtaacacagggcagaaaggactcttgagtccttgtagttgcagacagccactcacaagcagacactcaggaaaatcatgggtttgcaggtcccacatggagggtactatgtagaaacaacagagagctaccaggcaccgggagctgtgctaggtgcttttgcgtttcctgatccttgcaacacccaataaagttggcatcactgcccacacttcactgacaaaggaacagaggagattatctcacttacccagagaaacatggggagtaagggccaggattcagactcagtctcactaacttaagggtcacaa

SEQ ID NO: 38767 - DNA, 1129 bp, Homo sapiens
gcaaatgtgtatatagaaagagagaaagaataagaaacatatatattaacagtctttgcattgggcctttgaatgcccttgtcaaaacacaatttgttctaatgaataagaaggtcagggagtcagagtgtctgtatactagagcatgagtattgaaaagttcaagacctcctcttttaataacctccttatagccataaggtaaataacagcccgactagatctatttcttaaatagaaatgatggtaaaacactcagtacttttccctcggaattaaataaaataatgcatgtaaaaatactgtgtaaatatgagtcactctgtaaatattagtgttaaggtcatcaccaaaaacccataaactgttaatgaccttcttcaaaatatgcctctcccaaaaggcttgaaaagtgtttccacattaaatcaagttgacctgctgaggccagaataaacaacaactcttctaactagcagcttcattttcatgggtaaattagcttcaaaaaaggcaggcattggtaagaagcctaaggcatgtttgttaccaaaaaaatcatactgtatgaatgagcatttactatgtcaaaaggttttttttttttttttaacatgtttgggtttgtttaaccttaatcacagcctaatgctggctgccatttttgcatggctgtttctcaggtggttaatttctggtgaggacagtgttgctggtttctactctgagcccagcaggtcagtccggctcaactaggcgtggccagaaacatcatctctatgtaatttccttttcggtgatgggagaaagaaaaatatgtatttcctggaaaatgtgttttgtacagtcatcttaaattccacaaggggaaaaaagtaaacttcctttaaagatatacatatttaacactttcatatgaggacttctccttagaaacagtgatttcatttaaaaaaaatatatatttaggattcagagacatgaagggttccataccctcaaaaattagaaaaatactgccttggagaatgtggaataggcagacattttttacatgttatcttaatatcaccaacagcaaaacgttatttattgagtaatcaccaaatgtggtctatgtgggctgcca

SEQ ID NO: 38768 - DNA, 710 bp, Homo sapiens
aagtcaaaaaattaggcagaaatagttggagacagaaaataatggaattttctcagtcccgccacacaaccctgaaagtcagtgttaagatgccaccgagtacaaagcaatagtgttccttcctttgccgagccacacaggacaggctcccctgtgctcctgtaacttcacatttagatgattttactggctagctattggtcttgttccaaaccattctgccaagataatatttctcaacatctgtaaccacccactgtcactatgtaaaagagttgcattcaacaggacagtttcttcttccaaaagggactttactgtcttctgtaaattggtcacctgttgtttttatttgactgctgtctcttcctttgggaaattatccatcctccactccatgtgttccaaacaagctgctgggaaaggaatgagataagctgggttagagtctctcctgagagataggctcttgcgcaagctacacaagctaaagggccactgtagcaggtcgcctggatggccacgttgagtccacaagcttctgctgctgagctcctcagaagtgtcctcgttcctgcgccccattcttcagctctgccctcaattctgtgacctaccagcacctttccagtggtcagtttcctagggttgctgcaacaatttatcacaagctgggtggcttcagtatgtattctctcacagttctggag

SEQ ID NO: 38769 - DNA, 3220 bp, Homo sapiens
ttatttgtgaaacgttgtcctttaacagaacttcagatgtgaaaaatacagttctgggggaagagcaattgacagcactgacagtgttaaattagccatgaagtgaagatgccagatagtgtggactggggccttgggagaaaggaaggggctagacacttagagatcagactccagccacttccctctgctccccacagccctcccaatcacactagcttcttgcagttcctccaacagatgcagtttgtttcctgcctccttcccactgctgttgcctcaacttggaagggcatagagcctggatttaacaaatatttgcttaatgattcagtagatgatcttggaactcttttaagtggagtaaatgttaaatccttgagaatgtatgagactgccatagaagaaagtatccagaaagaaaaggtatcagtacagaaaagaagagtcagaaaataccgtgcaaaggcacattcagaacgtaaccaggatagctggagccaggattcaaggagagaggtaggtaacattcaatgctcagaggaggcaaacagggtgaagaataaaacactgggtttggcaataatttcaggaacgaacgctgagaaagtcatttttccatgaagttgcgggggggtggggtagaggtcagatagttaattagggaaaagaagtcaacaaactattttatcaaaaggtttagggaagagaagccactctcctcctaccagagagtgaggaagcaactggagagaagtaaactactgtacagtgaataaaaacatggggctacatcctagaggcgctgtgcatctttatctgcacagagttttgtcacgtccacagtgcttttcacacgcactatctaatctgatcgtaccccagctccctgatgatatagcctctaactgaggggttctcaaggtgcggaccagcagcagcatcacagataacttgttggaaatgcacattcatgggttccacaccaggcctacagaatgagaaactacgggtggggcccagcagtctgttataacaagtcctccaagggattctgatgctctccaagtccccatagccaccacactcgggagacaaccgctgcagcgcgcagggaccgcggttggaggacagaatttccccttctcaatcttcggcctgtgtcctcttcgctcttaagggaggtagtgaacaatgagacagcccctcagagaaaagtcgccaggcaggggactcagctggagcgaactccgcccatcccggccagggcggaggcgaggtgcggattccttccccaaaccacgcccccatgcccgcccccagcctccgcccccgcacgacccgagggccccccgccctcgggcttcgacttccggtgctggaggagggggccggcggcgagggactccaggaggacgcgtccaacttcgagaccggcgggggccggctccgctcttccaacccctccatgtgtgaagagggcggacgacgcagcgggggaagaaaaataagctagtctaggacaagtgtccaggcgacgtggaacccagtaagggaataaagaagactggaaacgtctctcccctcccctatcccagtccctcaccctaatccgcgcgcaatagaaaaggcggaagcgcctgtccacgatcagggcggggcaaggggaagaaatctcgcgataggagagcggtccgggcgggggtggcacctctccctcctcctggcgttagttccggtcgcagaggagacaccgccgcagttgccggtacatcggggatttctggctctttcctcttcgccttaaattcggtgagacgcggcgccccgctcaccccgggcggacgctgcgggtcgtggacgccgggcagagggagagggaggcggcgggctggatgcggcccggcttggatgggcccgaacggaggtcgcctcttgaggccgggccggatctagggcctgaaaggccgccgcttcggcagggaggccgaggggtagcggcggcccgggtggggaggtggggtccgggtgtgcgccgcggcgctggctgcgaaggcagtggccgaggcgggctccctctgggccgtgcccggcctggctaacaaagccgccgcggcctctgttgtgtgatgtacgcgtgggggcttccggcgggcggggcggaggggctgccacccaccaccgctgcggccgccgcctccgccgctgctttcgctggagggcgggcggatgtacggggcgcctggggccccggcgcaaagcgcctcagtgactgtggtccgctcgttgcggcggccgccaccgcaggcgacagggtcagtggagaaagagccgcgggaccctacggcgccccgctgtggccgatggggtcctgggcgggaagcgggtgatctgtggctcgggcgggaggcatgggaagggtgtggattgggagacacgttaccggggaggaggctaggactgtgggatatgggcgaaggaggctgggctggctgttagttttgcaggcctgagtggtgcaaggcggccgctgttgcggtcacaggcatgacctagggtaggatggtgctgcccgtaaccaggcttgtcagaagaaggggttcaccttttgacagtgttttagaattggcatacacattttggatgcctgctgactatggtgataatctctctttgcgttctgcgatgcttagtggtcgtggaagatgtaagtgaatgtaaagaggaatgtggagaaaactgaacaattaggtttatgacgggtgatcactgtagcactacaatgtcgcttaaaagtagttcacagcactaatttgaagggtttcttgtagagagaaatgcacattttgacgtacatttgattcaagtgcaggtaattctttgtgcctgtatcgggtataattgccagctttatatcctgagagtgggtgttccatttgattcatatgtgactagactaaggtttgatgttttgctttaaaaattagtattatggcactgatattaaggctttatttctcctttcctagggtgtcttttatgaataatcaaaagcagcaaaagccaacgctatcaggccagcgttttaaaactagaaaaagaggtaaatatttacgttttaatgtctctcttcaaacctccagaacatcttgtgtatcttgccttctctgacaggtacttgcatattactaaagcctcaaaagaagataccagaaagaaa

SEQ ID NO: 38770 - DNA, 3127 bp, Homo sapiens
caccaccctttgccgactcctttttctgactcagcccgcctgcacccaggtgaaataaacagccatgttgctcacacaaagcctgcctttagtggtctcttcacagacacgtgaaacacacgtcattctccccgtttaaacgtgtaccagaaactagtctccaactcaaatgcaatcataaatgttcctcaccaacaccgcattactgattactgcaaacgtaatcagagttatatctgagttgctgacagaatcatcattacagagcatttccgtaaacggacaaatgaaactaccaaggactttaatcacacacgaaggcaacggtggcatcagaatataaaaacaacaaaacaccatctttccagtaccactcccaagcacatacaacataatttatcctaaacgcaatgttaacacaatctttttgggaatggtaggagccaccttcttttcagaaatgcttcgagcaaaatcgaaaatctctaacctaacaacttgaaaaagacattatacagaaattacttcatcaactgccgttctttcttaccggcgggacccctctgtgtcttccgctacaattcttttttttttaacgccagtcaaatttagcggtaggggttgtatactaattttcgtgacactaataactattaagttctgataacccactaccattggaccagcctgagtataatttttaaagccctccaattgggtcgggggccgtggcttatgcctgtaaccccagcactttgggaggccgaagcaggagggctgcttgagcccaggaattcgagaccagccagggtaatatagagagaccccgcctctataaaaaataaaaaattaaccaggagtggtggcgcgcgcctgtagtcccaactactcaggaggctgaggtgggaagatcacctgagcccagatgtcgaagctgcagtgagccgtcattgcgccacttgcactccggccggggcgacaggggcgagaccttgtctcaaaaaagaaaaaaaggaggctgggcgcagtggctcacacctgtaatcccagcactttgggaggccgaagcggatggatcacctgaggtcaacagtttgaggccagcttaatatggtgaaactctgtctctactaaaaatacaaacattagcccggcgtcgtggcgggcgcctgtaatcccagctatcccggaggctgaagcaggagaatcgcttgaacccgggaggcggaggctgcagtgactcgagatcgcgccactacactctagcctgggcgacagagcgagactccaagaaaagaaaaaagctccaactgctaacccaagaggagtggctgaaacgccatcgcataaaattctcggtcacctgacttctgtcacaacgctccttcaaatacaccccagcatttctctttccttgggttcctaaatctggtttttgttaacaccactgaggacaaagccactcgcgatgtttacgccgacactttcatcattagacattaactgtaacccctacgggttccgtctctttctccacttactccagacaacgtttccccacagctgcttggctcacgcacattctggaaccccagcaaatcccccctcaacggggagcctcgcctttccggccacagggccgaagccggcctccgcccagccgccatcttacagctccgccgaggcggttcacaacatggcgcccgcccgaccgtcccgcgtcaggcggcgccgcttcctcagcggagggcagaagctccaagagggcggccggcctagcaaacaccgtaactacccccgcaggccggatccggcggcgacaggctcggccgcgcaggaaagaggggcgcgccgccactgtgcagcctgggagtgaagggagcaggcagtcgtcgcgccggggacggcgggcagcaaacaagcaggaaaagggggcatcgccaggcgcccgcgaggctcacaggaacggccctgtcacctagtccgctccctcctgcgtcttaccgtcctggacaaagactccaagtcgaaggagacaaagcttgtaacgcaatcacgggaatcacgcagctgactgcgtcgcgcaccaacaacaaaatggagctgacagctgctgcgtcgagactcgtctcgaaaacactgatgacgcagcgagcgcgtctccgccgcggggcgggtcatgcacggggcgagcaggcggaaagggcgggcgtgtcgcgcgcgcgaccatcgtgggcgcaggcgccagggagggaaccagagcccgctgtggcggatgaaaggaagccgtcggcgtgttgtccccactcactgatagtttttgaactctagaacaaggaacaacttgtgaacaaggaaaagtgagggaatcagtatacacagtagcatgtaccctgttagcgaccactaaaacaattgctttaaaactaatacttcacggcgcggtgggtcacgcctgtaaccctagcactttgggaggccgaggcgagcagatcgctgagcccaggatttcgagaccagcctgggcagcatagcgggacccgtctctaaaaaataaataaataaataaaatataccactagcgtcagatggcttcaaattactaatgggatcagtgtgagccaacagaaatcaatgttctgcaccttgatcctcatggtgcctgcatcaggcccaacgtgggcagccagcatacctccctgtctatgatacttttatggccgtaactgagcacacattctaaaaataagctccttgataagttttgaagggaaggccagcgttaaagatacagagtggcagctctacagcaactgcgggctttatgtccagcctaagacctacagaagtggggaaccagcctaatgccagtgcccaccagtggggtacttttaggtaagggcgggaggggcctgggccatatggcttgctgacttgctgccctgcaggatgttaagatgttcccataatgaggcggttctggcccttgttcccgcagaatgtggtggtagttttttttgttttgttttgtttttgagacggagtcttgctctgtcgcccaggctggagtgcagtggcgcgatctccactcactgcaacctccgcctcctgaattcaagcgattctc

SEQ ID NO: 38771 - DNA, 1046 bp, Homo sapiens
tggaggttgcagtgagtcaagatcgcgacattgcgtaccagcctgggcaatagagtgagactctatctcaaaaaaaaaaaaaaaaaaaaagaattgcttgaaccctggaggcagaggttgcagtcagccgagattgcgccactgcattccagcccaggcgacagagtgagactctgtctcaaaaaaaaaaaaaagtcactagtataactggcactgttacggtgggtagctagtcaggtatgaacaaagcaggagatggctcccccaaacacacactaggagtgtcgggcaaccatcaggtgagatggtcaggcggttattaactctcttgctgaagtagtaattggtcacagctggcaccagggaacggcagtctcctaatagaaaacacctgaaactggtgagcagcagcttcccaataagatctcaggagttgggcaagtggggagaagtaatgcaagaccttggaagtatgccagtgtataaaacgccaagtcaaaagctcaagccacacatttatctttcaagtcgcccgcttggtcctcttccaagcgtacttccctttctttcattcctcctctaaagctttttaataaactttcactcttgctctaaaacgtgcctcaccctctccttctgcccctcagtcgaattctttcttctgaggaggcaagaattgaggttgctgcagacctgtacggatacagattcgctgctagtaaaaagcacctcagtttagtggaagatataaatggtgacaagaggatagctgtaagctaactccaaactagtcaagaaagaatcaaaacattaattagaccagccattggaagaaatgagacaaaccaagaactgatgccaagacaaacattttgagacggagttttgctcttgtcacccaggctggagtccaacggcacgatctcagctcaccgcaaccgccgcctcccggggttcaaacaattctcctgcctcagcctcccgagtagctgggattataggcatgtgccaccacgcccagctaattttgtatttttaatagagac

SEQ ID NO: 38772 - DNA, 2263 bp, Homo sapiens
cccggctatagaagatatcctacccgattcaagcctcccaatctcctacttgcccggcttgctcttcttcaagagcctccttgcaagtcccccaataacccagataccttcccttagggtccaggcattgggtgtcccttttgcctggaattcttatactcagacatctctacggctaatttcctcacctccaaatttctgcttaaatgtcaagtttaactgacctgacaatcctacacagaactgctttagcccttcagccctaggacattcctatttccttctcccacagcacttatcactaatatactatgaaattcgctttttttttttttcaccacagcacttatactaatatactatgaacttttttttttccaccacagcacttatcactaatatactatgaacttctctttttttttcattttgagacggagtctcgctatgtcgccaggctggagtgcagtgcggcaggatctcggctcactgcaacctccgcctccgcctcccgggttcaagtgattgtcgtgtctcagcctcccgagtaggtgggactacaggcgcgcgctaccatgcacgactaatttttgtatttttagtagagacggggtttcgccgtgttggccaggctggtctcgaactcctgacttcaggtgatccgcccgcctcggcctcccgaagtgctgggaggccgccgtgcagggtccttcttttactctgacgttgcaacaacagcctcgccgcccactgttcactcgcagtatcccaagaactaaaccagtagcaacacagaactcagcaagcattcgaataagtgaatgaaagaattaatgacgttactccatacttgggcttcaccacttcgtctagcacagccgttgttaaaacaggaaaaatgcaatcgcagatgccagcagaggtctgttggttcaaaattatagtttctttgggccagcggaagttgggcgcgggacccaagagagagaacgccccttaccgcctcacctccttcctcccctcatcttcctatctcaaaccaaaacgacaatgcaatttatccccaaccggaaatttgacagtgaaagggagctctactaataattgcactgggacaagaagtgtaaggcgaaactacctgggcaacctcaagcaatgctttacactcggctgccaaacggaaaggaccacttccgcccagctctcccgctacggggagccaagtgccacagcatccggagcgccgacgcgggaccggaagtgacgcagagaagtttccgggactggtgagtagtgggcgatttaaaaacccgcgagtgtagttgtgaccttcgcggtaggtgccggttggggccggctgtgattgttatcttggtgctgcagaggacagcagaagaggagattgggtcagaaaactgccctgccgcaccagagcacagcgcactagtgggacaggggtcctgactcagacttaactggctgtgtctcgtggtttttcactgtcctggaaaaggcctgaagtggcactgaaatgaggcatagatgaggtaacgtcgagggagcggtttgcaggttgcaaaggggccctactgatgctgcttaatagtaaacagtgcttactctaggacgggagttgtttccagctttacgtgtaaatctcgcgatattgtggcctgggcactatttccattaaggaggaaactgcacaggataagtcatttacctgctgttgcacagctctggctctaggattcaggctggcttcagagtcggtgctcttaaccgccatactatgttgccttctgttgtcgttgttgactgtggccatgtagcttcgcagtttcctcatctgtaacagtaaataactcaaaacctgcatgatggcccactagggtttcactttcgagcttgccagatgtagaaaatgctggagaatggagtactatgaggaccattagaagatctttcaaggccggacgcagtggctcacccctgtaatcccggtactcttggaggccgaggcaggtggatcacttgagcgcaggagtttgagaccagcctgggcaacatggcgaatccccatctctactaaaaatacaaaaattagccaggtgtggtgtttagcgcctgtagtcccagctgctcaggaggctgaggtgggaggatctgcttgagctcaggaagtcgaggctgcagtgagctgagatcacgccactgcactccagcctaggcgcctagtgaaaccctgtgtcaaaaagaaaaa

SEQ ID NO: 38773 - DNA, 1516 bp, Homo sapiens
gctcactgcaccctctgcctcccaggttcaagcagttatccagcctcagcctcctgagtagctgggattacacatgtgtgccatcatgcccacctaattttttgtatttttagtagagcgggggtttcaccatgctggccaggctagtctcaaactcctgacctcgtgatctgcctgccttggcctcccaaagtgctgggattacaggtgtgagccaccgcgcccggctaagatagtcatttttgtgagcacacagagataggcagacattccaacacctcttggatgactcaacatgtctaataagcaccaggcacaatgcctagtacaagtacctgtcgcccaggagtacactggcgtgatcatggctcactgcagccttgacctcctgggcccaagcaatcctcccacctcaaactcccaaatagctgagaccacaggcgtgcgccactatgcctagctaatttttaaatttttgtagagactgggtcttcctatgttgctcaggctggtttcaaactcctggcctcaagttctcctcccgcctcggcctctcaaagtgctaagattacaagcatgagtcaccacgcccagcggtgaatcactatttaacacataactttgtgtttagttatgactatgaatggcaaaaagttacagtgtttctttatgtcaggggtcagcaagctataagtctatggggccaaacccagcctttccacttgttttaagtacagctttatgtagccacaccatccatacgtattgtctgtggctgcttttcagctacaacagccaagttcagtagtcacaacagagactgtctagctcacagagctgaaaatatttactgtctggccctttacagaaaaagctggctgacctttgctctgtattaatcatctacatgcacactttcaatgcatgtgtacagtttttattcttttcttgctcctatgtcatatttgtttttgatgatattaaatgaaatgtaatggcatggctgttgactctattaatagaaaattagacctggacatggtggctcaagcctataatcccagcactttgggagaccgaggtgggtggatcacttgagtctaggagttcgagaccagactgggcaacatgaagaaaccctgtctctacaaaagaatagaaaaattagccaggtgtggtggcgtgtgactttagcccgagctaaagggacactgaggaaaggaagctgaggcaggaaaattgcttgagcctaggacatggaagttgcagcaagccaagattacaccacacgttccagccggggcaatacagtgagacccttaaaaaaaattatgatattatttgtgggcttgcaaaaaaaaatagggcataaattttgtatctttatattcattattctattaattcatctgtattgtattttacacaataaactggtctctgtctaatgatagctttagattagtctattatctggtcctatctaaccaatctattttctaatttttttaaaaag

SEQ ID NO: 38774 - DNA, 1590 bp, Homo sapiens
tagctccttactgcagtgcactgagatatttttactttaaacttcaacttaaccatgcagatctcttgtacatctctaactcattcaacatctaacagaaaaactgctcaataagtgatgatgtccgtttaacgtgcagtgcccttatataacggtgtagggccgtgctatttttcttcagattgcaatttaactgcgggaaagtgtaatgattctattaggatttcaattgtaaaatgaaaagtaacgtctcaacatctttttaattaaaaagctctaccaaaagagcctggcttatcaacattttacagccaagcatggctccaaggtgaccgatcagttagctggcaggacacattggtgcctccaggctgggatgacatcaaaggttctagctacagtggttctgggacgcgatctcttcctcttcatacctcacagggcactttaccactgtcgttacacatcttcacagttctccttttccaaccagagggcttcgtaagctgggaatcaggtaggttagtatcaggcgtcccttgcacaaaaggcctataactgcggggcagactaacgaaaggtcctcccagagtgagcctctcacctcaagtcttaaaggactttggcctgcgcctccagcctctggccagttggctgcgctccaccagtaagggttctcgagcccccgggcagcctgcggggggcagcgaggcgcaaagaccatgccccaagtgccgagggaaagtcctgagatgcgcgacttgggacgctaggggccaagctccgacgcggggctgggtgcacctggacgcacctcacacgccgcgagctaagcagaaaagggaggcaggctgccccgacaccccactactcaccgctaggtttccgtctggcgccgatccggctgcgtcacgccggccgaacgacaccccgctgagtcgccgccgcagggaaggtaccttcggccccaacgggaaaagccaatttccagtaattcgcgcccgaccaccggggaggtaaggagcaccggaggccagctgggggatgggaagcctgcgtgcggcacaccgaatctcccgccctgttcagggggcggtgcccgaggaagccaataggaagaggagtcggccaagagcgacggctctgccgtccagtcggcgccggccattcggccccgcccatcaggaaacctgaggaaaacggattcttgggccctgagttgtgggccttacctttcctttcttctttccgtttccggggaagggaaaaggaagtgttgtttggatctgaggaagtttgcacagtagctggctgagtggtagctgtttgtcttgtagcaatctttaaaaagtgttctttggggtcgggcgcagtgtctcacgcctctaatcccagcaccttgggaggccgaggcgggcgaatcacctgaggtcgggagctcgagaccagtctgaccgacatggagaaaccccgtctctcctaaaaatacaaaattagccgggcgtggtggcgcatgcctgtaatactagctactcgggaggctgaggcaggagaaacgcttgaacccgggaggcggacgttgcagtgagc

SEQ ID NO: 38775 - DNA, 1033 bp, Homo sapiens
ttggcctccagcctgggaaacagggccagaccccatctcaagaaaaaaaaagaaatcacagaaattttcatatcgaattacatttgtttcttatcactatgtcatgacacttttctctggtcagagagcttccattctaccctggataaaaatgtttccaatctcatctccatatatttagctaaacatttttctgggtgtttccatatgagattaacatttaaatctatagactgagtaaagcagactgcctttcctaatgtggtggatgtcatttaatcagtggaaagcctgaacagacaaaaaggctaagcctcccccaagtagagagtcagttcctcctgcctaaggacattggctttctccagccttcaaactcaaactgaaacattagctcttcagagtctcaagcctgagtgactgctactatgttatctctggttctcaggactttggactgtgtctgactggaactatacagtcaggtctcctgagtctccagcttgccaactaccctgcagatctcgggacttgtcagcctcctaaattgtgtaagccaattcctataataaaccttataataaatcacacacaaccttattggttctgtttctctggaaaaccctgatgaatatagttcctgacttgttcagaatgacctaaggatatatgcagaatccatctcttatacctctcagaacaggaatccaagttatagatgggaatgcctggccctggtatcaggcattccattaccatgtcttcttcagtagaacaggggcatataagtgagattggtggctaggcagatacccaaccaaagagcaaatgtaaatctctcttcttaatgacagagagtgactctttcaggacctccttatcttgacttttgggaaggaaaaaaccctttcctttcccctcacagagcagggaatagtttctttccattaatactccccttccaaagaaggcctctccccttctccctcttaagcctcataaattgatggggtgggcagaatcatagtcacaa

SEQ ID NO: 38776 - DNA, 624 bp, Homo sapiens
acttaaatctgaattgcatgtcaagacagttaaagggccgggctaaaaaacacactttcaaggtctattttagggcaaacaattaaactcctttacaatcattgtttcaaattccttataaacagctccaatactgaaatgtttcatcagagagaacttctataacgtataaacgatcatctaaccacactatatgctaatttggactagtgtttctttagctacttggtaatttcctactcgatactcaacttactgcattctacaatgacacctactggccattcaaaatcagccattagttctctaagacagctctagtaggctggttacataagaagaaacacacacacacacacacacacacacacacacacacacacacacacgcataaaagcaacacacacacacacacgcataaaagcaaagatttaactggtactcaaaacactacagaattccacctaaaatagaaccagaaattttctttgtgactgagattgcattattcttggaaaaggagaaaagacaaagaacaaaacaccaaacatcaataaaaatttttatctaaagcactgacaaatgtctcagtactgagaacatctgggaacaaacaactttaa

SEQ ID NO: 38777 - DNA, 2163 bp, Homo sapiens
accaccaccttatttgcacagtccctaacttccacaatatcctggggggaggaagggatctaccaactaattttctagtcattttccaacttacactgagctcctactgtacatttttaaaggattccccacttttctgaagatctttaaaaaatgttgtcagccttgaccctcaaataaattcacgaactacaaaacatgaacctggccacattcatcgcaaactagtatctgtcaagtccataattgggataagctcttcgtgactactctatcctccatgctaccacccttcgcctagagaacctgccaatgtaaatggcactcaagccaatgaaaaaagtgttctaacacattaataggttgcaagacctcctctcccaggagggacaacctagttgtttgggtaaataacagccaaagattacataatgtacagcaataatgagtgttcagaatctgaccgccagtaaatatttttcttctccgctccccctcaccacccccaggaaatggccctaagaagcaatcactgggatttctcttaactgtcttcaatgccgtgtccttttctcgcctggggctttgtgcaaagaatcccttcagccctcacgacaccgccttgctcccgcctctcctccctctctgctggcgccaccgcagcccccacgccctaggtgggcccccacgtcgccccacaaggctcggcttccacccgcctcggctgccgccttctcctcctcacgaccctcccaagatgctacctggtttacgagaggttccgggaccaccaacacaccggctaccgcctttccagaccaccctcgccagctcccgtctgtagtttccgcggccgaaggagaagaaaacccctcttcatctagcactttgcctcccccaaagacagcaccgccgcctacctgtcaccctgctgtctccggcttcctaccgccgccgcctcccgcagcagcctgccaactgcagcgcaacaaccaaccctctcattgggtgagaacacgctctcaacaacagcctcccttattggctgcagtatgccggcagccccgccctgtgtgcggtgtctaaggattccgtccccaagcaaggacaacatattatcttccccgcccttctcttttctacagtatctgttacctcagtcagattgaggatgcacatatactgggaaaataatcgacttccagcgtccctcatgtagtctctacctgattcaggaatctctaacccagtatcggaacgttaagcggcttctccgctttcctgccgtgagaaactcgaggtgacaacctccgtttccggttggctccggttgcagagttgagtgtcctgagaggtcagattgctgtcaggtaaattagggagttggtgggaggcccgttgattaggattaagagctagactctattctggggagtgcagaaaaggagagactaaatggagaaggatgggaggctgggagggagatcaaagaactagcaggcgagaactaatgaagtcctagtttagagttggggtaggaagaggtggttggaggattcagtgatcattactgtagttgttaaatccaggtgcttgttcccgcttctgccacacgcaaaattgtctttgtttgcctttggatcgcaaaggcagaagaacagcatcactaaaagtaataacagttcatttgttttttatgttctaatattcatataatcacagtttttaatacgaggaagttaagatatatacttgatagtcttcggtaaactaaaattgcatgtagtggaagtagcattatcttcttatttctttcttagggaaaggataccagcacattttcttagagccagcttcctttagtggaggttgatcttcatgagacttttagattcacttcagacatagatagcttttaaaatttttggttgcatgttttttctttatttaactaatttccttactgttattatttgagctgctctgaaacggaaataaccaccatttttcagtcctcagcacaatttaagtcaatttttctatttttattttttattgtcaagtatatatacagaagggtgtataaaacatacattttaaaaaattataactaacagaagcagacactcctgtatccacctcttagattagaaaataaagcat

SEQ ID NO: 38778 - DNA, 4517 bp, Homo sapiens
gagagcgggaaatccaggctgcagtgagctgtgatggcgccactgccttctagcctgggcgacagcgcgagaccctgtctcaagaaggaaaacaaaaaaaaacaaacaaaaacatacacacaaaaaaccacaaagtgtgttcacgtttgctatgactcccagacaacaattgtaaacactcgcgccgggcgtggtggctcacgcctgtaatcccagcactttgggaggccgaggcgggcggatcacgaggtcaagagttcgagaccattctggccaacagtgaaaccccgtctctactaaacacaaaaattaggcgggcgtgctggcgcgtgcctgtagtcccagctactcgggaggctgaggcaagagaatcgcttgaactaggaaggcggaggttgcagtgagctgaaattgcgccactgcactccagcctgggccacagagcgagactctgtctcaaaaaagaaggaaagaaagaaagaaaaaaaaaaacactcgcagtgtttactcctaacgcgtggaacttgtgtcgacatccacccccggttactgcatactcagtcacacaagccatagcaggaaacagcgagcttgcagcctcaccgacgagtctcaactaaaagggactcccggagctaggggtggggactcggcctcacacagtgagtgccggctattggacttttgtccagtgacagctgagacaacaaggaccacgggaggaggtgtaggagagaagcgccgcgaacagcgatcgcccagcaccaagtccgcttccaggctttcggtttctttgcctccatcttgggtgcgccttcccggcgtctaggggagcgaaggctgaggtggcagcggcaggagagtccggccgcgacaggacggtacgtgccccgcgctcgacccccgcgctggcggcgccggagctgtcccagaccccaagccccgacgcccggccctgagtcagcattgcagcaggccctgcgccgccgcgccccgcgtcccaccccgcgccgctcctcacagccctgcgctccgggaaactgcaggtggccggcagtggccaggggatggcgggggcgcttctggaacctgactcagttttgtaggttccttatctcggttgtttaccgcgggctttgcggaatgcccccgcttccgtttccgcccggctccgaacccccgaaccccttctacccgcaactccgccccggattcccagaaaggggcgacctgggccacagcggtacaagctgcaccccgatggacctgagagaccggaagtaacccttggccaactctggccgccccctgcagccgcagccccagaggcccacccgcgagcttcagtggcgggccctcagcgtcgtgtaaactttgcttaaaatgatcttgagagttcaattcttggggtgaactgttgagaagatctggcatttttcctttcgaaagttgttgggaacgtggactttcccaacaattgtgtatgcgctcgatctcactcagtgggagccgccgccctggagggaatttcacaatagcctggtcagggcggttattttccagagcagtttaatgtctattttgcccaagtgcaaggaaagcttgccttgggaaagctgggaatgcttggctaatgaaaagtttttagagccttttaaaatgaacctgtttctgccacttttccaccgcctcaaaacgactgggaaatgtaaactggcttcaagatgttcttgcttgagggtgtctggatttggacagaaggccatgttcttttaatattaacagtggcacgcagtagaacaaaggccactgaaattcagaatcagtttttggctccacgggcaggaagtaaattcaaggacgccagaggtcttgcgaatattttaattggttgacatttgaaatttgttcttaagcaatgaggggtgaaaccagtagggggatagcgtatagcataagtaaagctttttggacatcaacaaactgcgataatctacaacagacagcgggctctggaaggtttgacctgctttagagagagatttccgataagaggaacggagtttttggcacttttcggtttggtgattcccctaaataaccttacaaaagtttcgttgaacaaaaaacctggctggagctccaagatcttttttttttttttttttttttgagacagcatttcactcttgttgcccaggctggaatgcaatggcactatctctgctcaccgcaacctccgcctgtcgggttcaagcgattctcgtgcctcagcctctcaagtagctgagattacaggcatgcaccaccatgcccggctagttttgtatttttaatagagacggggtttctccatgttggtcagtctggtctcgaactcctgaccttaggtgatccgcccgcctcggcatcccaaagtgctgggattacaggcgtgagccaccatgcccggcccaactccaagatctaaacaaaaaagactgggttgaaagggagtttttaatgtttactgtttgctttacatccattttcttgttttgttaatacttgctttacttaagcttttgggtcaaatgtcctcgttaaaatggctttctctagcgactttatgttttacgtttctgtttgtaactgacatttgaccttcttttaacacggtattacttgcttccttataccggtttccaaggtgaagccatttgcagggtcgctgggtttccccctccccccgaaagtcttgcgcgacccggggtgggccggatagtgtgcagttttttgagccttgggctggggacctccaggaagctgaagcggaaattgcctaggcccctggggcattggaggtcctaccgcagctcctagtaggtggtgggggcgcagcggctgtccccactcagtcctggtggggtcgcacgtaacggtcctgagctatgcataagccgtttgaccacgcatggagaattttaccacccagagacacgcgagtggccctgtgcaagtttcaactgcgcggggggcggggaattccgcagacaggattctagaatttatgtcttgtgtggtaacatttcagccggtgggtggcggggattaggcgtgaagcggttcagcaggcagaggttctcggacgccctccggcgaagccacctgttgatgcttttgactttctgtccttgttcctcgtcccatctggagcatttccaattctggttttgcggagcagcaggtctgagcttgtccggcgagggtgggagttggtcccggcggagatccagtgggaagagccggcggctgcccgggcgtgagtagaccgagaatcctgcccgatccccgcccctgggctggtgtcgccctgggctcctgggacgtcggggcactgtcccccgatactggcagaaaaggattgagtcctcgcttttggccctaggtctccttgagcctccagaggactcacaacactccggggcatgttgctctttcaaataccaggaatggactctggggaatggggcacccttgaagtctgattatttcttccctgtagagccccaggggctaattaaactcgtgtttatggactccaatgcctccttgcctttaattcagtataatcctaccaacatttattgagcttctctgggccaggcagagttctgggtgccgaggacatagaaatggatctaaacttggttcttgtccccataacctcacaatgtggttgaggaagactcagcagttacctacacaggtaacttcgagtcaaggcagtttagacaagatccactgacagcctgactggaggaagcctgtgggccatggtggggcagttatgacaccatgggttctttttgtttatttgtttgtttgttttgtcttttcttttagtatgcccaggtaacttgcagaacccggtcgttctttcttactatagatcagtgaggtgaaaagcactatcattattggaatgccctgtctctcccttatactctcttcctgtcatctcccctcagaagacttgacaccccaccctggtgccctttctctgtactttcatatgctcagcggctgtctttgcacttgcttcaggattgtacctaacattctgtactgtaatgcattttcttcagacactcttcagtcaagttgtattataattatgagttaaaatacatgcaaagtaaatagagaaaacctccaggggttcattccgtagagataaccaaaggtttcagtttaatgttttttttttttttttcacacatgtgcgctctcaaatacagtcttttacatatttttaaaaataaacactcaatttttttggtttattttctagtttgcaagatatttcattttttaaaattgtgtttatttacaacctgcttttttctaaaaaagattcaaggtggggccttcttttcttttctttttttttttttttttttgagatgaggtcttgcttgttgcccaggctggagtgcagtggtgatcatatctcacttcagcctctaactctaggc

SEQ ID NO: 38779 - DNA, 1303 bp, Homo sapiens
tagcaggggcaaacgaggcactggcttcaggacaacatgtgagggggtgctcaaaaagtcagtcatcaagatagataatattttaatgcaatattttaaaaaacagacataaatgcaaaaaatctatgatgaacaaaataccaacattttaaataaagacagcgtcagtattgctgattgtcccttttgcctcagattccagtatggctcaggactgagtgtggctgtgtagaggagatggtggtgaggggatccaggtggaggcatgttgagaagtgaattgtggttgaagaaactgaagcactgagtacagactattccttcatgaggtcccagctttatgtgaaagggaataaagtgaaaggatggtaggtctaggggaccctcaggcttttttgagggtttggctttattttttaagatggaagagacttgcacatgtttacaagctgggaggagccgtctctggaggtagagaggatgaagagagtagacataggggattagtagagacaggagggcacacagggaggcttagccctaggcaagcagagggacaggagggaccagctggggcagtggaaaggtggaaggtggcaggagtttgtgcctgatacatggatgagaaatggcactgggggtggtgttgggatggaagagagttgtggagtgttggaggtttcccacactccttgaagggtgtgggaaaggagctgaacagagtcttcctgtaaatgaaactgttgagcagccgtaggggcccagctcaggaaaccaccagggtgtggtggtgagtagttttcagattgtgttatctcttctcccttccttcggaacttgctactggaggtgtaggagtggtagaggcttcctcattaaggcaggggtgctggagcgatcaaccatccctgtttgcctgggactgaggggtttcctgggactcggtcaccctagatgttgcagggctggcagtcaggagggaaaaaggccagataattgaaaatgctggccagagtttgtagcatgcgctgtctgattgttgtacctgagcgagttagagaaaacgccacactttgagatgaattaagagtccgtttatttagccggcggccaagagacagctaacgctcaaagttctctcagcctcgaagaaggggctagattttcttttatactttggtttagaaaggggaggggggggtctagttaaaacaattttacagaagtaaagtaggcaaaaaagttaaaaggataaatggttacaggaaagtaaacagttccaggtgcaggggctttaagacta

SEQ ID NO: 38780 - DNA, 4052 bp, Homo sapiens
tattgctggccacagtatcttatcagttaattgcattcttggatgtgctgggagtcagcttgcacaagttaagtccttgcggaagggctgccagtgaaacagccaagatggagtctgtctggctctcttagctaagggagagtcaattcaggtgaaaacaaggctaagtgattaaaggaaagggagagtctaaaaacagcgttagtaaaaacaaggttgggcattacatgatcactgggtctccactgtcagagggtctttgagctcagttctagtggcagcctcctgatcctcacttccctggctgaggcaaggttgttgcagcagccccaggagtctttgttagaatcccaccccagagctccttcctccagtcctctcagcagttttgttagttccagtattaagtgtaatttctacaaaaaatgcctggaatatttctgtttccagaaccggatgctcctgttagctagtgtgtgaaagataactctgacttgcctaagctttgttgatgttttgaataataattggcgatagtctcttgacttctgcaagagaaatgaaacagaaattggtctcaagttttagttgctcttgtgaaggtcagggacagtttgtaccagggtgtgggtgtggaaaagaaggggagatatagtcattaaattagaatatgcctgtgaggggagttaaggggaattcctttaaaattctagaaaacacacacaggtgccaattttgtctggctagggaaaagtaaactgctgaaaacacttggggggagaaatgaagctaatggtatcttgatcagtcaggaggattgggtatttgaaagcagggaagaaaaataattggacttggatattcctttgccccttcatctgagtaaggtgaaagcaagtgactcttcagaagaggcgaatgggacactgagtccagcagctcaggcagggtggagttggtaactgatgggcacaagtcttttactgggctctaaagaactcattcatctgggtgtggtggcttacacctgtaatctcagcatttcggaaggctgaggtaggagaatcacttgagcccaggagtttgagaccagcctgagaaacacagtgggaccctttccctacaaaaaactgaagaccttatgagcttccctagtctaagagtaatttttatgttaatttcttggcttgggcttaaaccccaacaaagtggtgattattcggaccccagccctacctctccctagtatgctctcctttctcaagtactcaccacctctagccacagtgaactgcctccagcatacacacacgctgctattttgttgcatctgagtgggctggctccacacgggatctgtagtttccttttgatattttctttcaatgtgccagatgctaccactgagtaatctagattttgctgccaaactctacccccgttagcacagagggaagacagtatgccagtgctcttgctgagtgtgcgtgactggcagaaagcagtcatgggtgtgatggttggaagaaacaaactgagcagataatgttttttaaaatgattatctcattttgttaactcttggtggcattgttatattgttgatacttatgaattacaaaagttagatgactgtaaaaaaatagagaattaagcatttcatttctagtagttctgtttggttctttttcaaatatgtcagtgaatttgtataatatctcatttcttagtcttgtgtttaatgattttatttttgtgtttttataattccttctactgcatatattttatactttaatttataataacaactgttgacaaaattgtgactattcattaatacagtagaaaagaacttggcctccttttcatggaagctgatgatgagattaaagcactgttggcctgcgagtggagtatagatttgggctgtccagaacacataaaatttgtatttatctttctgataaaaaaaagtaaaatagtctgagtgccaatttttccactttcattgagcacatttaattttagtaaatttaacttagcaaatttaatttctccagttatttacaaataatcatatttaagtgaagttgggatgaatgggcaagcccatttcaaatttctaacctaatttttcctcttgttttcatataaaatttttctatttatgtgtttttattttaagatagctcaaatcttttgtggactgatactgtatgtatataaataaatggattcagtgcttctttcactaaatacagctagataaatatataaatatacttgaacacaaatacaaagcaaccattggcaatttagagttgggttgtgtttccacttattttttgttaataaatttgattttaacctgaaatattgtcttgtaggaacagataaagaacacaagaggtgatttaacataagttttagctgtgaaacttagagtagataggttagcaacttaaattttgaaagaaaataggatgagtttcaatggaagaaattaagaacacacccattgcatgagctccttacccctcctacccagccccctcccaggagtgagatctttccccagatcctctgtaacttccagatgttccactgagaacatcagaagcactaatggcaattgctgccatgtagcagtgcattgagagtcagggcctctggcacctccatggggctcagggtctgaagacgtgatccaaacctgacaacttggtggcaggttctgtgagcattcatgatgttgtgaaaagggcttggggtctaggaggatggcagcagaggtttctgccctcaggtgtgagtgaggggcttttgaagtaggagagcaactagaaaaaaggagtggcacagggacagaaacttcttttctccattgtttgttcaaggccacgtgggtggagtcattgaggtggaggtttaactctgtgacataagtttccctgatttagtcaggctgtctgtcgttgggcttttcccacttccttctactacgtacttcttccctattcctcctactgaggccattaaacccttagttgtaattttccctgaacatgctttacattctgatgaattctgaaaaagaatgtggggtttccttgcagatgagttcatctgttgtttcatttcctttacaatgtaggttttcttctctgtctttttggattagtctgtttttggttctgtctaccaaggatccctttctttagacttctatagatccctttctatagaacttaatctacttaagtcagggagaccacccagaaggaaagagcccatactttcaatcttaggcataagttagcttgataagattttcagaaaaattcccttttaaccacagaactcccccactggaaaggattctgaaagaaatgaagtcagccctcagaaatgaagttgactgcctgctggctttctgttgactggcccggagctgtactgcaagacccttgtgagcttccctagtctaagagtaggatgtctgctgaagtcatccatcaggttgaagaagcacttgatacagatgagaaggagatgctgctctttttgtgccgggatgttgctatagatgtggttccacctaatgtcagggaccttctggatattttacgggaaagaggtaagctgtctgtcggggacttggctgaactgctctacagagtgaggcgatttgacctgctcaaacgtatcttgaagatggacagaaaagctgtggagacccacctgctcaggaaccctcaccttgtttcggactataggtaattcatcaactcttcctgaggctgggtgggtgggagggagtgaagtgtctcagactctactgaatggcagaaacgaggataataagaagtgcagccactttactgtctctgcccacttatccaactgccagatgatgtcacttcattcctgtgagccctttaaattcttgaaacttgttttcttgctttctttttctttctttcttttttttttttttttttttttttttgagacagagtctcaccctgttgcccaggctggagtgcagt

SEQ ID NO: 38781 - DNA, 738 bp, Homo sapiens
aacagatagtgtatttcactcttttggctaggttagcttcagagaagaactgtcatttgaaagctgagtgtctcagatgggttgacagcatgtggtatgtgtatcttacataggacctgtcatctgagaagagaaagggtcggtttaatctttcattctctgattactcttactctagccctcagaagtggtttatcaagaatatttgattatcaagaatcaggaccatatgttgcttatgtgtagctaggcaatgatagaaaagcaataactggacatttattatgtacttccatgtgcttggcactgtgctgagtgctttgtgtgcatttaatcttcatacaaaatctgtaaggtatctattattatcctcatttagcatatgaagaaacacacatacagaagttaaataacttgctcgaggttacatagctaataagtggcagaattaggattcctagccaggtctgtctggcctagaaatccgactcttaaccatgctgtactttgcccctgtgttgaaggaacaggtggaatgtcaatctcatgttccaacagcttatcctaacctggagctatgctagcaactatactatactgtaacatcagattttattgggctgttttgaaacattctaatatgctagcttagcatatttttcttttctttttttttaatttttgtgacagagtttcacttttcactcttgtcgcccaggctggagtgcaatggcacca

SEQ ID NO: 38782 - DNA, 5937 bp, Homo sapiens
ccatctaaataaataaataaataataataatcaaaccaaatatttatattaatttggacttccaaatagatttgaactgttcagccatcattgaatttgatgaggatggtgataacttcaatttagtaatttcttgctaaatgccttaaactgagatagatatatcacatagattattttgtggcttttctttgtttgtttgtttgttctgttaatatataattgctaaaatacaaaaaatataaaatgaaatttcctctttcaagtatcagagatagctgctattaatgtttgatttttatgcctccagattcttttatatttaagcatatattaatacatgtgtaagtatatgtacacaaatatacatttttaagttcacagaatcaatattatacatatttttaataatccatttttcacttaatatatcctgtgtatctttttttaatttttttctttttttttggagacagagtctcgctctgttgcccactttggagtgcagtggcacaatctctgctcaaaactggttgttcttccacctccctgacctaatcaagtcatttttttctagcaaattagctttaggctcatctccatttgccaggctcactgcccccattgtcactgtcttgccattgacattttattttatgatctcccagtatcactggactatgaaaacagtgccatctgttttataactagcaaacacatataaactttccctgctctgcactctctaaggctgttccctttaggtattgtcaacagtttcagcacatataggaaagctatcagtattgttgggtggtgaggttattagattctcctatcaagttaaaaactcaccagccacctgttcctcacctagaacggggtaggggagagccttctttcacttgctgtttaagcagcttttccagatagcccctgatagcactgggacttgtgttttcttatgtcactttcttcagtgtgaggttgaaaccttggggccaagtatagctggggaaagaagagataattgaagaaaataggaagggagaacagttgttatacaaagaaactcagccagtgtaggggtggacttagctctccttcagctttgtaaatggtttctctctctcatcccccagaagaaccagtgaagaaatccattcaggaatcagaagcttttttgcctcaggtacagaataaatgatctgatttggtattatatgtacatagctgtggataaccctgacttctttaaaaatacctgtccattaagaattctttgagacagtgggactctgagagtgttgttctcctgagaacttccatacaagggaaccctgaataacaaagagaaagatgttaaagtggattgcattagtgaactttggaatgcagggaagttccaaagtagcactcctcatctcaactcagtgactgctgaacatattagtcagcagtgatacttccctgaactttggcttgttctggctttttcttaggttgacacctctttgtaagcagaagcaatagaagggctccctttgtacttgggaacatgccacttatataacttcaggttactgtggagacaaatcactcatgttttctctctttttcaaattatctttattccacaaagccaataaagagagtgggattttcattaaaattaaataaaaatgaaaataatttgtcttaagcacattaccctaatagaggaaaaatttgatattaatgggaaacatttgccgtaatgggaaacttcaggctgtgtctgttgagtgactcacctgccaaaggaaatccaaaagaagagatggtatatgggtgggaccttatagaaacagagcaatatccagagtctttagcatttcttgtcttcctttccagagcatacctgaagagagatacaagatgaagagcaagcccctaggaatctgcctgataatcgattgcattggcaatgagacaggtaggtgtggaagctgcagattaactggtgcccccagattgagatcatggcacaggcaagctgtattcattggagtgatcagcaccaactgccgtgacaaaccagttcaagaatctgtgcttcatcctgggtgcggtggctcatgcctggaattccagcactttgtgaggctgagatgggaggatcacttgagcccagttaaaaattagctggtgtgggctcgggcacggtggcttacacctgtaatcccagcactttgggaggcggaggcgggcggatcatgaggtcaggagttcaagaccagcctggccaatatggtgaaaccccgtctctactaaaaatacaaaaattagctgggcatggtggtgggttcctgtagtcccagctacttgggaggctgaggcagaagaattgcttgaacctgggaggcagagcttgcagtgagccgagatcgcaccaccgcactgtagcctgggtgacagagcaagattctgtctcaaaaaaaaaaaaaattagctggtgtggtggtgcacacctgtagtcccagctacatggtaggctgaagcaggaggatcacttgagcccaaggaggtcaaggctgcagtgagccaagatggtggcattgcactccagtgtgggtgacagagcaagaccctgtctcaaaaaaagaaaaaaaaaatgaatatgtgttacaacacaatagagacttgtttctcattcatgtcacaggctagtgtggatcgggctgggggagctttgttcatgtggctattcagtggctccattatcttctgaggtcttggagttttctacagagtcccttgcatctggctagcagataagggaagagagaatgtgtgaaggatctcacaagagattttagggaccaggcctaaaagtgataatgtgcatcatttccaccccattagattggtcagaactcagtcatgtggctccatctaactgtagtggacatggagaaattagtctcgctgtgtgtcaggaggaaatgaaatggatttgggggacacataacagtgtctctggcacaaagacatcatttacggtagttggtgagccttagtcttgccttttcttttggatgctgaagcagggaggagtcctggaacccagaggggcattaatattaatggaaggcattctggcttcacatattatcacatgccccatcatttcacctagatagacgacaaaagctttcctgggaacattaaagacataataaatgtgtgttcacttacagagctttggatattttctgagctgtgtcagtcagttctgctgtcctttgctttggtcgttggcctcagtctcttctatctgcgcgtcaccattgcttggatctgagatgattcttttgctcagttgttgttggatgtctgactcaaactgaatcactggtgctgcatcaaaagagaatgagaagagcctagataagtggaatgacattctgtttaattatttagctcttccttaagaggatcgatcattgtatttccagttttagagcttctcaacattctcttaaaatgagtcagaactatctttcaggctcacttaaaatgttaccatggggagttttatgggaagaaaggctaagagaaggtcaaattagcaaatataatactaaattttccaggatttcagatacgatcctgcttggtcgtgtcctatttttggttagatgtgagaaagataagtgtcttcttttcagccattagtacccatataagaatgagaaaatattttcttaatgagtcacttcctgttttaagagattatgtaattgtcctgtacttctggttttggtcagttttgtttcattcatcagtagatgttgtacgtatatctgttgtatgagagaatcataaaaaaaaaaaagccatgacctgctgtgaattgaaaaactaagttttttggctaaaactcaatgtctgtgcttgcttctgttgctgggttatgggcctcttgggggcgggggctgaatgtatatttgaatttttctgcattataggagcatgatcagagttgagaaatggaatatgacagtgtgggtttgaatcatggctatgccatgttctagcttgtgaccttgggcaatgtccctggcctctttattttttttaatgtttttttttttctttcttgagagagaatctcactcttgttgcccatgctggagggccatggtgcgatcttggctcactgcaacctcttcctcctgggttcaagcaattctcctgcctcagcctcccgagtacatccctgccgggaatacaggcgcccgccaccatgcctggctaattttttgtatttttagtagagacggggtttcaccatgttggccaggctggtctcgaacttgctgacctcaagtgatccacccacctcggcctcccaaagtgctgggattacaggcatgagccaccacgctcggcttctaattttttttaatttaaattttatttttatttttcctgtagtgctgagttctcggccttcttaagtcccagtttctcttctgtaaagtgggttaataacaggacctacctcatagggaggttgggcagaatgagagttcatacttggaaagggcttagaataatgcctggcacagtgtgagcatgtactagatgccaactagcattatttcctcatttgcttgttcaattctagccataaaccacctaagcaagagctcaccatggctttgcacttggtacatagagtctgatctcagacaagtgagagaccagggcactgaggcctgccctaggcccaagggtgagtggaatgcatccccatagactgaggcgcactggaatggaggccataacttgagagggttatccaacttcttggataaacactcaagtggaaagctgagcacagcactcctaccagtcacagtctgaatgggcttggcagaggagaatctaagtacaaagtacaggagggcagagacctgataaaagagaaagatggaagaagatggtagaattggaggcagagcctggggcatcatgcttttggccacaggtatgagcaggtattggtcttgactgcactggtacatctgtttcctgccccatggttgcggatgtatctgtatacgagctccaagaatcagaatggcagctctagacagcaggtccttcctggtcagacatagtcctttaaagttcaacatcttggtggtacattgctggacaagagtaggcctgggccattagagggtaccctggatgctcggtgctgcctttcccctgagaatcagggtgatttgactcaagccttctctgcctctgggaacaaaatcagtaattgggcttgaggccacttataaacccccctgggctcaggtggctaattagcaagtaagaaacaaggcagcacacttttactcttcttgtgctatggttttcatcagctgagaggtcacaaatccacttacatgcagactcagagcagcaggagaacattaattattaagaagtggaaaggcacagtctcctctcctcacaccatctccctaggcctccagctcttcatttccctcctcctctcctggtaatttgtcactgaagattctaggcccagaatcctgccttggttgaaaatggttgttattattagtgcagcacccttcatctcttttccttctaatccgcagttagggggcttcatctagagtaattatgtggatttcctctgtctggttaactttgccatctggttaacattgaacacttgggaggagtgcaggagtcagataatgaacaagcgggtaaggtaattgccagccgaaataaggtctctgaaagaaagaaacaagaacatgataggactaacctaggcatagctgtgctcagagtatataatttattaaaaatctactacgtgccaggtactttgctaattgctttacacggattcttgct

SEQ ID NO: 38783 - DNA, 944 bp, Homo sapiens
tttatcttttaaaaattttatttgtgggccgggcacggtggctccatgcctgtaatcccagcactttgggaggccaaggagggtggatcacaagctcaggagttcgagaccagcctggccaacatggtgaaacctcgtctctactaaaaatacaaaaaattagccgggcgtggtggcgcatgcttgtaatcccagctactcgggaggttgaggcaggagaatcacttgaacacaggaggcagaggttgcggtaagtggagatcgctccattgtttatttgcatgtggacataagaaagggttaacatggccgacaactatttcatgagctttttggctttatttgaaaagtgaagtgtgtttggggaaggagttggttaggaaaacagatgcttccctttttgacttaccaaggaaatggagatccaaaggaaagcctgaagcactttgtggcttccacgggttcgtttctaggaagcttttgctttacctggggaaaccccaagctctacagtgagaaagttgtaaattagcctttaggagacgctgtttgtcaaagttatcttaaccctggaaaaggggagggaaaaaggcagataagcagtgatgacatcagcaggaaactagtatcaggctacccagtcctgaagattcagttttcacttaaacaaccagcaagtcttgaagtctcttcccaagcaaatgggagcttctttggaccttggagcacacagaggattctactttctttaaaactttgttttcaggcaatttccctgagaaccgtttacttccagaagattggtggagcttgatctgaaggtatgtaattaacaacccttcttactccagagtctcatgcttgaatcttttcctttgcttcatggcttcgtgttgtagaaacttgcaaaaacttgtcagcaatggcactattttttcttagat

SEQ ID NO: 38784 - DNA, 852 bp, Homo sapiens
agagcaatctcacaacattttccaaagacttacatgcacaaccctatggcagagaaatttattcctcttccaggattttttttccttcaaaaacagtgatgtggatgaaaaacacatgttcactactgcacagggtataacagctgaaaactggaaacgataatactcacattcccttcagtaggggaatggttaaataaattttacaagccatctggtagataccaggcatgagctaaaagttagggtccagttagagatggaaagcacaccagtaatttgaaagggaaaatgtaatatgaagaattattaactagtaaaagaaggctaactgctaaaggtacaagagcactcaagctgtctgcagtcagcaggccccggctggtgagcaggaagctgcccgctgggaggctgccaaagttccctgaaggtgagcaccactggttctacaagctgctggcagtcatggcgttaagagcaggaagagaagcaccagaacccggaagagaaatccagtcctctgctaggccttgcaccgtccctctggcgccctctactgacaaagccagtaaaattgtgccgctagcaaaggagatctttttatgggatgtagcttggtgtcaccaaagagaacagagtggacttggagctcagatgcaacacaatgattgatactggcacagtatacttaccctgcttttgtaaacaaaatggtatatgtgatgtctctctttgtctctctgtatataaaacaatatttgtttctacttattatgtatttatgtctttactctgcatgccaggagctaagtattttgcatgtattaactcattttgttctcataataacct

SEQ ID NO: 38785 - DNA, 1263 bp, Homo sapiens
tgtgcatagataaggtatattttttaaaaaaattatttttccaagaagaaaataaaccagttaataaacgacaactcacagtgccaggaagtgagaaacaagtgtgtgataaacggtggagaatgggagcactctccgcagtgggcgggaggagacgaggagggcgttccctggggagtggcagtggttggagcaaaggtttggaggaggtaagtcatgtgctctgagtttttggtttctgtttcaccttgtgtctgagctggtctgaaggctggttgttcagactgagcttcctgcctgcctgtaccccgccaacagcttcagaagaaggtgactggtggctgcctgaggaataccagtgggcaagagaattagcatttctggagcatctgctgtctgtgagattaagcactatgtatattgctttattcactccccacagcaaccttaccaagcagttcttttccacgtgaaaagatggaggctgggtggagcaaaaggaggtatttagagtcctcagcaagtgagaggcagagctgggatttgaatccagatctgcctgatactgaagtctaggctggttccacctctccggactgctttccagggagtagaagacagatattttaccttagctggctgcttctagaagtctgaccctgctggctcaaaacgactttagttccttgcccagaggctgcgggctgcgggtcaagacatcagtagaaggagggcccagccagagaggctgacatgggcttctactcaccgtcatctctccttccttccaggagcagcccctgggtgcgtccactttctgggcacgtgaggttgggccttggccgcctgagcccttgagttggtcacttgaaccttgggaatattgaggtaagcctgggatttccagaggaggtttgggggaaagagaagtggtgaacgctattactgttccctatctagacaccagtgggccgagtggagcagatgccagttgggaccttcccgccctctctttggttattaatccattattgttccctgtacactggtatgagtggatgggggaagtatttagccaagtttttgagacctgtactcggagctaaaatgcattgtcttcctatagtgcgggaccccacaactgtggaggagccgcaggggatactgggtagtacgcagacattatgcactaaatgacaatggctcacatagtgaaaagttattcttttttatttttttttttgagagggagtcttgctctgt

SEQ ID NO: 38786 - DNA, 1529 bp, Homo sapiens
aatctacctacatttcagctacagggctggctttacccagtccggcgggagggaggagagggctggtctgtgacttcagtgctgaggtttgatcaaggcaaagggaaacttcctattcccagaccctttgcaagaaagaatggcatattacttgccaccgacaggggttattattactaaatggagtcagtataaatgctttccaataaagcatgtccagcgctcgggctttagtttgcacgtccatgaattgtctgccacatccctcttctgaatggttggaaattgggcatctgttcctttaaacaggaaacatttcttgttcgagtgagtcatctctgttctgctttaggagtaaagtttaccctgcagttccttctgtggtgaagttttctctttctctcggagaccagattctgcctttctgctggagggaagtgttttcacaggttctcctccttttatcttttgtgttttttttcaagccctgctgaatttgctagtcaactcaacaggaagtgaggccatggagggaggcagaagagccagggtggttattgaaagtaaaagaaacttcttcctgggagcctttcccacccccttccctgctgagcacgtggagttaggcaggttaggggactcggagactgcgatggtgccaggaaagggtggagcgggtgagtgcctgttgccaaggtggcctcttcaacaggaaaccacaatatttttgtttcttgacttgctctagaaacagggctgtgggggtggggaagcaacttggatctgcccttctgaggacacctctgggtgctgcctggcccaggtctcctgtgtggtttctctctgagccgttgcctctgactttgctactttttcactctgagcagtctccagttcctctgctacctttttgtcctccaagcttccctgccgcctcgaatgcagatacacggtctccctcctgtggacccgtttggagagtccagaagactttatcaatccacttttttttctttttcatttggccctggggccgacggttaagtactttattctgtcattctgtcgaatcacgatgccctgaggtgcacagccccttccccctcttccgtgtctgaagggtttccttttatctctccacccccacccttgccctcctgccctctctcttgttccccaaagacagttctctaatgttttgatgtggattcgtgaatttatctgtatctttgcaaaatgtatttttcttttgtatgtgtacactgttttttaactatgcgatctcaggcaagtaattcctctgtgcctctgttatctcatcattaaatgattaataatgcctccagaggtgactgtgaggcttgaaggagataatacgcatacatcacttactacacgagttagcaattattattgcatattaatactattggtattttattttgctcattctgtttctatttcttttttatttatttattttttgagacaaagtcttgctctgtcacccaggctgcagtgcagtggtg

SEQ ID NO: 38787 - DNA, 1360 bp, Homo sapiens
gaaataaattgtaggaaactggtgctaaaagcaagttaatgattactatgaaaatgagtatttcacagtagacattctccagtaacaatctggcattaaaacaccacaacactcactgggcttcttgatatttcagtttcagctgaaacaatgtttataattttttttgagcagtaataagttctaagaaacgactagaaaaaaattctaggaaactagtgctgaaaacaagttagtgattactatgaaaatgagtattgcacaatagtccttctccaacgacaatctggcattaaaacactaaagcactcactgggaaaatgtccaggatctgatgcaatcacctacttaattctaattaaaggaatttcacaaacatatcagtattgaactcataagcttttattataaattctaacagctactgtgcacacaacattttttaccaaatgaatttttagaaaagtaatttcagccttaatgcagatttttgggatcaaatgcaaaaaggtctccacacttcaaagtttaaaaattcatttgtcttttctaacagcttggtgtaaaacagacctattttcagaacaaatctggctcagtctctcacttaggaatccttaaataatgaagattactatatagggtatatttatttctcctggcattattaaaactacttatgtacctaagaactatgcttcgttatgctgacataattcttgtgactgtgtttaccaacgatattaataaagataaaagtcaaaagctgatagcttaggataacaaactactgggataataaatgttgacagttataaaggaatattaaaattttaaatcactttgctttttaaaaagttcccttttctactcagtctgaggaaaatatcaagtaacgaaaacgtctaagtatgtttgcaacactagacactgagagtcataaggatgacaaactttctgcattcagacataacacagaattatctcttcctgtgaaatcagttcaaataaaagtaggtatacactgaacaatggctactaaacatcagtgctttaaaaatcaataccaagatacccatgatcattactttaatgcacaaactaaaagagtaaaaaaaatactcactcatgtaacggaaagtctcttcagcaaggactggagagagagcatcagatgcatgctgccgctggtgtggagactgagtccagtcttgattttcatatagaaagagagtgtctacttttagcctatactgtggtagttgttcttctagcagactcaccagctcaacttcagggagatcctcattggagcagacatctaaagaggagagtctatgtaaatgaatccaatatattt

SEQ ID NO: 38788 - DNA, 2385 bp, Homo sapiens
agcaaaaggtgcatgagcaagagcaagtaacatccctattattatgacgcagatttttttttaagttgaaattcaatttttgggctgctactaaaaaggacatgtgcgaatatctattatttacgcttcaaactaaagtcagccgtttttctttttcaagatatgtggcatctggctcaaaatcaattgcaagaaaagcccaactctatttgacccagaaagagctctttccaataccctctcctcccacttacatcacagatggcgactgaagcttaaggtttaatgcccgaccctaaagccactcatcctaaaagacagggctccagatggatgctgtatggcagaggataaggcgctatgagaagctgccaagcctcagatgtgcagctgggctgaataccgacgccagcgcctagcgcccattactttgcacccacacttaggaaacaacccacgcctcaccgcgggacccggacccagccctccagcacccagcctccggctccgacgtccgcgcgtgacctccgggtaccggaggaccttgggacgaggaggtccctccgctttccggggaagttgtcaagggcaagttcgggttctgcgcggacagcttactcactggagtggttcggcatcctctgtcgtccgcccgcgcttcctcaggaagcccctaatgcagcggcagcctgaaagcagcagccgaagctgctgccgctgctcccactgccagcaaccgcccgggcgtggcagggacaggcgggcgacttcacaacatcatcactcggcgacctcggttctgcggcgacaccgggtcaatggcagcccccacacaattggggaagccaaaggagagccactctcccagcggcctccacggccccagcgcaagacctgctgggaattgtagtttcctgcccgccccgcctcaagctcgaaggccccgccttctcgctgcccagccccggggagggaggcggggccgcgaccccggcgcgggtggggcgaatgcgttcccagcgggtagcctgggactggtgcagagttccaagcccacggccccggtcgcggcctcgccgccctcccgcgccccgcgccgggagcgggcctagagcgctcgcctcgcccctccgcgagcagggctctggcgcccgcccctgtccgcaccgctggcagcctgaagagagtcgctggccgtggtcgccgctagggtaaagacgggaggcaggcccgggaagggaaggtgtcggggccggtgggggacgtgtgagggagtgagccttggtccgcgcacgcccgggaagccagaggccagaacgcgctagcccacctccagcccgagcaccggcggctggcgggagccgtggcaagaatgcggcccgaggtggcgagcagccactgcgccagtgcagctcgggctcagcggggcccgggccgcgggttcgcagcccgcccagtggtgcctgccgggttggccgtgccggccgtgccaggtgcgcggggcccaggccgcccgggcgccctctccccgcacccctcacctttggccgcgctctcgggcttggggagttgccatatcgaagacaccctcagaccccagctctatctgccgccttctgcaagttcgctgcaaagtcccccatagcaggactaggaaggaaccttttacaaaattaaatactcgagtgtcgttttgtcttcggtttttcaattcaacgctgtgtttttccctgctgggtctttgtcaagtaccttttccccaaaacttgatacggatgtgtaacacggcgcctgcttagcacggtgcctggcacccagtaggcgctcagtaaagatttgttgaacgcatgagtcactaagcttggaaaattctcctgaactgtgcgtcgctatgatctttgttaagattttatgggttcccaagatcactttgaaaattacagtaattttaaagctcaacaaagagttacatcgggtcatttttgcattccctgtaacagtggcctctgttgaatgcctaaattaactcaaaacccgtgttctagaagatgcgccctttggtttctacagaaagtgttaatctttcagatcaaagtcttcacatgaaccattctattatggaacaaactgaaattacttataaagctttatcgtaattagcgttttggatacaagtgtaagggactgcactgatgtacttgtgaatacgaaatataagtctcttaaatatgacttttttttaagaaagggtttatattcatatctcgtgaaagagcatgccggagaaaattataataacagcaaatcccccacccccacccctttgctgggtgcagctgctgccttgacctcaaaatgtcttgtaaaattatctcttaatagtct

SEQ ID NO: 38789 - DNA, 582 bp, Homo sapiens
tggccacttgcaaatggcaactatatatattcttaatattttcttttccagattaaatatttccaactccttcattgttgctggaaccttcaccaatttggttggccttctctaggcatcaccattttacaatcaccattttacaattccctcttaaattgtggtgtctcaattatccatggtgctccagatactaatcatttcagaatacagtgaaactcttgtctcttccagtctgctcaattttgcttctgtaaatgtagctcaatattgtgcttttatttaaccttctctgtcatggtattgactgaaacctctgagtcataaacctggtatcctcaattttgtatttaggctattggttttttgtttttttttttaacttaagtgtaaggttttgcatttatccttgtaaaattttactgatctgggcccagttttctagctgttcaggatgattgtgagtcctgccttttttttttctttttttttttttttttttttttggtaattagctatgcccaacaatgcatgatccatactttttcttttttcaagccagcctttttcagtttcaggaag

SEQ ID NO: 38790 - DNA, 1410 bp, Homo sapiens
ggcagaaagaaaggtggggggaacccttctaaaccctcatttacatgaataagaaaagtgtttgtagttcagacagcattacagttgagaagtattttagaatcatatagtaacagaaatgcctagaagccaatttaatgttccaagtatctcatgctgcttgcataagacatttattcaaaagggttaaattttagacactcttgtagtttgtcccatttagcaatccattcgttcgaacagtagattaatgcaagtactacaagattaggacgaggcaagctgccgtaataccatccagtagtcaaaattacaattggagaagaatgacagtcacaggaacgcgctattgttctaaagatgctacgaagcgcgcgcgatcgatcccagggctctgttcacgtaactgatttcaaaagtcccgcaaaaatgacgttccacccacccagagacccaacctctaatcctcaaaagtaggacggctcaactgaagacaaaaatcctaacaattaaaagtagctaaggctcgcttaccacaggattcttccccattctgcgtttagccggcctcggcggccgccggcccccaagcacctggcgccccacccctcccggctcggtcgcgcgcgcaggcgcaatgcgtcatcgggccgcgccgcctggctagtaccccgcgcgcagcgccctgcggggatgttgcggtgagaggcgtgcagggacctggattggccagtccagactagccctgccaaaaagggggcctcggagttgggggtaatgtgcccaggagcagaaatctggcgaccgtggcgctgcaatcacagctttcccgtggtttcctaagtggtggcggtgatttgtttgcgggaagcggggcgtgacggaagaccttaattaaaggactccgcaggcgaacagatctcttctgggcagctacagacctctcctcggaggagtctaggagaggcctggctggaagccccggcacccgccgggccccgggcctcagatgagtgaggcgtcgtcgtggcaacgcgggctcaggtccccgcaaacttcatgccaggcctctctctcccactccgggagttcggtcccggcctcgcctgcgtctccgtcccattcctgtgaacactggaggggcggatgcgcgcaccccacgagcaaggccctcccttagtgattcccagctcgttggcgcccccccacacacacccacccccactgccaagtgtagctgtttacccgccacctctcgaggccgacgcgcccctcgccgctcaccaggtggccctcctccagccgagcccccgagtcagtcctcatggtgctctccccgcggggctgccccggcgcaaccgccggcggcccgagcccagctccccgcgacgcagcggcctccgggacctg

SEQ ID NO: 38791 - DNA, 2438 bp, Homo sapiens
actctgggtatgttcagatacaaagcctagaatcttaaccactatgcttatgttatcaaggttaaaacaccgtagtttactgcaaaaaatttttcactgctttaaattattcattaactcaaaggtcaaccggtcactccaaatcatatgataaatgggggggaaaatgtgggaccaataggtttgctgaagttttgtacctgctcagaataaacatatcacacaattttattccatatagccaaatataagggtaactgagtaaagatcttcacttgggtacagcagtcagttccttctccatcctaaaccagaaagaaagcactgttcttggatatgccacttcaacaagagtgttttttctcttccaccatcaaagccttaagcaatagaacgattctaccagtctactgttgcctgtctccaaagcagccctattatccgaggacgaacaccagcgtcaaggacctgtgttatttttctggcttcgcttctcaaaataacttatcttctcctcttgatgaattacttgataggctcaaagacttgcctaaactactaattcttattatcaaagctattttctttctccgcaaccgccttttcaagtagcccttggtccactcttcaacgcgatttgcaccctgtggcaaggccgccagggacactcagcagggttccaggccacggaccccagtttatcagctcagcgcctagtgtgggcattcaagaaattctcgtgaatgaatagctggaaggcagcgtgggtggaggcgggaagagggggcttgaaggaatttcacgcagctgagaccactgcagcggcgcccagtctggggagggagagaccggggcaagtgggagaacctggggccaaggcaggggccgcctcgggcgctgctggaccggcaggagcagtcgatcgcacccagagctgggaaaatgcgggcgccgtctccgcaggccccccgcagggcgctctccggcctcgaccacagcctccgcctagctccctgtccccggccttccgcatacaaggggtcccagccgataagccctccttagccaatagccaacccgggacccacactcgctcacctgaagctccaccggcagcaccgcgctccgcatccggcgcgagcttggcaacccagtgggtccgcgggatcagctgattcatggagggcggggcctccggacagggcggggctgcagggcgactagcgaaggtaaacgagggcgcgggcggctcttggaatccgagctcctgggaattgttcttgggagactgtcgacggcgtctgttgggggtcaaaattgctgagaatgcgttaggcactgcaggctacgtacttgggagcacagtctctcccttagtttagggcggagctatcagtcctgagatgcgctttgatgatgacgtagaatagagtcgtccaagcctagctacccgagcgctcccatggtaacaggcggtggtgaaagtggttgggagcagcagtcgtttgttaccacctcaaactgcaagggccggaagtataaaagtaaaaaggctgaaatattttcaaattgcctttatggacagtaccctaacagtggtcgcttctcccccctactcccgcgaatgacgtcatcgcctcgcggccccgtttcgccattgtatcctcaatgtgtaaacttactggttagttgcaaccccaaaagatggggtgggataggagaaaatgaagtggcctctccagtgattcccgtagtactccccaatatacaatcagtaaaatcagctttcttgtcccgcgcacagtttcataacactgtttttcgcagccacagtcccaccccacccagcctgcactctcaagtcctcccatgattttatgattttccagagctgccactcatgtcgcacagtgggtgcaaaccttctgctgctaggcattgtgccatcgctggacctgcaaacatgcaaatatttagaccatcaacgacagatgtgtagtcgggttctgaaactcctatatcctattcaccaacaccctcaactcaatttcctccctgatccttcgcccacctgcaaaactgttagtctgcaacagttcaaccaaccttgctcactcctgcatcggtgcagaaaatcacacaaccctgagaattggcaccactgcgaacgaaaagtgtccaacttcagtcgggacttccacgtgcgactacgcaatattgctgagcctaagacagtcacatttacacattgctactcagattatctcctattcccctcccctgctgttcccagccctcacgctcttctaacctcttactgaactctactcactcacccgctttggtaaaaataaaaataaaaaattttgtctcttacatctctgaggaaagtgagaccactagaggtgaatttccttaaatcccaaatcccatcagcc

SEQ ID NO: 38792 - DNA, 888 bp, Homo sapiens
aaaaacacaaacttttcacaaaagtcatcatagcctttgtgacttaatttcaggcttgacagagggattcctgacctacagatttctgaaaaaaaaaaagagcaaaacaatcaggtttgtggttctcatttgcagcatacctattcctcagggaaattaaaggttttccaagcactaaattctaaaggagacttctcgtataggcttttatagagtgacattgaatgatttaaagtctcatatatttacaggaaattccattcacctcattcaacaaatatttctcaagtttctacagtaaggccccgtgctagcagagcacagtaaagagaatactcatttagctaaaaaaaataaaataaaatgcccagaaccagacctggcacagagcaggcacacagtaactgatattgctgcaatccacgtggctgcttttcagtgccctttctacccagagggcataagtcagttatcctcagggcaaacagtgagtgacagcaattctacaatggataaaaccaacacagcacatgaccttttagtggctgaatttgatcaaggatagaattcagagggcatattgccaggcgtggtggctcatgcctgtaatcccagcactttgggaggctgaggctggtggatcatctaaggtcaggagtttgagaccagcctgactaacatggtgaaaccccatctctactaaaatacaaaaattagccggacgtggtggtgggcgcctgtaatcccagctattggggaggctgaggcaggagaatcgctagaacccgggaggtggaggttgcagtgagcccagatcgcaccattgcactccagcctgggcgacagagcgagactccgtctcaaaaaaaaaaaatgaaaagaattcag

SEQ ID NO: 38793 - DNA, 557 bp, Homo sapiens
tgagcttcccaaagtgctgggattacaggcgtgagccactgcacctggccccatttctaattcctacaaaggtactgagtgggtagtcatgaccccactctgccatcctctcttaggaggaaccactgtgttattctagcccatggggaaaggtgaagactgacatagttgtggtcatctgcctgaggtttcctgaaagttagcaaatcattctgcagtgaataaagctggctttgatttagaatagttaaccattaatcatggcaacaccaatctatcaaaggtgaaaactctttccctttgatccagctctgtgaatcatgatttagaatctaagaaaggaggcagaccataagtgttttttcttcctctttcctcttatgaaattatttctagcagttttacatcaaaggctgaacctctgagtctccccatcggctctgcattctctaagattcactcttctgctttacctggaacccacacaaattccattctaagccagtgtgtcaccttgttcaacataatcttctttgatggattttttcatttcctat

SEQ ID NO: 38794 - DNA, 1503 bp, Homo sapiens
gcttttcctcaaaaatatgagacttcctcaggttaatgcccaggtgagatgctttttgttgctctagcagtttagttctattttctttcttggttattatgaatgctctcttacaactggagagctaggatgaaccaatcccgagtaagaaacgggaaagtacagtaaagaggcgacagctctgcacccccacacggaaaaagactcagaggagagcagcggcatccttgccctagctccaatccgaacggaggcaggattcccaacaacatcggacgtctccctccctcgccgccccacgccctcccgacgaagaagcaaaaagtggagagtccagccgcttctcagggccacggagcctcccagtcagggattctctcccgttacataactaaggcctagggccctgcttctgcgattagtcctctggaaggagacggacgggttctccagagaccctcccagggaggtggaagcggggctctgcacctagtcgacccgggagaaagaagtgggacgacatgagggaggccgccaccaaaggcggtggggtacgggggtgatgagcgagcccggagaggggcgggcggctccgggagccccgcagcaggccccggcacctccggccgtagtcggctcctctccctcgcctgcctagtccccaccggccgccccctcccccattccgcgctcccctcccccgcgcctccatccccgaccccagcctagcggcaggcagacctgcagggaaggccctggccaccgccgttggatggctcccagcccggtacctggtcagacatgatgacggtggcttcacccgggggtctccgcacagcagcggcctcgggtaagcagaacctcgctccggggtttacaaatccttctcccttccccacagcacaacaccgcggctgcagtaacttccgctacgcctcgcgtcacttccgcttcgcgcagggaggagggagagagagaagagaggaaagacaaggcgggaaatgggtgggggagcagccaaggggaggggcaggctgtggagctgctttgccggtggtcgcgcgggtgaacggcagttttgtcagctccttcaaggaccaggtcctgcgcatcagtactagggccatcccccaggagcaaaggtcctggctccatgtctcaatgtttggagccactctcacaacctagattgctctctccgttacaccttgcgcgtctctgacgactgagccgagatacttcttttgtctcctcccagccttgctcatcaacccccaacccccaaatatgtttatttgaatgccagtacttctagctctagaaccaacattttcggttaaccagcacccttgccaaacacatgaccgtgatttaaaacaacaagaaagcaacgacccaacacaatcttgacggctactgatgctaaagaccgctgctgaaagttctaaatggggagtgagtaattccaacccttgaattggttgctttgagttaaggttaaag

SEQ ID NO: 38795 - DNA, 1361 bp, Homo sapiens
atctcctgaccttgtgatccgcccgcctcggcctcccaaagtgctgggattacaggcgtgagccactgcgcccggctaggagaatttcttgaacccgggaggcggaggttgcagtaagccgagatcacaccactgcactccagcctgggttacagagcgagactccgtctccaaaaaagaaaaaaagaaaaaagaaaaaaaggcgcaaaggctccgttcaggccctagatcccgcgatacaaactttctcggcccgccccagcccgctgtggcgggaacattctggaagtgacggcaatctctgcggcagtcttctgtcggaagtgacgttgctatcccagaatcctcagagaaggagtagcgcgttcgtgcgtcctagttccagtacagcgtggagggtttaggcagcgtgttctgattctttgcgggacggcgagcgcatttgtgctttgcccgccgcggcctaggaggccttttgaggccgcgtagtcggtgtttttgaactgactctacagcttctggcaggccgtgcggcgccctgacccggcctcaccatgttggtgctgtttgaaacgtctgtgggttacgccatctttaaggtaggtgggagagcgagccgttaaagggggaaggcggatgctggacagacgaggagagggaaagacttaagcacggaactactcagagtagcgtgggtgcctgttatagcccgggctctgggaggagggagaaggcctttacacctgagagccatgttacgtgtaacacgtggccccgccgtttggggagacccgttctgcattagaggattttatttcctcccgttgaaggggtgggcaggaggcgtgttagaatttaacagattatagggaattcggactttattctagatgttttgaggaatgatcgaaagattttttttttttttgagatggagtttcgctcttgttgcccatgctggagtgcagtggcgcaatcttggctcactgcaacctccgtctcccgggttcaagcgattctcctgccttggcctcccgagtagctgggattacaggcctccatccaccaccacgcctggctagttgtttttgtttgtttgtttgcttttagtagagacggggtttcaccatgttggccaggctggtcttgaactcctgacctcaagcgatccacctgcctcggcctcccaaagtgctgggattacaggcgtgagccaccgtgctcggccaatcgaaaggatttaagcagaggaatgacctgctaatttgtcttaatacggttactctgctgtgtggagattagactcgaggagataagaacggcagcaagaatacttttgcattcatttggacaagatgaaa

SEQ ID NO: 38796 - DNA, 973 bp, Homo sapiens
tatgtggcttttgaatcaacgcactgcccccaataacatgtttatctcttttttttttaattctagagtaaagctaaaacattttgagaaatttcaggatacagcagaagcattagcaggtaaagtaaaaaattagaagcttgcttttttgaaaaaattaagtcttagccgtttgtttttcttgtttaaaaggttgtttgcttcagttgcctgtgttaaccttattcaatgttgtcaatgatgcattcttattggaactgaatttaagtgatctgactcattcgtcactaccactgagacaacattgagttagcttttttcaccatagggctggttttccccatgtgtgaggagaggtgagaagtggttaagttgatctccctgtggaaaccagcaacataatgctgaagcacaattcagtaaaaggtgttctacaagggaccaaggtaatgtggtcaagtatacagctctctcctcattttaatccaagggtagagttgtaatcctgagaacagccaggattcacagttgaaaaataatttaaaaagctcttctgggggtatagatttttagttcaaaaaaacatatcaatattcagagttatacagaaactgacagaggtgttatttttaaaagattcagaagaatggatgactcatactcttcaactagatttcatcacgggacaacagagtgatcgggtttatttactgtaattgactgcagtaggtcttacagttttgtttttttaagtgttagggaaaacaggaagagcagatataaagcccaaatcattaaattttcaactgcctgaattctttatcacaaatcagccaactatttggcggtgtagtttgaaaatgaaggaccgtgaggaagaatatggcttaaagctgggcaagaatatgacagatgcaaaaaattttgttaaataaccacaggagaaaggtacagtttttgtctgaaaatttgg

SEQ ID NO: 38797 - DNA, 3738 bp, Homo sapiens
aattcagataaagaggtaacagcggactagaagaagcaagcagagcatgacttaaggagtctatctatgactgtatctgtggaactgcccttagccacaatgaaagaccagcaaaaccagccttcagcataaccctcctgcctggtaggagatgggaaggccagacttcacccctcaagatcgccctcccacgcgcattttccacctcgcagctaagaattcagtccagacttccgatcatggcgccacgcacgtcaccttctcccctcgccgccagcaaaatcccacccacgtcggctgaccccgcagcggggtgtaagggcgggagggatcccgtctcctatactggtcgcttgtacaaaccagatccaaaaaacgcactacacaaatccttggaaactgcggtaccaacgggatcttctcaattccttgagtgcaaaatgatcccactctctatcccgacacaactctaactccattttcctttcacgtgccctaaaaagccctcaaggcccccagccttggtgaatccaggccctctctcggggtgggcaccgcgctgtacggacagacgcgcgcacgcagcgggacgatttatagaattaaaagtcttttttttttttctggcttcgcatccttgcaaatactcaatattcctgtcaactaagaaggctaagggaatgggcggttgaggaaagcaggacgtcgattacagcgaacacatcaaaggggtggtctttccaattccggcttttgtttgagtcagaggggagcctgaggaggccaaggtctccggttctgggaaaggcgggtccatccggattctttgggctgcggagagggaggttccagccccgtgaaacaacagagggcagttctgcccctcgaggctttcctccgagagtactgagacggagacgcctcagtcgggagaaatcccggaactcggaggagtctgctgaacgccgaacaaaaggatgtggccgtcgtctcttaaacaaatacgcgaatcccaagccatgcacatttggaaggcatgtgtatgtgtgtgaaggagaaaggccaccgctgcccaccgcagccccacccagccctcggccattcaccggagagacgcgctgcggtggggcctcggagccctcagccagccccgaacgaggggcggggccgggcggggccgtgagcgcgcaggcgcagtgcgggcttcatcccgccgccggcgccgccgccgccgccgcccgctctgcaccacaggctagagacagacagggccgggaagagccggagactgaggaggaggcggaggcggcggcggaggcggggcgactccggtgaccgggagcgccgcagactggcagctgcggcgactcccccctttgtgtctggtctgctcggagccactggaagtgcctcccggagggacgcagggtgtctcgccgcctccctgcccacccccttccccggctaccttcatccgccctcccgccgccccccgccctcggtccgcgacgcccgagttccgtcaggagcccagagctgcgggagaacgaggcggcggcggcggcggcggcggcggcggcggcggcagcagcagcggcttcctcggggggttgtgattcgctcacaggagccattgacgggagaagaggaggctttcttggtggaatttacctcaggcaagatcgagccgcaggaataaaaagcgaggaagggaagggagcgccgccgggaggactagaaggggcagcctctcacacccactccgcctgccgtctcggggagcccggaccggggccgcgaccgcgacccctcccctcccccgctcctacctctcctcagccttcgccagggcctccccaaccctctcacggttgttctgcgaaggcgtggggactgtgagcttgtccatggaggcaggcaccttttttgatccagtcaaggaagaggatttgttgttttcgaaatcagagtgaaggaagcaccgaagcgaaacttaaggaatcctgccttcccggagccgcgggcgatgcgactagggctgccgggcgccgccgccgcccgtccggcttcgtccttcccggcagtcgggaactagttctgaccctcgccccccgaccccggatcgaatccccgccctccgcaccctggatatgttttctcccagacctggatatttttttgatatcgtgaaactacgagggaaataatttgggggatttcttcttggctccctgctttccccacagacatgccttccgtttggagggccgcggcaccccgtccgaggcgaaggaacccccccagccgcgagggagagaaatgaagggaatttctgcagcggcatgaaagctctgcagctaggtcctctcatcagccatttgtcctttcaaactgtattgtgatacgggcaggatcagtccacgggagagaagacgagcctcccggctgtttctccgccggtctacttcccatatttcttttctttgccctcctgattcttggctggcccagggatgacttcctcgctgcagcggccctggcgggtgccctggctaccatggaccatcctgctggtcagcactgcggctggtgagtagctccggccggcacgtcccggccactgcccctgcgggtggcgagggagggagcccgcagaggccgaggcctgtgcttgcccttcgccatgcgtccccccgatcgcggtgcagcggagctgcgacccggtgcctgcgcgcctgccccatgccttccagggaaatcgcctttaatattcttgtgtattttcctatccccacttccatattcccaccccacccccctttacggggtgaaaaagacatattgggtgtggtatcttgacatttttagctgtgaggtaatgcaacgattaaaaataatattttaatcaccagtgaacagtgcttattatgagatctctggaaacagacctgtagatttttaaaattattattataaagaagcggttttggcttatagtaaaaagaacatcaactagagaacacacacttgaaccttattttgaaatttagatcactctgggaatccatgttcctttcattattcagaaatgttaccgaatgaatagaataaatgttgaggaagccagaactgtgagattcttgatatattgtattatacggtttgataactttactgttagtcatctggcatctatctattggctttgctgtcgagacaactttgacctgacattagacttctaggagatttgactccgaaagttctttgacatttcactaaagtctaaagggtggtagtcatcctttcctttggatattttcatttcagttctcagaaaccttaggaaaaagaccttatcttctatttgcaactattttttcaagcagccttttggtgatttgcttttagaaattttcaggagtgaattctacatataactcgtacacttggtttatgatgggcaaatggattgtgcttttaaaacgagtaaaggaccaaatgaccctttcgaattactttttttcttttgataagtgtgtttcacattaaacaaatttctcattgctatgttagatacagaggttacttgcttattttcattttgaaagtctgatctaggaaaatgccgaagaaaatttgaagtttccttttatgcttttgctattgttgaataatgtctactgttgattaatgtctgttaaattgatgataaatctatatggttctgttaaaata

SEQ ID NO: 38798 - DNA, 523 bp, Homo sapiens
ttcaccataagattgggaaaatagaggactcttgcttgatttatatacttaaatttagaaatttgagtttacactaaattttatagggacaattatgttagattaagatactctgtttttcatatatttcataacagaatttgtgatactctgaaatcccagttgtatttgtcttgagaagtttgtgttctgggaaaggaatactgttgcttcagctatttagttatttgccccattactgcaaggttcctgtgttgtttattttagatagttcattttgacatttagataaaccaaagccaaacacacaagcatgcccagaattagtccctgaacttcattccagggtaaagataagacatttagacttctccagtacagataaatatattacaactactgaaaaatgggtgttatgtgactcttgtatttttagatacagaatgacagtgaaggtcttaaaaaatttctatcagttaaacttatgggaaaatttatattcacttatagatcctacttttca

SEQ ID NO: 38799 - DNA, 2004 bp, Homo sapiens
tagggcagaacaaaaacattaagaataaaagcccgaacgagatgcgcgtacaggtgaacacaagtgaacactggggtaaggaaatgagttatgcggaaaaggcttcagaccatccctgggaactgctccgggtctggacatttcctttggcaaccttccagagtctgagtccccagggctccccccggcgggaaaggaaaggcgcgcgtggctaggcgcgcgcgtacacgggcactcacgtgtacacacacacgcgcgcacactacacatacacacagggcccatttcctccgctccctccccgcggggggcgggtctctttctctttaaagagcagacggtctccgcgcacacccaggctctcaaggcctcgggggcccgggacccgagctgctcgtagccaatgggagcagtggagcggctcgagcgcggctgacgctgcaccaatgggcgatcgtggggggcgggggcagcagaggagacactattgttgatgaggagcggcggcggcggcggcggcggctgcaccacctcgttgctgcctgccccggcccggtctccccctgcaccccggagtccggcttcgtcaccccgtcttggggggcctgccctccggcctcgagaatcctccccctgcagcccaacaacaacaaaaccccccgtctcgcccagtcaccggggaggggggggaccatgtcccagcgggtgaggcgcaatgggtcccccacgccggccggctcccttgggggtggtgcggtggccacggccgggggacccgggagccgcttgcagcccatgagggcgacggttccgttccagctgaagcagcagcagcagcagcaacatggcagccccacgcggagcggcggcggcggcggcggcaacaacaacggtggctgctgtggtggcgcctcaggccccgcaggcggcggcggcggcggtggcccgcgcaccgcctcgcgcagcaccagccccacgcgcggcggcgggaacgcggccgcgcgcaccagccccacggtggccacgcagacgggcgcgtccgcgacgtccacgcgaggcaccagccccacgcgcagcgccgcgcctggagctcgcgggagccccccacggccgccgccgccgccgccgctgctgggcaccgtgtcgtcgcccagctcgtcgcccacccacctgtggaccggcgaggtgagcgcggccccacccccagcccgcgtccggcatcggaggaggtctccggagcagagccgaagctcgccggagaagaggagccccagcgccccggtttgcaaagcaggtaagtgctgggggtcgcgcagcaagggggaggcggctgcgggaaggggtcccgggcgcgcgctgcaatcgcgcggggactgcagagctgccgcggagcccgggtggctgggggcggggctgggggcggtgccgggcggtgggggacccggcagtgcggccccgcctttcccgggcctaccctacgccccgcccgcccgcccgcctcattcacccctctgcccgccccgcacggctccctggtggtggaggtgcagcggctaaaccttgggcttgagctgatgagtgttaatgataaacctggcttcctggccttactcctggaggagtcgttactgcttaccctcccttgagggtgaggctaggagtggtttgtcactttgttttagggacaaggttaatgttggcatagcccatatctgctgctgctaagtatttctgttcacaaaacagtttcagatctggggtactgaatgcattagcagtggcagatttggatcactgaacagaggaggctgagaaccgtgttttagcatttcctaagacttgataaatgggtagcaagaagtgaaaattaaacaagattccttaggaaggtttatgggttttgtctgaggctctgggtgtatttctgattttgtgtactgattctgtgttttgaatgtagaaaaacagaatccagtgttttgtctccatcttgttattgtttta

SEQ ID NO: 38800 - DNA, 1134 bp, Homo sapiens
gcactaatggagtctgagaagtcccgttatctgcagtaggcaagctggagacccaggagagccagtagtatagttctagactaagtccaaagacctgagaaccagaaggagttgacataattaccaccacatatattcatacaatggagtactcctcagcaataaaaaggaatgaactgttacatgcaacaacaagcatggatctcatggacactatgccgagtgaatgaagtcagacacaaaacagtattatgtgattacatttgtatgacaccttttaaaaaagcaaaactaacctttaataataggaagtaggtcagagtttacctgggttcaagagtggagagattgacttcaaaggagcgtgaaaaattgtttagggcttatggcagtgttctaaatcttgatggtagtagtgatttaatggcgtatttggctttcaaaactccaaagatgggtgcagatttatttatttagagataggatgttgccctgtcaccaaggctggagtgcagtgactcaatcatagctcactccgaccttgacctgctgggctcaagcaatattcctgcttcagcctctcttgtagctgggactacaggcacatgccaccacatctggcttatttttacattttttatagagatgggggtcttactgtgttgcccagatttgtctcaaactcctagccacaagtgatcctccctcttcagcctcccatagcattgggattacaggcgtgagtcactgtacccagcctggtacattgttttttatgtaaatgatacctcatgtttaacaaaagaataattactaattggatttttaagtttctacaatagtccttatctttttgatactatgcctatgggaaatcattttggttaaatcaatcattttctttctaggataaattattaattaggtactgctgggcctgtatcaatatttggttatggtatctgttaatgtttgaaaacttagtggagaaattaactgaaaaagaaacatggaaataactggagaagatgcaaaattagaaataaattgtggaaattcattttttcctaaattttcccttagattataaataaattctcatgtaagtttatcattttaaaaacataattttaa

SEQ ID NO: 38801 - DNA, 473 bp, Homo sapiens
tcctagggataaatgccacttcgttgtggtatatgattttttaaaaattttgttgttggttgggtttgctagtattttattgaggatctttgcatctatatttgtcaaggagtaactaatacattttttaacctcattaaaaataattttgaagatgtactccaggtctcagtaatgaacctggccctatgtgctccactcactgatgctgcccagcgatctagtttgtttggaatgcttttcccaccatttgactggatgactcatactctggtagtatctcctcattccataaaactgtgcctaccgacctcccctgtccttcaaattctggattagatgccttaggggacttctatcatcacatatatcataattagctatctattccttctctcctagaagaagctcttcgagaataagagctgtatttcctcttgacctccaatcgttaatctagtgtctgacacatt

SEQ ID NO: 38802 - DNA, 734 bp, Homo sapiens
agcagggaagcacctgaaggctgttcgggtgatccgccgccgcctctattaggagcgacctccaccgccgagggaaatcacccaaacgagccccaggctgccgcgctccttcactacagcgagcgtggccgggaggcgcccttccgccgcaggggacccagccacgccagaaaccgctccttgcgggttttgcctggggggaggccggaagaaccccgagcagggcctcgcctggaagaaggccgcaggcagcggccggggtcccccagagaaccgaggaggccagcaaggccccgagaagccgcgcgcgcgcgcgtgtggccggagcctcccgccgcgcccccgcctcccggcgtcgccatgggaacccgggatttggtctccgggcctgaccgccgcctgagggggaataggggcggacaggaggcagcagaagcttaccggcgccgctcttccgcctcctcgggtcgcgttcggccgtacggtgatccgtcccggcacccgttccggccaccgcccgcgagccccgcgccgactcccggccctccggcagccagtgcccctccgcaccagtgcgtggaggtgtcaggctcccgctgcgggaggcgggagatttaaaccgcgcgacctggcgtccgcgttcgcccccctcgggcgccggcctgaccccgccaccggcccgactcgggatcggagcatctctcggtctgctcttgaatgaactcggggaccct

SEQ ID NO: 38803 - DNA, 2063 bp, Homo sapiens
tacatatactcaggtgcattgataatacgatttatgtatactttcagcaacaacacaaggggagagaagatgatttactagctctcctcataaagctacaaacaaaaccacagatgtaactcaggtgggagtttcctagtttatggctaactttagcttattaacacgacaaatattatcattttcactgaaaaatttgacattttttgttgactcagccaatccaagaagcttaattaatatatagtccctgccctcaagagacttccaatatagttggaagagaccaggcaaacacaaagaaagctaacaatgcaatatataccacaaggcagcatataattagttttcgaatgagtgctaacagaccttgagaccactggttaaaatgtttatatatctatatagatatacataaatggtaaatatgttttttcattttcaaaaactttttttccgttttcaaaaactgtgaaccaccactagcagacaccctataacaaggcccactgttcatttttaaattacacatataaaatgtttcattcagaaagcaaacctgaagcccttcagcctcctccacactcacaattcaaattatatagaacctacgaagctggttagaaagcaggtaatctcagaaaaaagggtgggggtgacagcagaaacaaccagggatccacaaggtcataccaaaggggtggtcggaaaggaacctggggaagggagagaaggctggaacgcttacttacttcttgttatcagtgtagaagcgtgtttggagctgagccatggcgaggagtacacacgacttgcccacggaaacgtacgggttagcagacccacaacacgaagctcctgccttttaagactacaaagaggcagctcaaaattagactgcacaggtaagcgaggaactgcagtctaagcctggactctgccttctgccctccggtctcctctgcagaaagcacgaggttgcccttctacagacgcccagaccacaaacatcgactacctactcctagatttaggagtcatcgattagaaaaggatagtcgtaaaggtagcatgtccctttaatcattgttagaattcttcccatacgtgtgggcccgtaatcgattaggaaaaagatcccactcaaatccgctttattaataaaaaattttttttcaagaggctgtcctgagcctggatagttcaaacacagctcctagttactacaagtctcagaaagcatcgcttctcaaacgctgtgaccaccgggaattgtagtctttttttgccacgctgccctcagagtatcttatttgcattaaatcctctagactccagccagatatcaaatttcctctgccttcagctttgcttgactaacgccttgccagtttttttttctcatacatattcccaaccagaggctcactcggcagaggtttttcctaaatctcgcctctaactgcggcttttagagagaggcgagaggcggaaatacaaagaaaagaacggatgagagaggaaacggtcgacggtggccgatagtggtcctactgtcgtgggactgctctgcgcgctcccggtggggcgcgcctgcgcattatgctggtctccatggcggggcctcggagccaagacgaggttgagtagactcgttttgaattttctcccctctgctccggcggacttcccatgtcgccttgtggggctatcggcggcggcaggactgggggagtcagaggtctggcagcgctgtctgcgcagacctaccggacgctacctcccaaccccccgtcttcctcctgcctcctcctcctcccgtcacctcctgacccgccggagctccgagcaactgccggcctccgcccccagccgcagccggtcactggcggcgccttccgcgccaagcttgggggccttttcggggtcccacatggcacggcttccgacccccggcccgggacggggctcgcaggccccagaggggcaggctggagaaggaggaggttaggtgtcttcaggagggttgctgagcccaaggacgcgccatcgccgcggagaag

SEQ ID NO: 38804 - DNA, 2018 bp, Homo sapiens
attttaggacactgaaacttgaatttgaatttcgtctaattttcacatctcaaaatattgttcttttgattttcgttaagcaagttgcaaccagaatggactgcaaagcctataacatttattgtctggctctttttattttatttttattttttgagacagtgtctcgctctgtcgcccaggctggagtacagtggcgccatcggagctcactgcaaccttcactcccaggttcaagcgattctcccaccttagcttctaagtagctggaactacaggcgtgcaccaccacgccaagctaattaaaatttcttttgcagagacagggtctcattctgttgcccaggctgatctcctgggttcaagggattcgcccgcctagacctcccaaaattctggaattacaggcgatagccactgcgcctcgtctctggctcttcacaggcaatttgtggatccttgttacaaatgaaacaagatgggacattagttgatcatttttgaagttgggtgacggtatacagggtttcgttatactagtttactttagaatatacttgaaatctttcacaataaaaagttgtggaaatgtttaacaaaggtgagttatcttacgcgtttttctttccttatacaaaaaccaaatctctctgaaagttgtctatagttagtaaagccttttgcttcttttctgaaaaagaaaaaccctttcgaagtctttagtggtggtaaaataagccctttggatatgacactcggtgacgacgaaagcaggcacaaaaggaaaagaggagtttttggggggtgtctgtgtgtgttttgtctttttacattactctaaattcccagaaccaatcccggttctacaaataagtgaaacaaaatcccctttaacaccgtagggtctcacgccctcagatgactcacggaaatgacgccatcagcgaaaagcggggcgggcgtagacgtcagcacgtcagccctcctccatgtccagctgagggaaggctcgtttcagtgccgcggccggcgcccgccaagggatgggcagccagagcctgtcgactgcggctgcgcaggtatgctggggcggggcttcaggtcaccccgcccatccccagcctacgcgaccattgaacagctgccgcccaacggctgggtaaatcctcagcggccgaaatgattagcccagggggcagccccgccccctgctcctcccggcctctcgccccgcccccatgtcccgcccgctcgtctgcctggctgcggggtgacacggggcttcgccttgggaaggggtcgagggaagcagttagacggctgccgggcggcggctgccgcgcggcacacaatgtgagcccggtgatggggagcgggccgttgggaagagggggcggcatggcaagaaatgggagggccccggtgcttggtggtggaggggctgcagagtgaggggcggctttgagtgggctaggctgtcagggagtgttccgatactgtagtgcaggctgggatcgcggtcgggagacgccgagtccgcattcctcagttctagagcttctcttggcagctcggcacaccttaagtttgcctctgtttgggttgtcttgggatgtgaggaggaaattaaaagattcccccaaacacttggatgcttctttgggaagttcctcgccggtgtgtgcgtgcccacttctcttggatggaaaggtggagaggccaggtgggcgggtggacttccactctccgaggattgttagaacaaacgaactgggaattcctcccccgcccccacgccctgccctgcaacacagcaaacagtcccaactactccacccccaccccaccccagacggagtcttgctctgtcgcccagactggagtgcagtggcgtgatctgggctcactgcagcctctgcctcccgggttcaagcaattctcctgcctcagcctcctgagtagctgggattacaggtgcccgccaccacgcccggctaattttttgtatttctttagta

SEQ ID NO: 38805 - DNA, 965 bp, Homo sapiens
taccactgatgaagatatattggagtgactgctgaaattgcctttttgtttttaaccagaggacagtccatttgtttcacttctttttgctttctttactgctatgagctttactgaacggctgaaaaacttggaaaataaaatggacatgctgtagtcttgaacataatttttttaaggaaaacttaaagtgccagagtgaaagccagaatggcatccagagagaggctctttgaactttggatgctttattgtacaaaggtaattgctttcctttttatttttatgttttaaaatactttattataaaatttgtgactggcagtagtaacactttatttaatagataatagtgtatttagtcataatgaataaccccaaacttaaaagcgtttaaaggattttctgttttcctctttttcaggtttgaacacacatacaatattggcatactgttaaaaactgtagggtgcggcttttatttgatacttatccccaaatgatcctaaaattatataagtaaaattatgcccttaagagaaaaataaaatatttttatttttgtttgtgcttttcattttctcccacaagtgagtgtaggatagagacatttttatgagaagggcattaagcatttttcttggaatgaacctttgaaattgcatcacaaggttattgattgaactgcgtgctgtgtgactgccactaagttagcactctttgagcattgtctcatttccttctcactacaatactgtgaggtgaatattgtgatcatccccttttactgatgggaaaactgatgcaagggttacaggagtactgagtagccgagaaacacagtactacctgactcaagtgcgtacttttatccatttttactccttaatatttttgtcactcagaaataatgttctttcccctccttgtctttatgtgaatttttacttgatagctttgatttt

SEQ ID NO: 38806 - DNA, 1184 bp, Homo sapiens
ctgtctggtgtaaagtatcaaatgcgttaactgagtaaaaacatacaaagtgactcaaaagcacagcattttgaaatgtggcagtgtagattgaaaaccatggttcatttttgtcattagctttaaaaaattttttattttattttattttattgagattgaattttgccctgaacagttttgtgaagctgcagtattagaggtgatatttagtcccaattctgtgtctgatcttaaggacctaaaaggttaacctagtttctttgtatctcagttttctcatctgtcaaatggaaaaacataactattttacatatctgtcaaaattttttagaaaagagattttatttaaatgtattttaagaggaagagagataaaaatgtaatctttataagtattttgcagatgtgtgggtgtggacatgtgtgtatcaggattacttccatttgcccttgtattaatataataatagagggcaatattctcttactattttatcagtagtaatgaagctgtattcattaatgtcttaaccgagaatgtcttaactgattttaaatctgtacttatttttgctttcaaggatagtgcttaattatcttgaataatgatttgagggtcctccctactctaaaccaaatttattttggatgttgatgatgctccatttcctgctgttgccctttgtcctgctaaatctggaatatgactgaaatagatagttttgcagtgagctcagagtaaacttccttttcagaataaaagttttgtttcaaaaagaaaatagaatttagaggtgttttattcagttaaaaggcaagtatctctttttatacatagatttggaaaaatggaattagtgaatatctgtttaatgagaaaattattaacttattagtacaattttggttataatcctaaataagtttttagtaagatggaccaatacatatcaacccttataatttaagccacatttagtaagtctctggtatgtgcaaagtgtgaaaatggctcttgattttctgtggcttaataacagctttgtatgtaaggaaggtaatgttctttgactctaaagaaaagaaaacaaaatcattgacagcctagtactagtagttaccacttacatgtttattttcagaatttaggtatgaaagcaagaaatgtatagtttatatca

SEQ ID NO: 38807 - DNA, 1657 bp, Homo sapiens
tctcactatgttgcccacgctggtctcaaactcctgggctcaagcgatcctcccgcttcagcctcccaaggtgctgggattacaggtggagccaccgcgcccggcatcgataatctgaatctctaacgagctcccgggcgacgttgatgcagctggtaccgggaccactcttcgaaaatcatcggtttagaggttttaattctgaatccattgcgaaaactgttgggcggacagagcactactaactcctaacttttctcagaaagctgggctctgctttcgccagcaacccggtccgaagtcgcgggcatattctgtctgaaatcgtgtgcaccgaaatccccgccttgcggtggaggctggcgctaggcggcctcagcctcggcctgctgcgctcaggaacccgcgccccggctcctcggcgatccattgctctttcctctggcgccggccgcaggcctcggtcacgcccccagcggcccgttggtttccgggtcccgcggggtgcccccgcccacacgctatgccttaaattgggccaggctgaggcgctgctgctggagcggccgatccgagacgtggctccctgggcggcagaaccatgttggacttcgcgatcttcgccgttaccttcttgctggcgttggtgggagccgtgctctacctctatccggtgagcgccgtcttggctctctggggccccgggcgccgccccagtctctctgtcgccggcatccaggccaacctgcccgctgcgggccgcagggggcgggcctgagaggagggttcgggttcgctccagagcttcagcgcggggaccgcacccggagtcacgtgacgcccctcccggcaagctctgagagcgacgtgggctgcgtcgctacccctcaggcgccgggccaggcgggcgtagagctgctgaggaaaagcccgcgcccccgcaggccggtctcaccttgccaggcaccccgcgccactctccaaggcggctctcaagtactttgggcagctttttggccataactcgccaaacccaaatttcatttcccagtgtgtcaggacgagactcctgggcgcgccactcctttctcctttcttgaggattctcccagcacttgtgtattcctcttttccatctgtccatcgatctatcctgactggaatccaaagtgctcgaggtccaggtcttgctcctcttaggggctccaggcaaatgcttctttggggagagcgccgcgctgcgggttcgggtgcgaggtttcctctgccgctgacgcctctgcgagcctccggtcctcctctctccacttgcctccgtcagcgagagagggagggtctgaaaacaaaagtgttgatgactgaggaccgtctttaaaacctgttctacacactttgggaggctgaggcgggcggatcacgaggtcaggatatcgagaccatcctggccaacatggtgacacaccgtctctactaaaaatacaaacattagctggctgtggtggcgggcgcctgtaatcccagctactcaggaggctgaggcaggagaatcgcttgaacctgggaggcggagcttgcagtgagccaagatcgcaccactgcactgcagcctggcgacagagccagactcttatctcaaaacaaacaaacaaacaaacaa

SEQ ID NO: 38808 - DNA, 1896 bp, Homo sapiens
caatggtcaggagttttagtttttccagattacattgtgtggggtagtctgatttaggaaaacaagacacagtatctggagaataaaaacagaattataactctgcaagaggaaaattatctgccttgaatttttgtagcacttaatgttttttcaaggtattttcacaataaacgttgattttatctatgtaacagccctgtgaagaaggcaattactactagcaaaatcgttttcaaaattttaaatactgaatccatgaataggaaaaaggacagcgaagttgatagcattagagaaatgacagaaaaggttatgagtgaggaagcgaatcatagaaatggcaaacataaaaagctgaggcccacggcaccgcaaaccaggagagaaaggggctaatctggcaggggagaacagcgttagtggggaagtgcaaagaggcaggggcgcaggaaagctggggttaggaaactgcaattcactgcaacaaagaggatgaggtcaaatctgagaaaaatgaagtcaggtggcattgaaagctgcgtggaagttttattcctgccctgttgaggtgtgatctttcacagaggagggtcccaagagtggaggctgtgccctccttcggcctcccgtcagcagcagagggagaaaagcctcgagaagttccctaggccgatgacctccatggggacggagccgagatgagtcccggagggagccggcaggaagccagctgagcagggtggtgtgttcccgccgggctaacaaaggccgccgggaggtgggggcttctccagccgctccagcggcgggcgggcggcggaagggttaactgcaccaccaactcccgcgcgcatcccggcccctacccccgccgtcgctaggagacgccggaagtgggggaggggccggcggcgcgggcgagggtgggaatctttttcgggctcccgggggcggagggaagggagcgcgcgtgcgcgcgcccggccggccgtcgccgcggtgaccgtcctcggagtccgtcggctcgcgccccgcccccgtcgccccctcccctgtcgcgcgctggggctgtttctcgctccttccgagttaccgccgccgtcgccgccgctcctcctctcccggtcctgggtttccttggcgctgcggccgccgctccctctgcgacctgtatgaggaggaggaggaggaggatgtgaagatggcggagctgcagatgctgctggaagaggaaatcccggggggccgccgggccctcttcgacagctacacaaatctggaacgggtggccgattactgcgagaacaactacatacaggtgcgaagcatccccagctgggccgcgtcggggacccccccgccgggggccgcgcgcctcggggcgtggggccgaggccgcctcggggacacggcccagcggagcccccgatgggggtggggagctgggtgagggctggggctggtgaatgggtgggaattctccggctggagaaactgcattttaaaaacctttaaaaaagcggtgaagcagttctcggcgtggtgcgtgtgtcgcgtcccgcctcctcgccgctcccgccctcggccgcccccgcactccgcgccggtcagcgttccggatggcggagggggcggagagtggcattttctgtttgacggaatcctgctccccaccttagggtaggggtgtcgcgggtgttgacgggttacctccatcccccaaattctggatgatttttaaggggttatcttgctgcagagtgaagtgcttcaggcttcagttttctgttcctgtgaatgcttcagaaaccctttcttaatattttatgttctaaaggggatacggtagaagagcagcagtttcttgttggaagttaatgccatttttttccc

SEQ ID NO: 38809 - DNA, 3056 bp, Homo sapiens
aattcggctctcaaaggatagcaccaccatgtgaaatgtcctcctccccatctgaatctgctgaaatcctactcatccttaaaggtttcacttaaatgccgaggcttccatgcattcctccctcaatttagaattaatctctcttcttcgctctcctattctatacctcaacattttactatatagttcactgtattacacttacctacattcactaaccccccgcaccgcacccccaaaaaaaccaccccgaggaggaaaggaatttaaggtgctgttaaacacctctatgccaggcaaggtgctacgcattttgcatacattatctcatttaatctacatgaaaaacatctggggaggtaaacaggtggtgttattcccattttactgatagggaacgtactgcagagttcaatagcttatccaactcacattgcaagccaattccagggcgtacggtttcccccactccgaagagctctttccaccaccccatgcttgttcacctggtgtcacccagcctaactgacagagtaggtattccataaatgtttgctgaatttaatatccccatggactgactctttaataatccgatcacgcctcatccctaacccgttacctttactgttccttaacggtggactttacctacataagcagctctccacatttccctgagaaatgctgcagacaacatcaacccttattggaagattgagtgaagaacttttccattctcccggatttccccaacggatcttcccaaagaatttaagaaatgcacacacgcaagacacatgtaacacttacaccctccctcaaggctcttatttcatattaaaccatgtcttcgagcttgtaagcaataaggtttatgcggtttccagctcacacagtggggacaccctaagtcactgccttaagaaaaccacatctttcaacctgtcttaacacgaaggcatcctaatactatcacactgccccctccctccgtccaccccccccccccccccatgaattgcagtttggatttccggcgggaatgtataatacagaccgcaagaggagacgcggttaaaaagcaatgaagcaattacttatcctgtttaattagaaagaagacacagaaggagccccgcctttcaaaatctctgcactgaactcatctatgaaagatgggggcatcgaaacccaagcaacccgacatccagtagctggtttctgcagctgggcgggggaaagtcctttcctccctgcggtcccgggccaccagcccccggtgctgggtcggagaagcctaaccgcaccctcccaggcggccccttatctcattgtctccctccgtcgcggtccccaggggcgcagggtgcagtccaggccccaccgacctccatccaccagccgggagcggtccagccagccccggcccgatccccaacctggcaacgaccccgccccaggctgccgccgaccgtaccgcacccggatggcggggccgggcgccgggaaaatggaggcgggagcggcaggagcgcctcacggccccgcgcccagccggctccctaccccctggccccgagggcgaggctaaccactcaccgcggcagtcggtcggccttcccgcggccccgggcaaggaaaccgccgctcgcgctcctccagccgctgcctccgcctcctccccaggcgcggcgctccctcgccagagacgcagcgactgccagcagctcccgcgccgcgcgctcagtgactgactgactgactgactgactgactgactgactgactggcgggcggcggcgggagcgggggcggggcggccgcagcgccccgcggcggcggcggcggcggcggagccgagtgtgctcgcgtccagccgagacgcagaaggcggggttgagggccggactgccgactgtagggccgactcgcgcgggaccgcgcgccgcccccgcccgccgccaaccactcacttccggcgcaggccgccgcgcccgccgcccttccctagcccgcgccccgcgccggccctccgccctcccttcaggcgcccggccgcgcccggccgcactcaaccgcggctccgctcgtgcctcgcctttcctccgcaagtccctgtgagccgcctacaggaacgagtgaatcagagaatgaatgagtggggaggaaaatcccagtgctgccccaccccctgctcgcctttcataggaagccggcccagcagcctctgtcctagcgccctgggaggcacagcagcctccagcagttctgtcagggagctgtacgcatccacctttatacgctgtccgtgtattcagagactccagaaacgcatccggggttggctcggtcacttacaggaccattgtcgttgagatctgtgaggcccttctttaggaaatcccattttggccaaaaagtctctgcagtttcatggaatgtattgggaaacttaggaacgggacatttcgatgacctttactttttaaacttcgaaatctgttaatcctgcctccttaatttctgtccccccaccccatcggaattgtgtagtagtaaggtgtcggcatttttccttatcgctaagctcagctgctgcctctttagatgcaggcttgacttcggcagacttttagattttaagtatgtccttattttgaccttcacctaaagttgatcaaagaaaggaacaaatggaactaagttatgtttgcttggctacatgcaaagcaagtttgttgacagcattaaaacaattgagaaattgggagtgtgacctgaaattggttgcaatgaacattgctttttcatgtcttcccatctgcttgctaagaatttatttaaattttcacaaagcattgactgtacattcctgaaatcctagctccctctctaagaatgagagtgttcatttctctgtcctggggccaaatcctggtttggttaattacattcttacttcctgatattcttgaggactttcaagtggtttcagtcttttttgtacaatctgttccaaactggtacacaatctgtttcaaattggtatttag

SEQ ID NO: 38810 - DNA, 634 bp, Homo sapiens
aggacttcagaatgacacagaaaaacaaacatctctcattgtcaagacatacccacccttttccccagaggcaaacccagttctctttttcctccagggaatccagcatagacctctctatgtgtttaggagtttggaaaaaaagaccaagaagggaagtatcttggaagccacttctgctttcctccttgtgacatattaatattccctgcagcaaagaagcacggggcctactatcttcctgaatatgggacaagaaagaggaaaatacacagagaacgccataaatacctatctcaaaagctccatcctcccacacagtcaaattgcgcaagcttgctcagctgagttaacagggagactcttttgcctgcaaacaggtcaatcaccagtaagccattatacttgatacctaccctcttctacaaattaacttagaaattctgattgggaaagaaaagtcaaaggtcagaggaataaaatgggtgcgtaaaattgttttcatagtttacatttatttttcctacaagtttaattccagtaggtaaaatattaaaagtatgagcacctgtaatcggggtcaattgataaagttagaaaattccagtaggtattttgtcctttcagagcatga

SEQ ID NO: 38811 - DNA, 1662 bp, Homo sapiens
gccaggactggtcatgtttcaactagtgtgttgatttaattcttactcaagggagaaaattgccacttggatcatcaaccccagtttctgtggaatcagatctttctccctgcctctgaaagcccttatataagaactgtccagagttaaatgaggggtgacaagttcataacgcagaaggaacattgtgtctctgggctatcaaaacattgatcacccatccagccatttagcagggtattcccttgaaaatctctggctcctaatgaacagtataaatatgtgaataggaaggctagatttggaaagctgtctgtatgagaagaaagtacactgatgacagaacacacatatgtatcccatgagttggcagcagtgtgattatgttgacgatgttgacatttgacagtcagagcccaggacatgatgtctttgagaaattcttcttaagttgggtatattttttcctagtagagtaagagatagagttggaagtgattgcctattctatactgataagaaagacataggctttgtagagttcaggaccttggctggcacttctcttggctgatgaagcaagccagcatggccagttctactggtggttatctgagccagtctgcacaggtccctgattgctatgaatcagcactcgtaggttccacaggcagtaaggaaccagaaatactggtttctaccaacagttggtctcagaaggactggtgtgactaaccaactgtaagaacagcctcaaatcctttctgggaagaggcagggtttataaataaacagaaaacaaacacaactgactcaaactgaaatttgtggctctggtttgatgtggtgaatgtatttaatgtagcccaagagagaaagctgaggtctctacatttatgaaattactaaaagattgcaatcactgttcagcattgtctaaaaatatcatgtacagtgtcgaagacttgtactaatcatatgattaatagaatgattatgacagtgctctataaataagggtatgaagtggcagtgtaggggccaagggaaagcttcccctttgccctctgaaggttggctgaaaaatcaactcacaaaagcagattaattggagaaaaggcatataaatgtattaatgtgtacacagacaagaaccgcagagtgattaccctgatccctcagtggggttcagaagcttataagccatcttgagcttacacaaagaaggggggggcttggattgtgacaaaacagtttatggtgacaaaacaggttatgggagagggagaagaggaggcctggctagcaaaggtagtcttgcctgccgggtagcagccctcagagagaatagaaggtaaatgattccttcagacctttgaaggtgtcagacttccagttaatctttcctagatccagccaagggaaagtctcagagaaagcctggctgcagcaatgtatagcttccagatgcatattttcctgacaatagacagctttccagggctacttctctttgcaggccctctgaagagccatcacaaagtatgtcaaataaatatattctggggtgaaatatttttatttccttcaatagtgaatagagacaagtatggactgttttaacaaaacaaaataaaagcatgccaataatagacattagag

SEQ ID NO: 38812 - DNA, 799 bp, Homo sapiens
gataaagtataggtgtgtgtgatgaagtcccaagtgatctgtaaattcctgcagaggacctcacattgctgggtgaaatctttgtgggaaattggtaaaaagaaaaagacccagcaggtaccctagaaactctagacctaatacagattcccttctttattggtggctctgaaaatttttcacactgctgcaggtactttggccttggagacatcttactggggacttaacaatgagaaagacttagggattcatcacttccaggcaactgtaaggaaaagggagatccccgtgcctgaacttatagggttggataatcattttccttcctgttacacaacttggttttcctggctgtggtgctaggtttatagcagttacagggtttatttaaggcaatccaactttggacttcaataagataaatagtgatatctaaaagagacatagtgaagaaatcacactcaacatgacaaagcattgagataaaaagtaataaagtccagaaaaactcttcaaacagtaattttgcttctaaaaatcctttgactttgatgtgtccatcaatcataggcctatttttgcttcatttcatctgtctttggctaaaatgggtgggatgaggctttttggatagcagtagttggtttctcctattttctcttaatggacaaagaagcaagatttatgtctggaagacttgctgaaaagaacgaagtgacctcccagagccacctagtaccttagcaataatctcccagctgaaatcattgttgccttgatgagctacaaatcaggg

SEQ ID NO: 38813 - DNA, 789 bp, Homo sapiens
aaattccagggaagactgtttacctcccagactccagaacaggagattggaatttgcaaaggcaaaaaagatgagaactgggctttatcaagcaaccatagttttcagttgcttcatgcatgccttgggtctgttttgataaccagcatatcttttgtaacccaggcaagaaggaaaaatatgtgtcctactgaaggggctggactagattgtgagatgggctctgagcattccagcctcaaagataattaagactcaagaagttttcttcttgagcaagagttcaggaaaagtttatactgacttcacaactggctctgaccaaaagtttcagtgcccttttgttggaagtattaacttacttgacccctagtttgtacataaaactggctaaagagaaaggaggcaacatgaaaatggattttaaaaatccggttttgaactatgcctggcatgctaaaatatttaattcttcaacacttggcatttagagaagagggtggatttaaacagaccagctggctaattacactttgccaacattcctactggctgcttactgggtgagtcctgtttatgtcaaagtctaactctgtcctttatcccttatcatggccaagaaatggaatcccatgcattttacttaatatgaaatgttctggtgaaacccaaagcaacaaaggccactttactttcttggtgagctggacaaggcaggtggtacttgaaggttgtggagaagtctccggacaggcttaaagttatgaacaactaagattccagcttacc

SEQ ID NO: 38814 - DNA, 630 bp, Homo sapiens
ttatacttcctaataatgctgcagtgttagaggaattctattgtaggaaaacagagaatactttaattgtagacctaaactatttataaattattgtcgtcatctcatacaatggaggagcttaacacacacgtatttgatttgacaccaatttcagcaaaacatttattgaggttgtgcacataactaaatccatgtggtgaggttttattgctaggttgcattctctgtgctgagttatatcaacaatactttgtttactgttttagcaggatgacctctgcactagtcagaggtcaggcctagctacattctactgcatcagcacatcaacctattgattaattgttgagtctttttttaagtttaaacttcggccaggcagtgattgaaatggatttatttttgcaagtaagcagattacagaggcaagcaaccttagaaggactattgagaaatcatgaaataattttgtttggaaagttaaacaaatgtctttatttcataagataaacatctaaatcagagtgggtgcacatgcagttctctagttgtcaacatttaaatacgcattggtagacttgtcaattttctataaaagtatgttactgagatctgtaatgtcaagga

SEQ ID NO: 38815 - DNA, 1335 bp, Homo sapiens
ccttgaggaaaagtttaacatttaggtcactcttctaataatactgagtttgtagaactgatattgattgagaactaagaattctgtttcttcttaggagttttaaaaattgatttcagagaatcaatttttaaaagtcaaccttccccaaatccacatttcttattaaattttactttatgttattttactgtattttccttaattttttaccttcagaattgagggctttttttccatttaaacaataaaattcattaaaatggtttttgggctgatgaaatcttaaaaacaatctgtttcttaaaaattttagacccatgttgtatacaaacatcttgtaataaaagactcaatgataatgtatgaaagagcccctcaccaccttcccatccccatgatacctccagctgcagtactgtgctcagctctcatcctgaggagcttacacacacacagctctctattaacatgtggacaaattactttccagttccctcctccccaacatttctatttcattttcataacattcattttttgataaacttgtaacagactttatatgataaataatggttgaaacagctgggcgtgttggctcatgcctgtaatcccagaactttgggaggccgaggcaggtggatcacctgaggtcaggagttggataccagcctggtcaacagggtgaaaccccatatctattaaaaaaatacaaaaattagctggatttggtggcaggtgcttgtaatcccagctactcaggaggctgaggtagcagaatcgtttgaaccggggaggcggaggttgcagtaaaccaagatcacgccactgcactccagcctgggtgacagagcaagactcggtctcaaaaaaacaaaaacaaaagcaaaaaaactgttgaagcaactgattaaacaaatatgtctcattagggaatcttttatctggccgtgttactcttgtccactgttgggtaactctttgtctgtgtccaggagaatctagagatgcattctgtctacactctgtcaggaccataaacaatttatttctgtcccatattattacttctatgatcaagaagaagagcgttctggacagccttacagagagggtcacctgaaacagattttgatgactttcaaccattcctttcctgtctgtcttgccttctcttctccctctcttttactttcactcttttctttttctttttcttgtgtttgttaggaatgcatgattgttgttcattttagggttaaaccagaatctgttttagtcagggttctccagagagacagaatcaattatacgtgtgtgtgtgtgtgtgta

SEQ ID NO: 38816 - DNA, 1642 bp, Homo sapiens
gagagaaagagaaagagaaagagagagataggataagggatttattaggggaacttggctccattacaagtccaatgatagaccatttgcaagctggagaaccagggaagccaatagcatgacttaatccaagtctgaaggccttggattatatataactcagtctgaggttgaaggcccaagtgcctaggaggtggctggtgcaagtcctagagtccaaaagcccagagaacctggagttttgacactcaagggcaggagaaagatgtcccagctccaaaagagagagcatagactttacaagtggagtcacatttgcctggtggatgacatccaaatgccagtgagcactgattttgcaacattgtggcacagtgagttcaggggcagagaggctcatatttgaatccagcacttgcttgctctgtggctacagcaaattacctaatctagctaacctcaaattgttcaataaaataggagtaataaggttggttgttgtgaggaatgaatgaaataatgtatgccacacttcctggcataataaacggtagtttttattaccacagtgtcagcagtacttgccttggggatggtgtcggggagagaggaaaccttagtagattttgatcactggcttggcttctggaaaggcacttcctgaatttacaaaagtttttgtgaggaagtagagaaaggagggatcgcatgtaaagtggctcagacaattcattgggtgagacattttgaattagaaaagctcaaaaggggtaagcacaaaaagtttacgggacgaaatcaaaatgctgagatgcaagatgggaaaggtgggcttcagcttgaatgacagccctgctagaattagttcaatgagtgctgtttatttataaagtcagtaagatagtgggatgcataaaagtcaaagggcaggaagtggcttctcagcttttcccagcactggtctgacctcaactgtggctactttgtgtctcccctttaaggaggttgtggggaactggcagagctccagagaagagcaaaaatgtaattaaggcttggaaaataaaggctatgaggaaaggccagaaagctgtagggttagttaacttagagaagaaaggtccaactgatttgaagggtcattaacagaaaaacattggttgtttctcatctccacaaacaacaggacaagaggaaagaagcttacattgcactggagaagggtttggcctgtgagaattgttaacaaggaagctctcaagcctcgtgctggcaattgaaaaagaaaatggattaaagtgcaactactgtgtgcccacccattcattcacactgacttgcaaagggagtgtgaaggtggtttcagaaaccgtttgcataagtttgaaaaataaacctgttgtttcctcttcatttgaactcatttagttgtttactatttaaatccagatattaacaaaaagttagtttgaaggtttagatgcaaattagatcggttcagaactttctaggtaaggccttgccctattaggttgattttgaccaccacaatcttttaggccaggcttattcactacatctcaggagaaactatatttggttgtgacttttgggaagagtcggataaaccccagtgctggca

SEQ ID NO: 38817 - DNA, 1187 bp, Homo sapiens
tgtgtgtgtatgtgtgtatatatgtatacatatatatttttaatgtaaatgatatcatattcttttgtagtttgcttttattcaacaatctgccatggagattttctttcctttaatgagtgttaaattctttttggcaactgcagagcaacccattgtatggatgtgccagaatttaattaatccccaactgatggacattaggttatttccagtttattattaaataagcaagggctgagttaacactttaccccaagagcttatcagtaaagtagataaattcctaggagtctgattcatgttactgatttgcttttccaaaactggcttgctttctaaaaccttattttatatataaatatttatatacatgtatatatgtaatatatatattttaccagctttcattgctactaataatatctgagagtatagaaggagatttttcagttcactgacttgaaagtcttcaaatattcagaattactatgcattaattttggcaaacaggtgtcaaatgttcttaatgagtaggttaaatgaatgtggtagtaatgatcagaaggcaaaacgagtctatccaactgtttgtcaagtagtcagaaaaaatctcttttttctttatgcccctacacacaatactttgggtatacctctattggagcacttttaaaattttgacttatattcttaggtgtctttccagttaatgttagctctctgaagacaggaactgcgctgcaatcctgcaacgatctcatacagtgtgtttgtcccttaataaactttgtggatgaataaatagccacaaaattttccatttgcttctcctgcatttagaagcatccacttccctctcttccctttgcttttgaaatataagtgtaatatttgcccagggtaaacagacttggagcttgggagacagcattgtgtaatggatgttaatttggcctgatttcactcttggctctctgatttgttagatctatgaacctgggcaagttgcttaagtcctagttttctcttctgtaaaatgaagataatagattctacttcaaaaagtgttgtatggattaaaggagatcacattttaaagcctttagcaaggtgcctactataatacttgatgaaggatagctataacgattgctgtttcctcaaaggtacagatatcctaatat

SEQ ID NO: 38818 - DNA, 2260 bp, Homo sapiens
gtttatagagcaaaagatggcaacatcttctgaacataataagcattttcaaatgtgggtcaaagatagctccttttgaaaggcagaatttttaaaaagatgagcaaaacatttacttcgtggaacttagtgaatatcctcttctctgtaagcaaaaatacacttctccccattcctctaaggatgccagatcctgattcattttctgttcaagactcagcagaaacacaatgctccattttatagagggttattgcaacacaatgacggcactataatttctgtcagggtgaagtgcttcacttggctttgggccagtgaaactcagtgttgtttagcccttctgtaattttggacacaggcaaataccttcatgtttatgcattctgtatgcttttaggaagcatttttaaaatgtggttttaacagcatctcattagaagcagcagttggattttccatgtgaccagatttcttatccctggtgtgaacatttagtttttaaggcattgcaaatgaaagcaccacccacttctgaggccaaagcagtcgtaaaacccctttgtcaaaggaaacctgtaattgtaaaattcctccttgatttcatcgttcatgtggactgaaatagagttcctctttttttttttttttttggtctggttatgtggtgtgtggtcattcctttttttttttttttttgagaccaagtctcgctctgttgccaggctggagtgcagtggcacgatcttggctcactgcaatctctgcctcctggcttcaagctattctcctgcctcagcctcccgagtagttgggattacaggtgtgtgccaccaaacccagctaatttttgtatttttagtagagacggagtttcaccatgttggccaggatggtctccatctcctaacctcatgatctgcctgcctcggcctcccaaagtgctgggattacaggcgtgagccaccgcgcccagccccagtgtgtggtcattcttaatgttgttttgaagaagttatagacagttaaggaaacatcttagagaactggccaagctctaaagctaggcacatttcatatttttgtctatttaataaaaaaggacaagactgttttcccggaagcctcctggtccgactcccaatacctgcctgtggatagcactgtggacttttgtcccagaagactagtgtctggataaatgttttgtaagccttacttcctggatgggagccaactgattgcttacacgtgatactcatctccccatgaacagtcatggtggctgctgtgtactggagtcctgcagctgtaaaggggacacgctagaaggagagaagggaacagtcctttgcaggagcacagctgtgtagcaggcctttgatccaacagcaaaaccaagcctagcaagttagttatctcattcctttttagcaatatgacatgacgaacatgctgcaatgacttccaaatacttccctcctttttgcttagattgggggtagaatgaggatagaaaatgagaggtctagggaaaaacaaagtatttgtgtattcagacatttattgactctaaatgcaaacatttactaagtcctctctgcaggccaggtactgtgctcaatgttttacatgagttctctctctcaattcttaccataaccaccaagtagataaatcccaacttctgtttagcagttgaggaaattgagcctttggggaggttaagaaacttgcccaaggtaacatagtagtaagaggcaaagctgggactctatcctgatgcgatgccaagcctatgctcttaaccactgtgctatactgcctccctgtgttagaatatcttttatcttttatccccagcactgtggaagagaagtagaagataacaaacctgctacatggtagatgcctggagataatattatgtatgtttgccattatattatattcttatgttagggtacactaaattgctatgttctatttgaaacaaccaggaaacctaactgggctcaagcaaatgtaattcaagctgtttgatctctaaaatatgattataatgatctcttcttattggcctctctgtctgtccctggctttctgaagagatcttttgttttgtatgtacagttgttactgagaaataccagctgcaggggaacaattcatgacattaccttctccccagcattttccctccccacaacccccggtcctggagagtgctgttattttgaatgaatatgattgacagaga

SEQ ID NO: 38819 - DNA, 897 bp, Homo sapiens
ttaaaggaggtggtgtttaggcagtgaacaggcattactgttttacacagcaggtaataaatagatagaactctgtactccaaggatgatatagattgaaaatataaatgtacttgataagtgtttagaaaacttgcagctagtatatataataaattattgtataaactagggattcagttatactctaccaaaatttattgaatgtgtactttgggtatattattatgctaactgctatggcagatatagtaatgaataaaatacagtcctgttgctcaagagtttctaatcaataggaatgacaacatgcctctaagtataaaaattcagactcctctacactatggtagattgattgcattaacggcccctcccagttttcacagcctttgccctgaacctttgtgttccctcccattctgactctgggctcattgatgtgacttgctttggcgctggaatgttagcaaacatgatgcaagcagaggcttgaaaagcgcaggcgtttcctcttgccctcttgcatgattgggtgtgttctctttttcacttcttccttgtcatgaggacatgacatgcctgggctaacgtactgccaatgtgaggcacatgtggagaagattcaaggccatcctaaacccctcatagcccctgactcccaaacacatgagacagctctgccaagatcagcaggagtgtttctcaatgcacactctgactgcatatgcctacatgaccccagttcaagccagaggaaccattctgctgacccacagatttataagcaagaataaatggccttttgagatagggtcttgctctgtcacccatgctggagtgcagtggtgcaatcatggctcaccgtagccttgacctcctggtctcaagtgatcc

SEQ ID NO: 38820 - DNA, 1921 bp, Homo sapiens
attagttaatggcagagctaggattcaaatccaggcaatctggctccggggctagtattcttaactctttcccatgtcacaggccaatgctggagacaggcctgtgagcaaataattacagtgtaatgaatgaggtaagtgctaatggagggacatataccgtgctaagggaatgaaggaaggagtgactaaggttttgtgtaggacatttgtgcaatttcccttgcccactgccagaaatgaacaaagcagagtcttttcggggcatgctttattttgctatacgtggatgtagatatagagctcaattcatgttgccttgctgcccctcccaaacataacaacacttaaaataatttcttcctgacatcctggaccccctccaagagtttgtcccagcttttggacaaggcagaaacaggaaaaggatgtcctaatgttccctgaccagagacctaaattggaatttggaagagtttcgtaattaaaatcattgttaagattttattgtcctgtaccctgtagtgtgtgtgtgtgtgtgtgtgtgtgtgaacattatatatcagccaccacacatgtactatatacaatcactaaaatcaacttttgtgagattgcttaaatctcaaagtttctatagtttgtagatctatgtttagaagatattttgttttttcataaaggagaattaatatttttcaactcaaatactttttttgctatgacttaatcataatttggtagtaatatatcacaatttctgctaataacgcaaaaacaaactcacttctgtttcattctctctcaatagaaattgtttcagtttggccccctatactgattcatttctcagctgatctttgagatattgaacatccatacctttggtatttttatattacttgatattagagcgtcattgaattcatttgaacagactagacaccataaacaggtgctgtctgccgccgccaagtgatggcctattcatgccaggatattaagcatatcctgcagtttggtaaacagaaggtgggattctaatccattcagtatggagcccctcgttctttcctctgtagtgaaggaaaatctctgggaagtccctgctcaggaattctctatagctttagcagttagtgagtctcattccaaaatgacccaagaagagggctggatcaattacccccaagcttcctgttgacataacctatttcttggagtgacctcagaaatccacacaaaagttccaagttgccatgtagcccctttcttttactttactccttttgggtttcagcgttggagaaaccctctctcctttccaaagctgaaactgcctgggagctttgagtctctgactcactactagattgctcacctatcagggccatagagaagacagagtgagacaaggacattcttacaccatggaataacctctggggcttatggtcatcaaagcagagtctttggtctacaggaaaaaggtaacactcttagacccagcagaggcatcagcaagggagtttcccagggggagggacagccctgcttactcaactggtcaggggttactacacacagtagctctactctcacagcctttccttgcttaggcataccagtgtgtcatgatggtgcagctagtctgataaatggagcagttttggagggaggcacactgcaatagctttgcaacaaaagagtctatgtctcgtccatcattcaaaggagttatctgaaaattgatgactgtagcaaactactggctatcccccaaatcaatccttttttttttctatagtaacagaattcccaacatgtagctgagaacagccatggccatataggtctgaggtcagcagagttacacaatagaaggcacctgggttccagacccttgggctgccatactgat

SEQ ID NO: 38821 - DNA, 2113 bp, Homo sapiens
atacagttaatatatatgtgtatgtatgtgtgtacacatacatatttatgtttttacataaattgccccacacaagcagtagcatataatatattgtgctccttttacaaatgtatcttggggaactttttatattactgcatgtagctttgcctcagtttttaaaatggctgcatagcacccaatttaatggatgcacaacaatttaacagatcttttaaattgtttaaaaatatttttcttctgaactaagtatttttgtgcatgtgttattgagagcattacaggaatctgtagggtaagtgcgtaggaatagaattgctgggttgaatgacacatgcatctgaaatattgatagatagtgcagaatttcctggacctaacatacattcctatgggattgaccattaggaggccaaagaacggaagtggaggggtagggagtagaagaggagggtggggcagtgaggcctggaatagcagacatcaagattctggtggcacagttcctgctgaggacaaggtccagggtgtgcccgcaccaggaagtgggtggcatggggcacagtgcaggcgaaggtcagtgaagcagaggaagttaaagagctgtgagttggtgggtgactcaccccggtgatgtcagctagtttatgctggtgagctcttcatcagaactggagaaatgtggttagagaaaccttcagcttctctttaaatctagcagggaagagccagatgcctcccagtccattgtctaccctgaggagcagagaaaaaactcttcacactttcactctctgaggagaaagcacgtcaatcaaaatggctgcctcaggggacccaccatgatgtctccattttttatgatggcatctgtggcaccgggacaggcagggctgtttctgcagatcctccagcttcgaatgaattatgcctgtggacaactcatttcacatctcgggtcctctaagtgtttctgacattgtcagaacaaccctggtctggggcacctctttcttgataataaaaccaatagcaacaatgacagcagtagcggttaacatgctgaataatcagttaggggttgtgttcagccgcaggtagcagaaacctgaaaaacactggtttaaatcagagacgagttctcatttccctcaggtaccatgaagttcagggataagcatcccatgaaaggtatagcagtttcgcactgccttttgtgtcaggagcctctgtttctgctctgcctctctagtgttgacttccgtcctcctagacggtggctggagtcctagccattgtgcctgtttcatgctggaagaaggaggtaggggtcaaaggcgaaagggagcatgacggatgaattgacatctcccgctcctaccttttaatgaactgtcccagaaaccccactcaagcactggaagcttacatctcgctggacagcttatagtcatgtggccacccctatctgcagggagcctgggaaacagatttttagccgtgctcattgctgtcgccaccaaatcaaggttctgttaataaagtaaaagaggagaacagatattggctaggtaactggcagggtctcccagatgtcccaggcacttcacattttttaaaagttgtattttattttttactgtggtaaaatatacataacatagaatttaccattgtaaccatttttaaatgtacagttcattggcattacatatatttacaatgttgtgcaaccatcaccattatccacatctcaaatagtacactgtacctgttaaacagtaactccttcctcactgtcctggctctcagacactgggaacttctctactttctgtctctatgaagttagtacctcatgaaagtgaactcatacagtatttgtccttttgcgtctggcttatcttgcttagcatagtatttccaaggttcatccaggttgaagcatgtatcagagcttcattccttttaatggctggattacattctattttatagatatatcacattttgtctatctattcacctgtcggtagacattcgggttatttccagcttttggctcttgtggatacgctgccaggaatgttggtgtaccagtatctgtttg

SEQ ID NO: 38822 - DNA, 1090 bp, Homo sapiens
ggaaatgttttctcttgtcaaaaatatgccagtagtttctttctgtttcagtttgcggcattggcctgttgtgctatatgatgaaacatgtctgcttagaacaaccaaacaataacagtagttactgttactggaaaggggtcccgatccagaccctgagagaaggttcttggatcttgtgcaagaaagaattcgaggcaagtccatagagtaaagtgaaagcaagttgataaggcagagcagccccaagggctgctggttgcccattttaatagttatttcttgagtagatgctgaaaaggggtggattattcatgagttttccaggaaaggggtgggcaattcccagaactaagggttcctccccctttagaccatatctctcatggtgctggtgggagtgtcacttagcatacttatgaattataattagcatataatgagcagtaaggacaactagaggtcactctcgacgccattttggttttgctgggttttggccagcttctttactgcaaactgttttaccagcaaggtctttctgacttgtttcttgtgcctacaccctttctcatcctgtgacttagaatgccttcatcttctggaaatgcagcccagtaggtctcagtcttattttacccagcccctattcaagatggagttgctctggttcaaatgcctctgccattaccattgattgagcatttattacatgtcaggcactggataagaacttgtatgtataaaacaacttaatccttttaacaacccacacaggaagctgttaatgtttaacaaaagaacaggctgaggtttagtgaggtcacctaatgggtagaagtcacatgtcagaggcagtgactgagcggcacactacctatctttcatctataatctgcaccaagtgccaaataaaagggtcaaggtgaagggagcatcagccaggttccaacatcaggggtgggggcaggaacataggagagtggggtgggcctgtagtgtttcttgggtgaggaggggccacattaaaaagtctctacccttacatttcttccctttatgtctttggatattgcttcccagtgctttc

SEQ ID NO: 38823 - DNA, 638 bp, Homo sapiens
attcttatgctcattttacagataaagaaacaggggtccagaatttcaaacctcgtgcttttcccccccatgatactatttttgcttcatacttttgagcagtgtcaaatcctgccagatcacttcccctttgcccagacctgctttggctcttacctgtacttttctccctcttagtctccacggccaaagtgatcaatagaaatgacaggattaaattcacaaagatatgaaaccatttcaatgccttttctctacttccagccttagagaggtatgatagcctggtatgacaggagacagctgatcacatgtgccctcaatcaggtcaatgtcatgcaatagcagcacaacttgccaggtggaatgactagtcgttatattacctactgcagacctgtttgagccaagtgatatggcttgtgaaaggcagttttcccaactacagtatgcgttgcataatgatggggatacgttctgagaaatggattgttatgcaattttgtggttgtgccaacatcataggctgtacttacacaaacctaggtaatataacctagatggtacacacctaggctatatggtgtagcctattgctcctaggctacaagcctgcacagcatgttactgtactgaat

SEQ ID NO: 38824 - DNA, 728 bp, Homo sapiens
cacgtaatggacctgggctcacccattgctcacagcataaattaaggccaaaatattcacagtgtaaactaggcatgtcattgcctcccgcagaattcacagtaacctgcttgtcactcaaaacctgtcaccttcaagggagtcagtatgcaaaggactcttctctctctaactatcacagggaccactggctaccttttgcctttcatttgcctcaaccatcgatgttacataagcagatgacatgctatttgttttgaaaattccacttgcttcatttggccattcctgctgcaaccctcgcatttgttctgtgcttactttcaaaacgtccaagccgcaccgtccagagctattaacctctcccaagaatgtcatcaatcatgcttggcacgtgggctttgctagacaaatctaacaacatctgccatgcattctgcaacttccttttgattcctcacactttattttcactttcatctctgtgtgctggtgagatttatgtctgatccctttcagatgccaaggagttggtaacgtgccattcctccaaagggcagtgtgccgtgcgagaaactgggacgaccgctagtttggggctggcaggcatcccggttgccaacatccaatggccactgaagcgttttgccaggaaacctcctggattcagtggccactgcacctgagaaaccactcatacgtgtacacatgaacagctggcacattaa

SEQ ID NO: 38825 - DNA, 640 bp, Homo sapiens
attgtgaacaaaaatgtttactaggtactctggccatctttattattgtggctttaatgtttaacactagtatatttctcttaatctctttggtctcaacctgaaacaggagggaatggtgacacaagtggatttcatttccagtgaaacagaaaggcagcaacaagtctctaagctccctcacctctgagcaaaatgcagagtgacttggagtcctgtgacctagcttgcaatgttgtgatagccctgatagtgattcatgtccttacaaaacaaacagctatctttctaacccttcatagcttaggcggggcctccaccacagagctacctttggtcggctctgcagactttgatgatgagactctagcagtcagtctaagagagaaaaggacattcagggaattttaagtggcttggatcagcatttgtcatatacaattgatgttcatttatatttcactagccaaaatctaatgctgtccaaaattgggaaagaaatatttcaaatactaatcaggcccaatcttgctttaatgtaaaaaatgagccttgtcctaccttttttcaatcctagtctcagaagggggatttaatatttcctgacagtgctttaaatactttgctgttcagacttcag

SEQ ID NO: 38826 - DNA, 1275 bp, Homo sapiens
caggggatagaggtcaaaagataagagtcttagctccaggtgcaaaggtgtagacgtttggctggatgaaaaagagacgaggttaaagaaggtaagagatgtatatcagttacatatcactgtgcactctggcatgcctgcctgctcaggaaatgcctctgcatcctgcaactcttctcactgctcctgaaccctttttgtcttactttcttctgagggccgtgtttctgctacagtccccacaagtggaggccgttgtgctttttattttttcttatatgccactccttaggtcttttttccaccatgtgtcttccaacccctttccctttcttcctttaagtactccagttcagaggaaactcatgacttccactgcacttcatcagctgttcggcagtccccacccccccatcctcaccttcactaagtcccctagcactcggatcactgtttggctctccagctctccacaggctgttgtttcatcccagggactcattccacagctcagtctattcgtggtggtgcctctccatctccccaacatgctactccatccttctcagctacctcgtcccctggtgtgttctgatctatgctgcctgtcattgcttcacatctcattcttagatgccatttcttgcccttccagctcacttccttttgaactcccttcccccctcccccacaccattgcaatgattcatccatgtactggaaaccccctaatctgtggaaaccacctatttttaactatctatatccatatctgcctatcctggtcttcactctccaatttatccagctaaattccgaagttccttcgaatcactctcttgcaaacattctcaacttctctgcttggcctcagtcatgctggaattgtaacaccctgtgaaaggaaaataaatcttgggacccccaaaatcactaagtcaaagggaaaagtcgagctgggaactctgtcaggcagacctgcctcccattttgttcctaaataagatagctacaaagattatttttttaaaaaagctacatacctccctgaaaatttacctacaggacattccttgtggacctcaagatctttaccctaaaatatcaatagcttatcctcttcacaggtgcgggaaagtcctccctctgctcacctgagacaaatgcatatctgactacttcttctgccttattgtttatgtaaaaatgtagattcactgaaccagactaaagcataaatggttgttcctctacccgcccgcctcacatgtaagt

SEQ ID NO: 38827 - DNA, 698 bp, Homo sapiens
caatttttcatcacttaaaatatcctttgagtaattctgcagggcatactcgaaactgatgagtggatcaaaaatgcttactgatcatcacatgtcagaagtgacatgacctcacaggagaaagactactgaaatgttcaccaacagtagtatgaaaatttgtactaaagcccctttggccacattctggaaatctcagtcctgggtgtagcttccaggagagcagaggtattgcttctctcatttactgctgtataacctaaaatagaacctgacacatagtagtcactagataaatatttgctgaacagctgaatcaatttaatgggtgtttccttggtgattactctggttttgctcataaagttttgttttgttttgtttggcaggggagccttgttctgtcgaccaggctggagtacactgttgccatgttgccatcatagcttactgcagcctcaacttcccgggctcaacacacctcagcctcctgagtagctgggaccacaggtgtgagccaccacatgtggctaatttttttattctttgtagagacgagttctccctatgttgcccaggctggtcttgaactcctaggatcaagtgatcctcccaccttggcttcccaaaatgctaggattacaggcatgagtcaccacactcagctctttgctcataaagttataaaaaagtaaacg

SEQ ID NO: 38828 - DNA, 802 bp, Homo sapiens
taataatattggtcaggattattgttctttctctgtataacacttctttactggctactccagtacttgctaagctgttggataacaaatggaaaaatatcacatcacaggcatatttatctaccgagcaggcaaaacaagaaaatggaacccgggcttggcatcatctagtgttactcaatcaaggcaaattatttattgtcttctgcccaggaggtcccatggggcatgaaatattgatttaggaatttgctgggcatgaatgactgtgtgttgcaattgtgttcttttttttaatcccttgataatatatggtaaattgtttctatatatgctgtgatgaggctgaataacaaattaaacctggctatttaataaacatgaaatgtaaacactaaactcttcatactaacttagggctataaaaggtcaccccatggtgtacaggattgcacaatgcactgttcacatccttgtctagagtcatctcttccttcatctcacaatggcatggcctctgctgcatcccctaggtcccgattccaacttcccaagtggaactgggagagccggagtgttctttatggttcacttggggattatcaaagccaggacttggggtgggaggttctagatattgggaaggagctaaagctgggctaagagggaatttgtggcgaagaggaggagctattcatgacccaagcagaagaaaatgagtctggagcaactgtaaagcaaaaagccacgatgcaggaaggatggcaacatgcaaagttatttcatcagtggaaaatctttg

SEQ ID NO: 38829 - DNA, 1523 bp, Homo sapiens
tgttaacttttttttttcctaataaaatgcacaacggtagtcgcattccagaaggctatgtgtcaacacacgcgatcatatctgggtcttgggtgtgacctttggccaaatactcagtgtcctcgagggtctgtaaaaggaaaagtttccactggcgcgttctctccaaggttcgcttcagctctgctatcccagggctcctgatggcagcggcacgggctgtgcttaaggcgagttcctaacaggccctcggggcactcctgcatctccgcacccggcagcctcgccccttgggtgtttttggtgggcgtgactagaagcacctgctcctgggctccttttgcatcttgctgcagtcccctcctgtgaagggcgcagctctgcagtctcctcgctcttccctcgggtgttctttctgagatccggtttcaatcctcgagcgtgtagccctcaggtccccttacaactccccagagctccgtgtgcatgcgtgcgagagggagagagccagggagagacccaggtgacgagacgaggctcccgggctccagttactggcccgcagggccggggcacgtcgtcgcccagcgtgcggcggggcccgggagcgccgcggcccctttaagagccgggcccaggccgtcgccgggaccgcaggagcccagagcgcgggcgccgcagaggagttgggagccggcgcaaaagtttcctcccaactctggccccgtgcgccgccgccgccgccgcccactccagcccccggcttggggccggccctgccaacgccgccagggccagggccagggccaggaccagcgacagggcagggccggcagtttcgctttggtgggcgcggagcagccgcctgggccgggcaggagtaggagcgggaggaggaggaggaggagccggtgccgcggagctgccgcgtcccgggccgccgggcacctgggaggtaacccctttccgcggccgcccctccccgattcccgccacctgccgcctggccaggtggaaggggcgctgccgcgagcctccgggcctcagggtgttccggggagcggcgccccgggtctctgggcccacccgccccgggcgtcctccgagagtgggggctgcgcccgcggggtcagacacctgttcggcccggcccggcgtggtcgccgggggccaggatgaaagtgaccgtgtgcttcggcaggacgggcatcgtggtgccctgcaaggagggccagctgcgcgtcggcgagctcacccagcaggcgctgcagcggtacctgaagacccgggagaaggtgagcgcggcgcggaggagtggggcgcggctgcagccaaggcacctgccaggtgcgacccggtggcgacactcaggggatgcagaaaacccaggggattatggggcactgcctgtagctgcagctgttgtctattgctaatatcagtgatgtgggtgtctttgggtgtttgtgggccttgagctccgagggtcgtgagtggacctgcagcattggaatctcttggga

SEQ ID NO: 38830 - DNA, 1639 bp, Homo sapiens
tccatgttacagctgtccaacaattggaagtatttattatttacataacagtatttctagtatataaaattcagttgatatatgcttgatacaatttactcagatttttgaagattccaaagacattttacaatgtacactgaaaatgattgttcccaaactgcatttcctgcttttcgaaatcatttctctcataccatccctccagcagcggtcagagaattgagtagcacttttttttggcagaataattctatatccaggtcagtgagagttttcttgttcatactttgatgttttgtaaatacaaaacaaaattcttattctgatctcagtcctgttaggggagtggttagctcagcatgagtcctaatgtatcagagatgaagggaaattggttgggagactactcctgggaccaggtgagaagcagctagtgtcattccgaatgtgctacagaggaagaaatccttgtagccctctatggtacttacttagaaacatcctattaaaatttgctacatagttaaaactgacattttgacccctgtctaagaaagtggggaaacccttgtcatgaataatgctatgtacagcagcagattaggacttctaccttttatctcgctttcgactctaaggtagcattccattctctgtcactttggttaaaatgttactttggaaggcagaggtcatttggagattgtctcgtggtatgtaaataaaactaatataaaaagtctgttttaaagttatacgacctctcctgttcttcctcatctcctttataaggtttataacttgcagacttttagcatcagtaagattataatatgtaagatatatataaacaacgaaaggaagaaaatgggaaagcagtcccatattcttaatgttcttactatatacatgtatggactaattcggacaaagtctccaattattttaaaatatactgatccacttttaaaaatccatttgcgtacatcccatatctaaaagttgtgtagggtataggaacaacaacaactatataaatctatatctatatctatatatatgtgcaagcttgcaggatatcgcaaaaatgaattgagtggatctttgatggttaaggttgagtctgttcaaagcctattgacttttaaaccaggagtctcagactcagatcatttcaggagttagacaagtaactggtgaaatatgcatctgttgcattttagacagtgagaatttccttcatttctacacagatgtcatattgattattcttgaaatatgagatcttcttgatctgtcttctgtttcttatttataggagtatgtgcagagaaatacacactatttggtgtgagatgtgagatactaaatgttgtagacactgggatgtcccagctcagcagcagctggttgttgcctcgatgtagaatgcaggccaccagtggcccgacttttgcttttaccagatgagatggcagcctggttcttttgcagtttggcctgatttttaagcaacaggaacaacaacaaaccatatagcccaaggagtatagacctgtaggtggactgcatcagcctgcgggtgcccagtttgtgatctctggtgaaacgttagataggagactgtcttttcttc

SEQ ID NO: 38831 - DNA, 457 bp, Homo sapiens
gctttaagtcttggttgcacacactgggtgatatctgagagtagaagagaaagctcatgactttagagacatgtcatcatttcattggctgcaagtacacatctcttcctgttgattctccccttagttctatagctaaattccttgtccagttaccaataagtatctctttttggaaaactctgtccatttttaagcaacactcctgcattcaaggctacagattgctcagtgcttcagtcagctgatactgctccctaaagttatgcaatatcccaatatccctgcttgaatttccacatagtagctacattcctttctcttcctcagaatcttgcttctctctgatttactctgcttgtctgttctatataagatgcccccatttgttgcctgcattcctggatgcgttttcctcactgctgttacgcaagtgccaaagtcattctaccttgca

SEQ ID NO: 38832 - DNA, 1725 bp, Homo sapiens
ggataggttttattctgagaaccttcattcttaactcaaatctcaaaaatagatgacaaggcagaaaatatttggggtgataagattgaatatggaatagagcatcaattgcttgctctcagatactagtcttttttgtttttcaagtaatggagaaaccatatattattttcatctgggagtgtctgttgtgtttgcatgcaccagatgagctggagaagttgtggcctgcaagtaacataaagcaaataaaatttttgccagacggggcataactaaatgcttaccaccctccctgaaagttagttacgttttgatcattggtctgctatattgaatgctgatttttttttccagtttgacatgatagtaagtgacattgcattgtataaaaaggatatttttatttacacacacttaaaaatggatcctgggttttaaggaaatttccttttaagcacattttggctctggtaaaatctattctgaagaacttataggcaaatagcttttgagaatttggactcattagcagggcttatttctttggctatatttcctgataatagttttctgtaagctatgtgaatgtcagagagcagaaatagtcagaatttttcttctgagctcattagtgaatgcatacaggatgaggtagcctgaaacagtttgaggtataatcagtgtcttctcactctctccttttctttcatctcattctttaccatgtttgttgggcattagtttaaaagcctagcatttaataggaactttggcatatgtaaatattttctaggttcagttttagcaaatccgttgctctcatgaagactgtagagaaaatgtttgtactgatttaggaatgttaagaatgtggtggggagtggctcttcagaatactgcagtgtggtaatcatgtttgtggctatgattttcttgtttttgtttttttttttgtctttgttctttcatctcagcttttcaaaatctttagaaaatataagatattcccattttagggtttagaaaatgactcaaatatatgcatatagttgtgaaaggtgttgagatagcctcaaataataagctatatcttttgaccatattataggtggggtctctgcctgggaatgacccaccctcaagctgtttggctcctgttaaaaggactagaagggctctgccagaggaacaaggatgctcttcctggtgtggctcttctgtggcatctggttcagggctgtggtcccactcccaatggcagattttcttattttagagggagtgagtcacattcctcaaccagtggatgaaaaattccagccattccaattatccacgcctatgatcccttctgttttacacagatcattgagtcccaactcactagaccaagactcagggaaatcatgctatgatcttggctgtgccattggccaattttgtgacctcagggagtgtgtaaaatctgggtctcaatttcctcatctgtaaaatgaagtaattagaagaaaggccctttttgatgacacagtctgtgacctctaactggtaatttttataagtattctcacaagaaagctgtggttgcaagaaactagaaattagtgggataaatgagatctaacataggcatcgattagcgtacttcttaccaagttttagagggctccaaggaatatcttgggctgtatatgtgatatagcaaactttaaagagtttgtg

SEQ ID NO: 38833 - DNA, 3274 bp, Homo sapiens
gtctaattttttgtgtgcatgtgaatgtgtgtgcttgtgtgtgtgagagcctctgccttccatgggggagtcacaaatagtgaaaaaggcagtcacacatagtgagaaaaggcagcgctttcatagaatctttatattcccactatgccttatgctgtgcctttcatgtagtcacactaaataacagtttggtttaaatcagggtttgttaacaagccatataaatttttggactctgccttttagcatgtgaaagacttgtgaagatttcaaagacaaataagaaaaagtatgcctaacgaggtgtatatataaagagagttaaaacattggtgattcttgtatggacagaagaaagcaggggatcatttgataataaacctacatttctgttgtggaaggaggtgtaaataaatgaaaagccttctttcaagtctatgaagtcttatttactgtggaggcattctaatcatttccccaatctgaaaggactgaataagcaggagagagaggagagagttggtctggaaatattttccccatggtgagcatagctctaaaggtcaatggatggactgatgcagtcagctggtgacacttgaatggccttacccagctggcatctgttctgattgattagcgcttctgtgctttagattagaagttattattgaaatatgtgtttggctcactttgaattcttattgactcagttagtttacgtttcatttcaattctagattttccatctctgtttcatacctctgttgtctcatggactgtttaaaaactaatgctttccttgagtaagattctccagaatgtcaggcccagaagttgaatttgactcaacgtttcctgaagattggacttctaaattaacactaaaagtttccgaagatatgttttttagttacgtcatcagcttaatttgtaacccttttcattccaaatacatctctgaggtaagtcttctagcacactgacttttatttacatttaattcggaatattcttagtgctgttaagacacctttttcataaaaaagacaatacattccgtccttatggttggcagagtaacaccatctgaaagatgtctacttcctagtccctagaacatttgtatatgtgatgttacatgacaaatgagaattaaggtaacatatgaaattaagattggtcagtttactttaagctagagagattaacctggtgggctcagtgtaatcacaggggtctttatttgtggaagagggaagcaggagagaaggtcagacttgactggccatttatggttttgaagttggaagggaccaaagagctaaagaatgtgggcaacctcttcagaaggtagaaaaagcaagttaatgaatcctcccttggagcctccagaaaggaattcaggtccactcacatcttgatgttcacctagtaagatccacgcctgacttcaggcctgcagaattagaagataataaatcagtgttattgcagtccactaagttggtaggtaatttgtaaccggagaaataggaaaccagtagaacccttctttatttcagtttggtgatatgaatgtgttgcttcttacattctagataccaggcatttataatttttcctagaagagttagcctatttttactttataggatcaagggcaaccatgtttactttcataaggagtaattttttttacctatacaaaattggataatttgttttgctattgaatgtgattatatccacttttatcaatatataattattatctaagtacattttggcataactcactatatattttatataaagtcacctcttataacttgcataacagtaacccaacatgcttttgagctgtaaaaaggagaatatgttcgaacattcttgtttgaatggtttagtagttacgacattggcattgttaggaatgacaaatagtcatttcctatttggtttatcagggaacactatttccttggttgcaataaatgtccatactgtctattggttttcaacttttggaatcaaattatagagaaagtatggttatcattacagaaaagaatgtaaatatttgcaacttcagtagcataaaagtaaaggtagagccgacagaaatgggaagggaaggggtggaaggtgaggaaaagagtaagggctgccaagtcctcttttactccgaggaatgaagagatgctgttttagatgacagaataaacatagtcatttattaaagataaaggtaaccactaaagggaataaaaatatttgaataactctattaatggaaaggatggaaaagttgggggactctaaattcactaagttcccatgaatgatttcagaaagtcaaaagatgattctgaagttgaacggttgggacagtcagaaatgcttattatttagagaaaaggtgttaaaattcaaaaagactaaaagatctaaaagagttgcctctggagaatacagaactgggccactcttctgtaccatttaattttttaaaatcaaagtaatgcttacacatggtttaaagaagggttggcaaagttatctgtaaagatctagaaagtaaatattttagcctttgcaagccacatgacctctgttgcagctgctcaactctgagtttggctgtgttcccttttatctttatttacaaaagcagtgataggtaggatttggcccatgggtcacagtttgccaattcgtttatagggtcaaatagtgctaaaaggcccatgacaaaaacagtggtccaatggccccctgccgcccaaaccacttctaagaagcagtcactccaaacccttcactctaaaccccacaggttttttctatttttctccataattctaataatgtatgaatcaagggataccagtgtgcttttatgtctaaatatgaatttactgctattccttggttcatcaattttagacattttctgtttacatctgattaaggtagttgaaaatactagctattttatagctataactcaagctatacgtttttttctccttgtttcctaaaattattgttaggctatttggttaaatgcatattcagtgtttttactgttatgagaatgcagctattgttacttttgagcccataactatggttgccttttgtctcgtgcaaacttttggttttactggagttaatgactttatttgcttagttttcattgaatctcatgctttttttccgttctttttaatagttatgtaaaatgtctcttactgcaatcttccactga

SEQ ID NO: 38834 - DNA, 635 bp, Homo sapiens
ttttactgtatattttaactgctttttaaacaaaactgatatgaatgaagttattaaattggtaaaatagttttataagaagatattgaatatgacagaacatttggattaatatattgttattatttgcgaaatgaaaatgccagtatgattaaactggaaatgagaatccttttatcagaacatattatttggtaacataaggagcatttggagatgtaacatgattttaaaatggagactggtttgcgcaatgctgcatgaactagtgacctaaagccaggctctttattcttaagccaaattgctttctgaacactctgttgccctctagtgggtccacagttacctagaaaccagctcacaggagctacttcctgaacaggatgaagtattttgttctactttatttgaaaataatttttgctatgttttttgttacaactcacagactcaggcatggagaataaagccagagtttgcatatatttccctgtgcttttgtgcatcttctagtaagggctaaaggaaattccttgcatttataaaaactcctcttttaaatttatttttaaatttagacttcttcccgcctacctgtttgctggctgaaagattaatggctggtggtgatg

SEQ ID NO: 38835 - DNA, 738 bp, Homo sapiens
gatagagaaagtagatagaaatattcaaaatgtaaacattaaacaatgatcgggttaaatgcttatattttgtcttgctggttaggaattgaaaagtttaagctagagcttaagcttaggttaggaaaataggttctcttccattctgattagtccagtaatacttctggtggattaaagtaagattttgttaagccctgtcccctttctccctcaatttttgggcaaacagattgatagtgattgagtcattttgatagtgattggagacattccttcaccactgcaaacaggaagggtctgtgagtcattttgttatatatggagttgcttccaaaagcaagagacactaccatggtttgccaagggtggacttctgagatgactggtcacgtttgaggatttggggcttatttggaacaatcaaaggaagcaggagttgcctttatactgaggagaaatgttcaacagaagggtcaaggctgacagtaagatatcagtctggccacttgtcaccatagtttatgaatttatttctgttacagagtacttggtatcagctggaactttctccaaagatggacattctaaagaaatttccaaactttcatcaggttagatcattggagaacttattaactgagcctgccaagcaacacatttctgaactccattttaatatttaagctcgtattgagacaattataggcaccagttgaataaagaaagaaaacattt

SEQ ID NO: 38836 - DNA, 1154 bp, Homo sapiens
tatgtcagttgcatttttctactccacaatttctgcttaattcttttaaattatttcaatctctttgttaaatttatctgacaggtttttgaattccttctctgtgttatcttgaatttcattgagtttcctcaaaacagctattttgatatctgtctgaaaggtcataaatcttttaaaaggtctctccgggatttgtctttggtgccttacttgtttgttttgtgaggtcatattttcctggaccttctttatgctcgtggatgtttgtcattgtctgggcattgatggcttaggtatttattgtagtctttgcagtctgcttgtttgtacttgcccttcttcagaaggctttccaggtatttgaagggacttagatgttgtaatctaagtttttggtcactgcagccacatctgcattacctaaaagtaacactgtgacttttgcagacttttacaggtaccatcttggaggtcttggataagatctggaagagttctgtggattaccaggcagggactctttctcttcccttattttctcccaaacaattggagtctttctgtctctgctgagcttcctggagctggggggaggggtgacacaaggacccttgtggccatcattactgggattactgggactgcgctgggtcttgcccaagacctgtgataaccactgcctagctagtgcctatgtttgctcaaggccctgagactgcagtcatcaggtggcagccagccaggcttgtgtccttcccttcagggcagtgatttccccttggtcccaggtggatccagagaaccagtcaggagccagggcctggagtcagaaaccttagaaatctacctggggctctattctatggcagctgcactggtactgaagccacaagacaaagtcctttcctctcttccttctctttccaaaggtaaagtcgtctctccctgaggccaccactgcctgaggcctgtactacctggctactgctggtgttcattcaagacccaagggctcttcagtcagcttatggtaaatgctaccaggcctgggactctccctttagggcagagggctcccctctggtatggagccggtccagaaatgccatccaagtgccaaggcctggaatcagggaaccctagaatctact

SEQ ID NO: 38837 - DNA, 753 bp, Homo sapiens
tctgtttgccgtttggtatgtggaaaagccttcaagaaactggctttttgcaggagtgtttacatatcattcatgccaccaagagaagatgaccgacattttagatgcagaagaaagattaaatgcattcagtttaactagcggcactaaaaagggctgcatctttgtattgttgctgtttatcttctttccagcagtggaatattgagcttccccaggctgtgattcaggtattaatgccgattttaggtcgggcaagagtgtgttcagtctgcggcacttagatagcaaaggcaaactgctcacggctattagtcaggagtttctgtatgccagtgattgcatgcttgtgactcataatcagggtgattcacagcaaccgttagatgggcttgctgtggctgtgtttttcgtttggactgctgtcattgccaaaagtgtcagcctttctcctacagatctgaccgtgtgacacatgcacagtgccctttggttgtgctgaatggctcaccactaacatcatggctaagttttattatcttggaggaattgtctctcacagtgagtcccaattagacaaatgaattttgtgttgttttctttctgaagtgttactctgggattgttgacagaatttgtgccacagtgttctcttgggcagtctgaattccagattctctatcttggtttaactatgctctcacttgagaatcagcaaggagatgtcatgttatctgtttttctgtatacgtg

SEQ ID NO: 38838 - DNA, 729 bp, Homo sapiens
tatttttaattgatagaaaccaagccattcctgtgcctctcaaaaatctatctgtggaaaatattttaacttttaaccaaattatgtcttcccagtattagtgaccctctatgttaaaatgtttttcccttgaaagttagaactccaatgttgttagaagagtttgattctctttttgaagaatcatagaaacacagtacagttttgtacctgtggcctttggattttgattcacattgaatttgatgccaggagttacatggaaaagtcaataataatccgtggatcattgccttactctgacactgggtgaattagcctgctggggtaatgttctccagcttgtgtaatgggcctatctagtagcaagacagcagccatatgaaacacctgggtggtcttccagagtactttcacatggattagatttcagttatccaacgtgaggtcacaaaggcttagacagctgggctggtgccacatcatgaacagagtgcgacttcttcctaccggatgcataatgtaaaaggtgcctgaggttaaagctgatccttgggctccaggagcagatatgggtcaaatgaggtctcaaaccacagttggaaatgttgggaaagtctctatacaggaaagaatcagattttcctctggcactttcattaggcatgttctctgccagaaaagcctagtttctgagttttctggattgagctttatttgattaacact

SEQ ID NO: 38839 - DNA, 633 bp, Homo sapiens
tgtctccttgaagtactatgacacacacatgattacatgtaaagtacttagaatagtgtctaaacatgtaggaagtgtcaataaacaagaatttttaaatggtacacatatcaagttttgaaataacacattcaattggccagacaacccttctatcttagttattattggagctccttagcctcttcggttattccagagcccttggacattatatagcacacaaagccttgagggtggccttcacatcctgctccctctggttaccactgagatgcccagggtcacttcaggtggtaactgtcaagcttggtcatcaggcacttttagcaaattccattggtccaaaggtcaatatctatttccctctctcccacacacatacttttccttcaaaagtacattcctttcatccctgaccctgggggcacacctaatctctttaatgagcttatgctaaaatcaaagaccagaagaaagttgacttctagcagcttctgcctgcagctctgcaaaaaaccctgaagcaaagaaataccagggtccagttaagcgcttaaaataggagggtgagatacaaagagaatatatacaaattatttactcaataaattatactacaaccagatcgtt

SEQ ID NO: 38840 - DNA, 1394 bp, Homo sapiens
ggggcattctcctaaggggaggtttgttgaggtgctagctgcacatgacagcttctcatgatctttgctattggagagagccctgccaggaaggttttgcacagagctatcagaagaacacataggaaaatgtcactaccaggaacagaactcaaggtgccccagatgctcggcagcatctcttcagaccattgtttgctttattctgaataaaccttgcagctcatgttgagtaatcttcccgcactgcacactgctccaattctcatcccctgggaagaagtaaacagggggaaagcaagctactagttccacaccagagcagtgactgcttttatgacacacgtaagacagccttgtgacccactgacaagcctgtcctagctctgaggcgacacagtgacctctgctctaagaaggatattgcaaagcagacaacaggaaagggagaaacaccacttagaaactccagggagtccacagaggttctaacagtaagccctggggccatttgtcattgtctcttctctctgcctctccaaaaatccatctcctcgcagcctgcaaaacttccagaaagttctgtataactggcatcccctatctttgaccttaatcatatactttcgcctattgctatccacctgtttctcatacgtgtagacagcactatgtactacttattcaaatgtttagtaatgctgagcacattgtaggtcaccaataagtgcttactgaattgaatttagccagtgtgtgctagctacattttggtcatatggagactgccattaagaaacaccatggccatcaaaggaatgacatccagcaatttccaaatgggtttggcattgtgggaggggaagtaccttaaaatgttggccatcctcctcatagagcaaaaggtcaggactcggtgcataagcctaattgcttgggcagactctacatgccctttgaccccttagtgacctgagcaactaaatacacaatggagcgagagggtgtggggaggggatgcctctatgagtgtgacttttggaactagggcattataagtgagttggattgaactggacaggagtagagtggagtagattcaaccttgtttctttaaagcagcatctgcttccacagtccaaggcaggccatcatttactaagaagggattatagctctagatgttcaatgattgagaaaaatcgagtattgtcccttcatatttgcaaaagagagaaaaaagaaaaataacctaacttttcaaggtgtctgatttagtgtaagataatgtgagtttaatcgtccaatggaattgcaaactgatactaattacaagtatgtctcagtgaatcacagatacaggttggaagcaaagtctaatgattgtgtccttt

SEQ ID NO: 38841 - DNA, 1776 bp, Homo sapiens
ccgcctgctctgctctgctctgctcagagcagagggaaggtttgcaaatgccttcccggtgtgcagggaaggaagagggaatagtgacatttgggacagaaatgtgggaactcgatttcaactccctggtcactgtcaacagcaatgcagcataccaaagaccagggaattggggaagtcagagaaaaacaagtttaatgagtgctcaaggtggcgggggagggctgtcctatgtctttgcaaaacactgtttacaatgtggacccagacggggctgaggcaaggcctaggcctctgaaagaatgccttcctttttactgccagtgggtgagaaagactaaggaactcttttccagcctcccctagccaggcagcagcctgttcttggtctcttcccatccaacaggtcatcatgaggtcgcctatgagaaagtggtcagtcacactgttgctggggcattgcaagcctcctcctggcaaacgcagcctggttacacaggccacatgcacagcacatcccaaatctttatccaattccacatgccataaatatggaacctatgattctcatacagggtgggcccgccttatgtatatttatggcataaccacaaggcagagagctcatctgcctgatggaatccatatccaacccacgtgctcctttagattatacaaattgctttgcatacatttcttcagaaaccacaagcagaaattactgcttttggtttccccagctatattaataacaccctagatgcagacatggcattgttaatacaacagtagaaggttcatgtatgtttacataattataggcacaattatgtacatacataccaagaagggcgcatggagagcaatgggaagagctcagaggcacaaggtcttggtctagttcctgccctcctgagatgctgattccatgattctgcactggggataggctgtgcctcgggaatggaaccacagctggtgacaggacacgggggagagagactactgcccttatttgtctaggcaaaagcccttatcttcagttccctctcattcggtaaacgtggggatctcccttgttgacacagctctagttagtcacagtgtttctgggctattctgatgcatttggaagaaatttgggctaaaagagaaagtctgtggggtgccaaatgcacgctattggccagatcgaggatggatgggtgaagatagggatgaggtaagacttgggtccaagaattttcagaattaccccaccaggagtggaaggaatgcactgagttcatcacattaatgtaaggatgacctccaagggactcagaaaatcctcaggcaccagcttattcactagagtatttcacagagtttcacaactgtggaattgaagctcttagagattaagtgccttgctgcagggactaggaaactggagcctgcatggacggcgcctggtcaccagacttggatgtccagactggcgctctccacaatccgccctaggccttactcttcatcttgagggaaattggcttcctacatgttcagtccaaggactgagaggtacacattttcctggaaagcctcctcttcagtgaagttctgcatgcaggatgagcctgtacatggcttaacccactaggctcattattgtggagctgggcttcaccacagaatcatgaggatggagagttgaaaggagttgccatttgtttgatttggccacatcccttcaaaacaaataaacactccacttcaaaaatcctctatcccata

SEQ ID NO: 38842 - DNA, 1642 bp, Homo sapiens
ggctgtgcacagaggccagtgacaaggagcacacagaggggatgtggaagggcgctgtgattctgcttgggctgtggaatcatgttccttgccccaaccccaactaatgtagatgagcactggagtgaagccctcacctggtagattgtcctgctctctgatgtcaccttgtccctgctccggtttgcagagcctccacctgaagaggcaggcaggtggcagaggtctctggaacctcactccctgttccctcaatctctccccacctgggagttaaaggcacctccttaagaaaacccaaacatctgtgttaggaggtttccaggggtggagggcccaccccacccagctagaatgtcctagaatgtccgagtttctccttccctcttcctaggacattgactgttccccccaagcccgctcattgctctgatcctgtgctcctcccccgcctgctcttctccagccccacccctgagctgccctcctccccgctcctccctgatgcgttcctgtctcaaatcctgaaaccctaatcctgttagtatgctgtgttccaggcctcagcgtctcgatgggggtaacataatcccgcagtaaatctagcgggccccgcaggcccacacagatggggatgcgcacatccccgccccccagaacgcagccgcccctgtgcctctgtctcctccttcatgtaggaaagctgcctgatgacaaaaacagcccgaaagtaaaggaggatgagagcagaggtcatcagagtcctaaatgtgcatttggttgttagacagcttctttgcctaccggcatccctaccttctcttaatctctctctgtgtttatatatatatatatatacatatatctatgtaaagtatacacgtgcacacacacacacacacatgcctctaactctatatctggctaagttcccacatccactagaatgaaacaagctttaaaacaagtttttaaattgtctttaaaggggagttttaaaggagaaagatcaggaccatgattcacaaacaacaaaaaaagcccattgccttcatatcatttcccaccgcccccccccaccccgcatcgcaacagttccctccccctacttgactgttttgtgcaacaaattaattaaacaggatggcattcattgattagcaatttatttttacgtgtagacccaatggctggtttcagagcagatgcaagggaagggggtgggagagggaggacacacagatctgcagtcagggtgagcggatgagtcagcacatttgttcctgacactagttttaaaaacatgcttctggcttcccccagcctctgtcctgcattcctgccacttttctcttctgcctgctttgttttcccccttcttgagtgtctgtgccaagtacattgaaagggagaactttggaggcaatgaaacatttattagtggagagaaatatttattttaaaaaagaagaggaacatctcgtgcacaatgtctaccccagggctccagcactgcgctgtcttggaaatatttccctgctttctttgcagtccctggagctggctgacttcagatatttacagcaaaatagaagtaaacagtagttcacaccataggtaatgaagagatgggagtgtgcaa

SEQ ID NO: 38843 - DNA, 1422 bp, Homo sapiens
tgtttgtttgtttgtttttgagatggagtctctgtcacccaggctggagtgcagtggcctgttctcggctcactgcaacctccgcctccagggttcaagcgattctccagcctcagcctcctgagtggctgggattacaggtgcccgccaccacacctagctaatttttgtatttctggtagagatggggtttcaccgtattggtcaggctggtctcgaactcctgacctcaagtgatccacttgccttggcctctcaaagtgctgggattataggcatgaaccaccgcgcccggcctggactcttttttaatcgttacaacatctgtgcaaagtagatctttttgtcactcccattttagagatgataaactgacacttgatatcatgcccagggtcacacagttcacctgtgatagagccgattcagaaaccggaagtctgactccaaagtccagatgcctaacccctactgaacactgcctttttataaagttcaacactctttatacactctttcagataaagtttccttgaaattggccagacatctaaaggggatgtggtttttggaggccaagctatagaaactagaggatgacttccaaaaataacgatgtttttctgaatgtcgctgcattcctttgtattctcctagttttgactgcttagatctttccggcctctcagactgaggcaagggagaagcaagagaaactcaccccgagccagaagctcaggccagtacagcttactcccctgccaccagagtgaaggtcagccttcaacacagacacaaggagccccagaaggggaggagacgtcatacctctgtccctccccagatcagtctcctggcaggccaggctctctgattcttatctctagttaccccttgtttttctcaaaagaacaggtccctaaaaaaggagggagtttgcatgtctcggggccacctttgctaagcaaatgtctccattctgaatacagaggcaagagttgggttggaggttttgcgatgctgaggtaaactcccagctctcaactccagaggcttagaaaggctcagggcttggtaactggaaccttgcatcgatggagcagaagttggaccgcaggcttccccatggagagctgagcctggtttttcttgggaaagaagttgatctttgccattgtgggagacagccctatccgagacagtgcttctggttcagaattgtggacgcagggcatcctgaaaactggagcggtcctgctgaatttctgggggctaatcagctgcaggccctggccacccactcctgtccttcccccggatgagtgtctccaagtgtactctaggctggtcctccaaagcagccccctgctccccgcatcatcagttttatgtactggggctccatgtgaggtttcttttgac

SEQ ID NO: 38844 - DNA, 1236 bp, Homo sapiens
acagcaaagggaagtatgaaaggttatgtgcgtagtatttaatagcagaaaggtgggaagccgaccgtgaaaaagctattcagcgtatttagcaatttcctccagctcctggctttattaaatggtatcctgaagggtgcctgacaaaggcgcctaatcacatacagtagtgcaaaggagcatgtatagaaatgagagggacaaggcactggcatcctgttggaggacagctctgggatgaagacaccaccccaaaacacatggacttgagcaccagtttccagaacccctttcaccccacccagggcctgactcatagctccattcactccctcaatagttgctgaatgaatgacgggcatgagcaaataagcaaatgaataggtgaatgaatcacctagagctgaggtcaaaaccccctgcctgcagccaggtttggcctagccagggttcattgtgtgctacttagtataacatttttaataagttgccaacatgtagagtctggagattttacttagggatttttgctttcttgttgggggaaggaaagggggaaagatttggaagacctggcctggccacactgggccacctcccctccaggccccagtctgctggagccagtcatggaggccacctttaaaccaggcatgtaagatcccagctttcaccacctcctctctctccaaccttcccctgccctcacaaccacgtctgctttcctcacttacagtaggtgtttggatccaggaaacacttgaacttgccacaccctgacctaaagacatagccccaaatcactttcaccatgtagggtctgagcctctttaaatccatattcccgtccatccagttttgtgcaaacatgagccagagtgtgctttggtccttccttggagtcagcgtcgcctgtagccccctccattattgtctcgtggccttttgtgctaaactcggggcctctgctgtggagtaaagaatgtgggtttgtgtccctacctctgtcactgctggttctgcaacccaggaccattctcattctactatggtgatgcccctgacttcgttgacagcacacagacatgacttcagagttccgtgcacatgtgtgcatcttctttcccttctctagagatgtttggcatcttcctcctgctgggttgcaacacaggctgctacagcattctcttatcttcctttgcccttacacagactccaagcccacggtagaga

SEQ ID NO: 38845 - DNA, 689 bp, Homo sapiens
tgtaaagaaggtttgtggggtctgtgtaggtgtgggtattctagtgttaatgtgtgtgtgcatgagtgtgtttgtggtttctgtgcatgggtgtgtgtgtgtgtctgtgtggtatgtacctcagcagaggcgcttggaataaaaggatatagccggggtcctctgcaggctggggaggttggctggctcttattcagtgtctgtcctcaggttcattctaatgattctggcctcctcccttgactcttctaagcatattttctctgggagtgtctgagggcagccctacccaggccacaaggccaccaattactgagtcacagctccaggggagcttaagtgacctccctttgaccctggcctggacctctgtttcttcacccgttcaccaccgcctcctcctcgtccagtcctggccttcacccgaaagcccctatggttgacctttgctactggttgggaattctagtctttgtcctccttccagttgattcattataccctgtggtttgggagggcttttcagagcaagctcacaaagtgggcagaattccaacctttggctgaatggatggggacagagagaaaattacggccataaggaactgctaaatctaatgttgttcctcccttaagatattgaaagggaaagtaattattttcctattccagaggaatcccgaagtttg

SEQ ID NO: 38846 - DNA, 851 bp, Homo sapiens
caactgcgtgagacagaagggtcaacagttcttccttaatgggatttctgctccttcaagatgccattcacatgcagaggcaccggccaaagggacctacttttaaagtcaaatgcacggccaggcccaagatggatggctctgcctgggaaggggggctctggacaggtgccttcctaaggagcccaaaacactcagtgtcttggcctcactcctgtgccccacctctcgccactgagaggcccggtgagttcctgtagcaaatgtcagcctgaagtggatgagccaaccccagcgcactcaccagccaatgcgatgttaaatattaaacctccctgtagccggcctgggctgaaagccgccgtttcattatgcagctttctctgggcttaagaagaagagagctcgcctctcccaaaagctcaccgtggagactcaccctcagccttctgggcatcagggaaaccttcaaaacggttcaatttgtccaagcccatctatctttaatgtcacagtctacattttctcctctcctcctttttcaaagcagccaaaaaggaaaatgtcactgcatttggggccaattcaaaagccaggcttagacaaatgttctatttcgttctccccagccccggtgtttttatctcctgcggtgttttcagggactgcacctcaccccactccactcctgtgttcacctggtgtctttctggcccgctttattgtgtgtccttcgctcaccttcttcacttctcaaagtcctctttgtgactgagcctctgctagagaacatgatgttgattgtgtcgtttttgttttgttttgtgtttttgagacggagtcttcctctg

SEQ ID NO: 38847 - DNA, 1302 bp, Homo sapiens
aattaaaataacttgatgcagcatttttcatcttgacaaatagcttgtcccccatctttacacaaacaaattagaaaaagcatatgaggatatatggctctagacagagtaaaagaacaggagctataccatgcacttagtatatgccaccagttgtacagtgagcctgtgactgcagctatttcaaatgtaattacctcagtcaccccccactgggcagggactcttaaggtctgctcagcttctagtgcatggctggtgctcaataaatgacaaatgcaattataataattaataattcatatattaataatgcaatccctttcccgcgctcagtaattgccgccaacaagccatgcacacacaggaactggcactgccaggcgcccgggaatttctccacacttccataaacctgtgtccaaaggtcaccttgaagaggcaatcacagccgcctgttagtctaacaaagatggctggtttaaatgcttcatttttttcctatcgccttcccgtttcaaatatttacagctctcttcgagacccagccttgagaaataaatgccctgttgacacagttgatagcagttgatagctgtggaagatcctccttgtactcccaggaggcactgcagtcacctcctttatcccaaaactgcagaaagttcaaggaattgaaaggtacacccagacttgagagccttgaggtgtagacagagccacttatctggggtgaattggtgaactcgatttggcacatcctcatcccacagtgaacagatcgttcattttggagacagtcacaaaaatcaaaagctcaagcaggttattaataccctagcaagtcttcccagaagagggctaatgctgatttatttatctcatctgtgctttcttttttcctggcattctttgatttttcacaacgcaggtaattctactctgatcagaactcactcaagttgcccaatgaatttcaattgccagttttagttttccaactggcctctcctccccggacatccatgcgatttccaaactgagattaaacctcagtgtttctgactccccacaaccccatcccccaaatccatctgctcttcccccagtccttcccgttttctgtagtaataaggccatggtcagcaggaaggaaagaggctgatgtcatcagacaatcctctaatccttctggagcccagaaatgactgaccttttgttatgcataaaatccactcctacatcctaacttagagggaccggaaggcaaaggagtcctttaaactgattgtcttgcttctt

SEQ ID NO: 38848 - DNA, 1607 bp, Homo sapiens
cccagggggcggagcctgcagtgagccgagatcgcgccactgcactccagcctgggtgacagagcgagactccgtctcaaaaagaaaagaaaagaaaagaaaagtttataaagaagacataaagatgtggtttctgcaaaggaaaagtaattttgtccagtttagaggttatttaaagtttgtttcaaaatgaaggtataaaggaataaaatatacacagcaacacatctattacagtttacttcaaagagagatacggaatgtgggaggacatctcattagctggaaaattctctgggaaaatattttcttgctctgaaagaattttgaaaaagggcatttcagttatgattgaatcacattgtaggtcaaaaacagttaaacatccacaatttcatatgattcaatctgatccaagaggactgagaaaagtgtcattacttttctacttgtttataataaaaattctgttataaattgtgcacttaaaatgagtgaattttatggcatgtaaactatagctcaatagtgctattaaacattctacttgagtcatttattcattcccgttttcaaaacacaaattcctaattcagaggtgggatatctcactgaggtttcatgtggctaaatgacttgtttattcatccagagcagagcagaaaaccagaccacaaaggaaaagcccagacctttccctacttggctcagtcccctagttcacgagacttgggtataaaatggcccaatgtattcccaacagctgcaattcttcaagacaggaggataatcaaactaagtccacatattttttcagaaaaagaaccagaaactaaagtccaccctctcaaccacttctttctccaaggtaaagttaaacattaactggagtgcacaaacaaggactttgtcttgttctctgtacttcctcctctcctgtgacacaccctgtttctccccaaccccatctcccaacccaatgtgttcaatgttatcaaacaccagtctctctctggaagttcaacttgacccaaacagtccatactgggagacaggaaaacaataacagtttcagcagcaatatattgacagccttgtacgtgctgcttagcatgccacagtgcagtagccattctagaatgcattcctggtagcagatggatatgctaaacctacaggaaggcctctatggtggcagagggagaggcacttctcatacttgcattgcacctgaaaccctgggcatctggttaaaatgcagattttgatcctttaggtctggggtgggcactgacacgctgcatctctaacaagctgtcaggaaatgctgctgctattgctgctgccgctgctggtggtacagggaccacactttaaagtagcaagatattaaggcatcactgttcaacagaaacataaagcaaggcaaaaatgcaagcccctgtacataattttaactattctggtagctgcactaaaaagttaagaaacaggtaaaattcattttaataatatattatttaacttaataacttaaaatgttatcattgcaatatgaaaccaatagaaaattttatttatgaggtgttttacattctttttttcat

SEQ ID NO: 38849 - DNA, 625 bp, Homo sapiens
gtagagaaagcagcaggaaacgctctgggagctcactgggtccccaagcaggtcattcctgcctggcatcacagagatctttcgggagggcagccagaggcatggggaaaatgccacagggagaaggaaatctccagctgaactttgtaacaatttgaacctggcgagaagcctcctggccagaatgtggggaaggccacaaatcgtctgtgcagactccacaggtggggaaagaaccaaagcccctctcttttgcagctgggaggcaggtagcctcggacaagttctcaagccctgctcacccactgcctggaaacagactggggctattaggtggggcatggtgggagtgaaaccagcccctcagattgtgtgggagctgggtgaggcctatgactgccggatttcccccacttctctgacaacctgtgtgattcagcagaggcagccataatcctcctaaatacacaactccattgatctgggagcctttgcctagacacattgtcattaggttatccaaagttaagacgaaggaaagaatcttaagagctgtgagacagaagcaccagataacctataaagaaaacctgtgagattaacagcagatttctcaagagaaacc

SEQ ID NO: 38850 - DNA, 2679 bp, Homo sapiens
aaagtagttttgctaggttccgagggctcttccacagacccttctgagttgtagcaataacaagtttaggtttccttaaaatctccattactctatttctaggtcgaatacaagaatgtcacataaaactaaacagtgattatcagaataaatgaactactgatccttaaactgtagaccttgtttcgggagctgccctgcccacttcctctccctcctcccaatcccggaggcttccaagccatctgacaaccacgtctcccccttgggatctgttccggtgttggttttaccggacagtgaccaaaaaggaggggaaactcctacatctggggactgctccagaaaccctgcctgatcctgcccctctcactgacagtctcctcgctgctccctacatcttcctctccgccggagctgtccagaagggggattttggacccaaaggaatcgggatgaaagggggtgggtactcaagctgaaaataacacccccagttggtggggtaagggctaaaaaaggcaatagggaaagattgtccggcagaaacaccacctgagtttacctcctccttcccaccccaaaaacccagtcactaactaataaagctaagaaaagccccttgcaaacttttccaaaccggaagagaaggccctctccccaacctggggggctctagggggaaggggctggagttagcagccccgaatgggctcgcggggagttgggtggggcgcgggcgaggggtgcaggggcggagtaccttcttcaatggacaggaactggcaaagagtttcaaaatagccgagtgcgctcccccacgccctggggggtcccgggcgctaggaccagggctccccggagagacagcggcccccagttcgggcctaaaaggaaactttctgggccgcggctgcacctgactcctcaccgcccctccacccgaccccacgcccgccaggccgcccgccccgccccgccccggcctggccgtccggagcgcggaggagggggataaataaattcaactcttaccggaatctgggggccgtctgcgagagacccgggggaaggggagccgggcgcccattccccactccccactcctaggccctgacgcccctgtcccggcagcccgggcctgccgccccgcgggaaagcctccgggccggcgcgggattcggcccagcagcgccgccgtcccacccggagaccccgggggactcgagggggcgcgcggaggcccggggtgcgggggcagggcgcggctgccgtggggcctaccggcccgaggcctaccggcgcccccccctcccgccgcacacccccacctggcccgcgcaggccgctccgctcgccccactccggctccggctggacccctgcccgcccgccgtcgccgcccgcgggcgccccggaggccctcaggcccccggcctccaccacccgggcgccggccccactcaccctttcattctccgcccggggcctggcgtgggccggcgaatccccggcctcacgtaagcgcgctcgccgcccgcccagcctgcgcggcccagcccgccgccctacgggagcccggggatgtgggccgggcctggggccgcctctgcttacctttcagctgcttttttttttctccttcccccctgttccctcggctgggctgacagatcagagtgagaggcgctggcaatggactaggaagctcggctgccgctgctactgctcccccctgggctccggcgagagcctttccctgtcaagcaagaggggtgaggatcatatttttattttggaaactaaaaagtgctcccagggtcggtgattattaaggggaaatccctgaatatactctccagccaagaaggcagggctgccggggctgtacaagaagaggcagcagcctcctacagcaccactacaggcactgcgaggacataacaccagagagctgctcctctgccctccgaaacgacaactttcctaccatcttggaggcagagcaaaggggggccagggggaaaagtgcacccgctcccgataaagtacaaatttttacttctcatctctggaaaaaagtccacaccggccgtctacacccgcgcctgggggagaaagcagggaagaaacggggggtgcatgagaaacgttttcatttgctccagggggaaaaatgtttctgcatcttctgatggaaagaaatctttacaagacacaggttttccggtggttattgttttttattttctgtttttaatttttttcatgttagtgacagtgatattttaatatttttttaagccagtaataatttttctccattacagggctaagttctgtggctggtggtcagtttgtaaatttatacttaaagagacttaatagtaacttcatttatttgtctggttatgttattgtatatataaatatttatgttttcatatattgcatataaaaatttgtgttacatgttactctcagaacagattgctgtaagacaattgtaaaaaaacatgtctttcgtctgtttctcaaagcaatgtaaataaaacctatggactgtccagaaaggcatgatacagtgtgtcattttccacagtgcagataaaggcagctatcactggggatttaaaaacggcccctgtttctggaaattctgttatgctgcccatacag

SEQ ID NO: 38851 - DNA, 1046 bp, Homo sapiens
gcacttggccacaatatgttgtttctaaaaattataaagcagtatattgtaaaatttttcaaatgtttgatcaaggtataaaattcatttccttatactataccacatgttaattgatccaggggtaatcacaattaagtttttattgtatctgctgagatactttccatacacacgtaagcatatacatatatacacacacacacattattgtacacttaatttatgtccttaatacattctgaagcactttccatatcagcacgttgagatctagctcattggtttaaacatctgcatgtttcattttatgattatacaaaaaaatttttcagcagttccctattgatggatatttacatatttttgttttgtctgacatgacaaacattgcaaatgtacatcctttgtctcatgatgaatcatgccttgagtctcactcatatctgatttagatgagactttggactttgactttaaagttgatgctggaacaagttaagactttttaggggctattgggatggaatgaatttattttgcatgtgaggacatgaatctggggagcccaaggtgtggaatgctatgttttgaatgtgttgtctccacaattcatgtgttggaaacttaatcccaatgcaacagggttgggaggcggagccttctgggagatgattaggtcacaaggactctggcctcatatttgattgatgccattataaaaagggtttgcgggagcatgttagctctcccttgcccttccatcttctgccatgggaggacagcaagaaggcccttcccagatgctggcacctgatcatggtcttcctggcctccagaattgtaagaagtaaattttttttttttttaacgaagaagtgagtattttattattttgctgtacagctgttgcttcactatataaaaacagcaccagcaaatgcagtgtattgcaaaattaagatagtgttgttcttcatctgacactgtacaagcaacaaaaacttcttcactcccagttatttccaatggaaagatcattaagt

SEQ ID NO: 38852 - DNA, 2785 bp, Homo sapiens
cgcccagctaattttttgtatttttagtagagacagggtttcaccgtgttagccaggatggtctcgatctcctggcctcgtgatccgcccgcctcggcctcccaaagtggtgggattacaggagtgagccaccgcctccggccttcaatagcttaacaggtcaccaagcttccacactattcccacacagcctctcccctcttgccaccggctgtgacctcagactgaaatgctcttccctggcccctccttatccttcaaatcttggcttaaaagccttttctcagtttcattgaccaggctatctaacatttacgattcccccagcatatcatccattttattcttctttacggactcatttctggctcgtagtaaatgttcaataacggttaagtgaactgaatctctaatttctggtcgttaatttgtagagaccactttcccggatttaaaaagtgcaggtgctctggcagccttaagtcggtgaaaacaagaatattccgcaaaacaaaaataacttgtttattcatcaaaaacagttaacgttacacttctataccgtcaattcgtgtgtgaacagagttgtgtctgatccaagaccttacagttcaagcactggatcccaataacctgtaaacaacgttttgttatttgcaatgcaatcctgggctaacttttcaaaagtcgtttttctcaatttcccgttagttaaaggaataaaaaaatgctgtccaacgtggtcaatggaccaaacaaacaaggacaacaaacagaagcgtgagccattgctaacacaacagcgaccaaacaatcatgcactgtatcaggcgtgtaaaaatctggggggaaaggcttagtcttaaggcctaagtcatcggacactggtcctctcccggggaataaaacggcctcctcctctgagagggaaatgtcctgaattttccctgcagagggaaggtcacctgcaagcctacattcgtgacagcgttcccgaggaccccctgatcctcatcttcttttctgcttcatcagaccagagaccgtggctaaaagccccccatctgccggctctcaggggcttccgaggcggcggggcgggaggcggcgcccagtcaaggacaacagaagactacgtcgcgtgggccaaaggaaacagtcccgtcaataaataagcctctggccgacgcacctcacccttcccatccatacaagacctcaccttctccccggagccgcggaggctgttctgctaaactgtctggaccacgacgaccccctaggaggccgggtcgcttattcaatatggcggcctcggctaactctgtcagccgggcctggagaacggaaagcccggagggactagaatccttgcattcgacaagtttgtcggcaatttccgtcagccgaccagagggcggagctgaggtcggcccagcccggaggcgggaaggacaacttggacccgcagttccgccggaagtggccccagcctcgaggccgggcgtcttcggtcatctccggcgcttctagggctggttcccgtcatcttcgggagccgtggaggtacgaacttaagacatgcctattttattaatttacttccaaacgcaacgaaaggtccatggacaatttgtgggccatttaattcagggcccccaattcgtacgtggagaagtgggaatgcaaaagtactttgacctttaaccttcggtccggcgcggtggagggaaacgcctccgtctctatataaggaattttccggtctcttcgggtcctttttcctctcttcagcgtggggcgcccacaatttgcgcgctctctttctgctgctccccagctctcggatacagccgacaccatgggtttcggagacctgaaaagccctgccggcctccaggtgctcaacgattacctggcggacaagagctacatcgaggggtgagcggacgggctgagtcggggtggcggggaggtttctccgcccggggccggggccacgtggcgcagcgtgtcggctgccgcgggagggagggaggccgggcccggggccctttcgagagggaggggaaagcgccccgttgccgtctcccaaggccctcgtgtggggcgagcccggcctccggggagcggttcacgagcaaggaaaggttaaaatgtgctttatttacacttaattcagccaggtgtttccgcatcgctgcccagttaatacatgttaagctgtagatagagcaacgccagacattgcagtatttgaggtctacttagtggcagacatttctcaggatagcgcggtgacccaaacatatggtttgatttgaaggagctaataagaaaagaaaagcattaaagcaaccctgctggggttagtgcccactaattaatgtgatgcatacggtatttattatttattcgctggcgtttgtttttcaaaggtgtgtgtgaatgtttctgtgtccttggcaggtatgtgccatcacaagcagatgtggcagtatttgaagccgtgtccagcccaccgcctgccgacttgtgtcatgccctacgttggtataatcacatcaagtcttacgaaaaggaaaaggccaggtaaaatcatctttgtatagagctgaagaataagactgctctcgaagtttatcaggatgttcacatgacaaaactggacccaggctactttagttttgttgggatattgtaagctaaatttttctgtaaccttagaaggccaagagactgaagccctccattttttcacagaacaggtagaacatggacagca

SEQ ID NO: 38853 - DNA, 1483 bp, Homo sapiens
acagagcaagcgctcattgaacagcagcttttgtgagatgcacctcactatgaaataggcatggaaacggaaacgactagctctcttagccccgttttcttttctacattcatacgttgctttgaattggcaagcagtttttatttggaccctcaaacgctaaaaccttggtctctacttcgcgtcccaactgtgcttatgagtctagtcatttttgttggaacgcgatagatttcccaagctccggagtggggccctgaccagggaggaagtgtccgctttaagagcttctggaggggaggaaggggctcctccgcccgggtgggagagtgagtgagtgggtgggcgggcagggggcggtcccgccgctcctgcgtcagaaggggtctggttttcgcaccttccctgacgtcaaacctccatcagggttgcaacgccacgttgccttggatgcctgcgtgagtggagtcgcgactcggggcccgcgtcctgagagacgcgctcccgcgccgcttctcgcctccggaccgcaggggccgaagtcgcctatttctggctccgcgggcagcggggccgtggcgctcggacggtctgggattcgggcgccgccgcggaaccggaataagaagggagagcgcccggctcggtcctcggtctccaccgcggcccggaaggaatccgggcagcctccgcggaggtgagtgccgcggcgggggcggggcgcggccggggcgacgcccgcgggcggggcctgctcgccgggcgcccggggcgccttcttcccgagggacgccaggaccgctcgctgggctcccgcggccgcctcgcaggtcctcggcttccccccaccccgcgtccctttctgcccctgctgcgtgagaggtgtcggcggctccgggccgggatcgaggtggcggggcgagggaaggaggtggggcgcaggctgcattgcgcttctgtccggggccctgggtcagaggggccggcggacgaggcctcgggtccgggcttggggagggggcggtctgcggggtcggattgagggccgggaacccgcggagtcttgcccctgggcacctgtggggccgagatcccgagccacctgtccacacacccccttcccccagtgccctgcgttgggtccagctggccccagacctaggcctttcccagcctcgggcgattatagtttatttgaaaacgtttgatttttgtgttaatgattcttttactaccgccgtgcaacagttgtgtaaatgtggtcgtgttacgccatcgtttttacttgctcctaagaagggccttaccagctcctgcgattatctcacgcgatgattcttggtagctcgtgaaaaaaatgcataacaagatactggttctcaagggaccaaaaccccacccccacctaaaggaaatagcttgtttttgtttttcttttttacagcaatatgctacgtgtggggagggggagggacgatggagg

SEQ ID NO: 38854 - DNA, 1950 bp, Homo sapiens
accatggattgttgtaataaaagccttctcagttgagtccttgctgtcaaccagcactttcaatcattctctccgttgctgccaagacaggcttcctaaaatgcaaactcattaagactactctcctgcttaaaatttttctataattcctcattgctttcaggatacagttcaaacacctttgcttgacctacatgaaatgcaaggacctggctcctgctcctgttgtagccccaggtcctgtcacgccccacatatccagatcttctgttaggccaggaagcttcctgcctctctgcttttatttggaatagcctcctcagctcacaccttcacaactcagctcctgtaataccttccccagccagttccttgtgtccacctctccctcatcccccaaacccagattaggagtctacgctcccagaggcctgtgcaggtctccttcatcgcgttaatcacaccgtatcaaaagtacatgttctgtgccccatgagactgaaagctcctctaaggcagggatatgtttccctccattgcatccccagtgtcccacaatgcttggcgcaccgtcacggtccagtaaaaaactttgaataaatctatagcaaagcatggagcggtccgtatagaggctgccaagccgagcggccatgggaggtgagctgttgtcggcgttttgagcaatctgcgggcggacgcggggatcactcacccgcgatgacgaatttggccatggtcgagagagactcagaggcagggaccgcggcttcgcggtttcctggcaaccacgcagccaagggcaaggcgcaggcgcactacaaagtctggcgcccagcagaggttaggtgtttaaagttaggacctgaatgggttacgttgcgatacacgatcaaacatcgcccttataagctctgtggtatccccgagccccactcctgtatgcagggaaattagtcattctccttggtaaactttcttcaagtaagtccttcagctacagccgcgaacatatgctttttgacctttgagggaatccgtaagatctcgtgagaagcgcagcttctcggggaagctgtcatggctgctcctgtacgtagtcacggtcttgtgctctaaggtgagtggaggacgagcttgggcttagcggcagcccgtatcacatcctagactttttacttcgaggagaagagtctcacgagttgtcctggaagtaagtttaaaggaggtgggttaatgctgggcggcccagctgcggaaggacaggctcttgaagttggttctggggtctggtgaggctggctggttgtataagatcttcctcttaagcgcaggccacgtgcagacatcgctttcgttttctgcttcttccactgagccgttctacctgcccaggtccctattcttgatggtctgggttcggccgttgctaaatcgtcatgttgaaaatgatctatcagccgggcgcggtgactcacgccttgggaggccgaggcgggtggattacctgaggtcaggagttcaggaccagcctggccaacatggtgaaactccgtctttacaaaaaatacaaaaattagccgggcgtggtggcatacgcctgtaatcccagctacttgggaggctgagacaggagaattgcttgaacctgggaggtggaggttgcagtgagccaagatcgcgccactgcactctagcctgggggacatagcaagactttgtctcaaaaaaaaaaaaaaaaaaaaaaaaaacagagaagagaaaagaaaatgatctatcaatgctaatcccctaattttcaccgaggacatttccataacaatgccaacaaaagtctctcctacagagaaagctttatggaacgcttttgcaccagaaaaatctcattaatacaatgactacttccaaagtgacctggcttctttgaaactggacacattgtggtagatt

SEQ ID NO: 38855 - DNA, 1198 bp, Homo sapiens
agtgtgctgaatctgagttaccagcaggctacctagatgtagatgtccgatgggaagttggaaaggtggcctaaaactctggagatgaatctggacaaaacaccaaatggttggattgttggatttattttaaacaccagatatctgtctctgcatttcccacctacagattcaagttggacagaaggcagcaaatgcattgaaagcaaagtatggaaccaattatagagttggatcgagtgcagatattttatgtaagtatctttttttgcctcttcaatagtatctaaggcacaaaagaagtcagtggactttggatggtgagataggcgggagaggaacagaagagttcctgggatcaacagggagttgtacaaatcaaaatgaccaaggataaaagggagtctgtacaaatccggaattatactctctagggataaggtatgaactaaaagaaaaagaattaatgcgttggctcagaccagaacttctcctggcttcagttaaaaagagctggcaagctagaaggcacaagagttaacaggaaggacattgtccactgacctttggtcagtcaattcagttcccagaggacccatcaggctaagaaagccctggagaaaaaaatctaaagacaagaatttagttgaaaggagagcgctctgtttctcccaaccccaatctccaccctctatgagcccccctctaaatacctgtataatatttttcttatgggtcattttgtttctgttcctttctttaaatgactcagttcactcttgccaggcaatattaggttgccaagtcagtcagtgactcagctaagaaactttagccaaacctttctatgtgccagacacagtgccaggtatgatgggggacagagatactgaataagacgtggttcccaccctgcaggggcttacaaccaagaagaaagagaagacagctatttctgagaccctgatctaaaagagcttctttattttactaagtgaacctttagttcctgaaatggctatagaaatccattcttccaaagtatgacttctacctctgccttcatgttttcacctgtagatgcctcatcagggtcttcaagagattgggcccgagacattgggattcccttctcatatacgtttgagctgagggacagtggaacatatgggtttgttctgccagaagctcagatcca

SEQ ID NO: 38856 - DNA, 745 bp, Homo sapiens
gtcacaaagaacaaagaaagactgagaagttgtcacagactggagaagaataaggagatatggcaactaaatgcaatggatcctggcctgggtcctgaaccagtaaaaggactggtggaaaaaaataatgtaattcaaaggaagtgtttagattagttaatggtattatatcaatgataatttcctggttcttataattgaactatggttgcgtaacattaggggaagctggacaaacaatatttggtaactctatgtatggtttttgcaacatttctgtaagtctaaactaacttcaaaaaacagggagagacgaagaccatcagcaggctaaaagtgtccctaaactgtaaatttggatagagagttcaaatgtttttccactagaaccagagattttctctgttcaaatgatactcttgccagcaaactccaaatcggagtcagcgaatgtcagtttaatgacacaaattatgcctgtctggcactcacctcggaggtacaaggcttccctcagcctgacctaaccatacaacttaaggcttgagccactggatcaacccccaacccctaaaaaattcattacagtcagcaatgggaagaaaatattcccgagtgcaaagtgattttcctctatattgatgagtcacagatgagctttgtgaagattctcttgatatctcaactttgaaatgcatggcttctcctagcttcctaataaatatcacctgaaattcatattgaa

SEQ ID NO: 38857 - DNA, 1327 bp, Homo sapiens
attacacttccacggacaaaatgaaattcacatcttaaagagtcaataaaaataatcctacccatactactgggaagtgcaaagggctggatctgcactgaaagtgagatttaagaatgagaaaatgcaggagagacactccaatgggaaaaacccatcacatcccatgacaatggcaaccagtcggtccctgctccaaaaggagaggactctaagcagttcgtcaagagcccaaggacgtgggaggaggcctcttttcagaggagtgatggcttcctaagaacaacaatggccctgtcgctttttcagcttcccattaattttccataaagagcagttttcttgacgagcgcttgtgtcaggcagggcctgatgcttcagaaacctgtaattattcttggctccccaccccctacagcctctgcacctgtgtcagttcaaggcaccagctggccatgtcttgcctcctgcctcttaagagggggagggggggagccatcattgaaaacccaaactcacattactcgcctcttcttccaaaatgcaacaacaaaacaaaaattttaaactcaccaatctcattcctccccccagtggatcttgccaaaggaaacaaataaacattaattggctagagagccctcattcaaaccaaaattactgaaaaacacagtaacagggaaaggtctgacaaggcattattaatcctgttttacagcccgctcttatgcacccccacccgctcctgttaactttgcacacacactcacacaccctcctcaaactccctgggcccctttacactcactggccaagacgggaacatgccgaaccagttacatcatctccccttcctctcccaaatcacttgcacaggctgactcgggctactgggatttttttttttttttttttttaaagcaaactcatttcattggctccttcctggaacacagtcatctccttctcagttgggttaattaatatacccttcccctacccccataaaaaacacacagacacatacgattacttcttgtactccaaagcacagctgcacacgtgtacaacgttctctctctccctcgcagcttgaatttcccaagaataacaggttcaaagcccattgggccctcggtggcagatgcaatttagtggctggtaatcatagaggatgctttcaaaacggagagctttgaggaacttccactgcggaatgttaaagacaaggtgggggcgctaggaggaatgtttcttctactcagaatgcataaaatggcagccaaaaccataatgaagtcaagccctaagctgtttttcctgatat

SEQ ID NO: 38858 - DNA, 636 bp, Homo sapiens
ggcagcctccttgccggaatgtcctcagcagcaattcttccacagtttatttttgctcctcttactagaaagatggatcctctgaaattctttataaacagagtctacttccaaacactgtggttggtcagtaagaaaatggagagctgctacctaatgcctctccagcatcatccaacagatgtacatgcatgcatccagccctttcaaaccatggagcaggctgaggtgagtggaaaatcatggccaagggcctactgagaatgaattgtttgaaacccagcaaggctggagtttaaagcccaacaccacaaagtttccaaatatggaatttgaccaggttaagcaaattcctgatgggtcacaggaaatgtgagccaaacagactgccttagacactttagggtgagggaaagcaaagcaagaaggatgaaacaacacttgggcagctgctattaacaaaagtgccagatgaagcacatccaccagcatgatcctgttttactataaacctctggtccgtgtggattccaaattacacaagtcattaaatatttcaatataagaagcaggtaaccccaactctgacatatcattaaaccctctatacaccaatggctcaatgccttggctgca

SEQ ID NO: 38859 - DNA, 6148 bp, Homo sapiens
tctatgatttatttatttgtttccagtagcagtggaaaattttctctgagcaaagagaggcctgaaactgaccccatctgccaattatgaatcagcattaacaacaaacataattccataagacttttcaagcaaacatgcgatgctcctcaatgacacgacgcaaagctaagtccaaataagacttagatcatcactgcttgacctgcactcatgaaatagcagactagagataaaacatataaaagttctaaaagtctttgtatattcaagaagaaaataaaagcattgtatcaaattctttttattttccaagtcagcagtgtgtctaaaaaaaaagattatgatttctattggcaaaaaaagtcatgaatgagtttccctttactcataatcaagtggtaccccataagaaactctggtttctgtcctacccttgaccttttcctacttttgctcagacagctcttggaaattttcctacaagttttcaaagcgcttaaggctggtagtcttaagaattgcgcgtcagctgaattctataaaataatagaccacataagcacagtgtaatttacagttatatgacaggcagaaagatgatgttacttgggccgagtgcttaagtatgcagtcagagcccaggaatggagagctgttaatgtgtgatgtccatttggatttcagaattataccagcaacgattattttcagacttggagctatgtggctaaggcatcattgccagaaaatccaatgtcaaaacgaggatctccgtgacgagagggagccctgccacagtcagtgactttgtcacaggctcactgactattaagcaggacaattatcccatatcctaagtttaaaataaaatccccaaattgtttatcttcaattttcaaacgtaaaaatgttcttgagtttatcatcgaagccactctttctctagaaaccaagtcagattatcagagtctccacattttgctcatctccatgagcccaggtacattgttcactttaagaagaacatctaataattactcctcatttgacctctaaaatctgattaccccagagcataaagaaacttcttcctgtctggggttctttgcagaaaccctgttgagctgttttgagcaaaagagtctcaaaatttcattatccgatagttgatttggaactaacagttgcatatcaccatcaccaccccttatactcagaagcagcaagacggttttgggagggggaagaaggaagggctagaggttaaaggttttgtcatcagtgtaaacctatggtcctagtcgcctttatatagagcagttgtgattacggagtccagaacataaagctcactggagtgatatattgtttattagtgcttccccacaagctatgcatcagcattggctataagcatgacgctgaataagttggctaagggttttaaggtgagagtggctggcagttggagagggttaaggcaaaaaatgagggggttccgaggggtgaaaaatcctttgcctgtagaaactaaactagagcttccctgaatggggaggaggcagaggagcagggggaggaggggagaaggaagagcagagatggcttcttaggaaacaatagatctaatacatcctctagttgtcaaaccgatgatgtttctttgcagatctagagtttgtcctggatggtctagccagatctagaaaagcaggtttcctgtgaagagaccttcctccaaatctggctttactactctgaaaacttgaaccaaaacaaagttgcatgattcatcagtagggaacgttctaacaaataaagccaactttcttccttctaacactgcttaacagttagtcacaaacaagggctgccttgggcaggctgactaaatcaacagattcccttctctaacctgtctagacagttgttaatatgcaaccgattccataccagtgggctgacagtgtgaaatgaaggctatttcagaagattttggtttaattagcattggaaataaaaggaagaaaaagatccagtgagacccttcatgagacacactctcgttaaggataaggaaaaggatgcattgaagaaagactttattctaaaaatatgtgaactgtgtatgtgtttacagagagacagagtcaagcatctgctagcgtccttggacaagaatgcatgtgtggacacagagacaccagacgccaatacctggaggaaaactcacagcctctgaccagaagtgaactagcaacaatggtacagttaaaggatccgccttgccactcggctccttataccaaaagccaaacctcttttgctaaagcagagactgttacatctcagcctcaagctggcaaatcctgctttggatcccggcagaggaaattcagccgttcattagccttaacaagctgctgtcactaagcgaagaaattacacgagcagccacacaccgagcctctcacagccctccccccaagggcaagcgggtttctccaggacggactgtacaagttcacacttcctatgtgcaaatccggactgtcttcttggactttccatggtgcacactgtacaatttttaaatacccgtgtccccccgcccccacccaccatctttcctgcagaatgtcccctcagcagctcctaatcgctgctgaaaaaaaccactgtttccgcagcagagccagcactttccactgaccagcactttctttattccacttcacaaagcccagtgaacttgtcaccagccccacttcatcctccctgggacggctagccaacttggcatcggtgcccttcagcatcctgggagtttcttaactagtcctctaagacaaagtcaaaggcatggaagcacacatcagcctttgtccgaggttgtgctgcctaactagagaaggaccctaaacaaaaaagagaaacaaggacacgcatagagggtgttctctttctggagggatcacactgggaaaacctacaattcattgtcagcctcagctacatcttcccgtcctccttgagtatcttttgtcagtgggctcttctctcttttgcctaccttctaatctcaaaatcaagctcctattctttattgacactcgctaattactgaaaaacactccgctttgctcctgcccaccctcccccgccccccatccgatggtcataagcaccagttgaaacagatgaacctgatttcaggtatcaagtgggtagagctcatgcatgcgagaacgtggtccctgtcagcaatcgctcctaacaccccaaaccaccttcccacccggctcctccgaaccccagaagttcggcaggtctctgataggggacagcaaacccgacaacgtgtgcgcagggatgtgtgttggcgactgaaacgcaggcagctcgcaccggctgctcagctcggcactctacgaggttaggggtgggtggagaggtaagcgcagatgactgtttcagaaaacattttcaacaacagacagccaaaaaggaagaaaaaaaagtcaaacaaacaaacaaaaatttcaacccagagcccacaccaacgcagcccctgcgtctccgccgccaccacacgatttacacaagtaatttaaatcattcacctgctgccaggtctcctccagggatggtaaagctgagaagtagccggtgtcgtggacaagttgtagctcctggaatatactataactagccaacacgtccatgctgctgctgccgggcaaaacgggaggcgaaaccctcccccgaacacagttggggctgtttgtttgtcagtctgtctggctcaccccccaagaaggcagacatccagtggcccttttgttttgttttgtttcagtcaactaaaaaggaaaaaaaaaaatcaatgcaggagagggagagaggaggtgagagaggagcgagtgagtggggtggatggagagaggcatccagcgtgtacagtgcagacgactgccaggaaaaggggacttctccacgggagtaacaattcccttccagggctctaatcactccagctcgtggatcaggaagggggatgcaaactcactgacacgaagctgccatctatttctgcagcgctgttcgctcctaatgcaatctttgctctttattttgggaggttgcatttttttctctcgcgatcgcttctcttccccccccttcccttccctccccaccccccaccccatccttgctagtttgtagtcttccccctcccttttctcctcctcctgctcttccccctccccaaactccctccctccgttcggttctccgcgcagccgtgggatctcgaggagggcgtccattaggccgcgtgtgaccatgtaaggtaaacagggggctcatgaagtcactgaggaccaatggggagcccggagcagagcctggggcggggcttggccctggcggcgggcgcggattggcacgctgcggatctccctgctgccttacaaggcggtgcgaggcgagctatttttagagggctatataagggggctgaggcggccgcccggcggccgggcagcgcgagcgcaagggacagggagggtcgtggcgacactcgcgccagctcccgggacggctgggctcgggctggtcgccgacctccgaccctccactagatgcctggcagagcccggcgcgtccggagcccgcgcccctcagagggaaggggtcgcgcgtcgccgcggcggccctgaggctgacggtcgggaggtgaaaggccggagtgcggggtcaggacgcctcctggagggggcgcggcgcagggggccgcggggaagccgccgagggcgcggagcgggaaggaaggacagtggccaccccgcctccgcctgggcacggggcagggacccgcgcgaggcggtgccggggaggtcctcacgtactcaaaaacaagcagaaaaggcatccagggccccttcccgaactccccacgggctgccagggtgcagagaagaagcgcctgaggaggaagtgccacacaatgggagagaacaaaggggagcggagcgagaccgcggcctgcgcccgccccccgcttgcgcacagtccccgccccgccccgcgggcgccgccgccgccgccctccctcccgcgcctccttctgaccccgagcgagagacctggtcgggagtccggcggctagagttgattgcaaggggcctgttgctcgactgtgcgttaaagaggctagagggagcctaggtagacgtggggcgcaagctggagccggcagcttgcgagggggcctttacgtgatgaggctcaccatggggtctccagcgaggtgtctgcagagcttcgatggtgagaggaggaactcgatttctcgttttctggagttgggatgtagacatagagagatctgttacatctgagatgaaaaccctgcacaattcacgttagggttggccaattgtttgcttgaccttaaatggttagtgtggtttaagcttccccaaaatgcgctgtgagctgagcttccacttttggaatgattgcagaattcggtgcttaagagatgagaaacttcgttctaccagtaatggaagaaacgcttcaccttaatcaccctccttgtctttcccctccctttgactatgtaggactcgataacacaacatttgaaagattctactctatgaaataagcacagattgaaattcagtatttgccaaggaatattaaacatgaattactgggattgaggaaagcctgatttatttacttgttagtgtctggaattctgttggccagattcatagcattcattgtatgagtataattggaacatttactctaatgtagatgcagatgcatctgcaattagatgtgcaaggacgctgccagctaactagctgcacgactttgagcgaattactgggtcagaacttgtatctacccatctcagaaacagaaatagtgggatccgcgttgtctagttgttatgaagagtcaaaatatctttggtaactcacctagcatagtatctgacactattaggtgaatactaaatattagctatcattgtctccccacttgagctatgtaaactaataggacctttaggagaatatactattaatagaatcttggagatagaggaaaggtagaaacc

SEQ ID NO: 38860 - DNA, 864 bp, Homo sapiens
tttccaacttttctcatccaatctcttcaagcaacccccttgcattattgttcccatatgctcgacacccaagcacatagagacatacgcatcacataaacacacagagggacacacatacacacagaggtttttatatggctgagctgggagaagccaagtaaaacactttttcttttgtttctagactatttagcaaatacgaggaaaatgacgtggcactgaagaggggacttagagagacagggccagtgggtggaggaggagaggacgtgccgggaaaagaatgcagaaaggagattttttttggccacagagtttttgctaaaagcagctaggaagccccacggctccagtgtgcgtgaactcctggtaatttccttggggaatcccgcctcagagaacctctaccccgagaattaggaggaagctgagctaggtgagtttccaaacggagggggtgggtgagtgactaaaggcctgaagaccggcccagacgagtttcccagtgggcgtcccctggctgctctgacagccacaataggaactcagtccagaagaggggaatgccgaggccagggacgattcctagtgttttcctttgtctctcagcttcctgtgtttgaaatgaaggcatccgaggctctctgtggccactcttgtctgggattctttcctcaagaggtgttcttgaatttgtgagaactgccaggaaatggcgtgagtcatgtcttcttagcagacaatattcagctttagaaattcccagagatatgacttgtttataggaaaggaaacagggctattctgagctgccaggggaagaggaaagcgctgctcattttttaaaatatcgtgttgaaa

SEQ ID NO: 38861 - DNA, 639 bp, Homo sapiens
ataagaattaaataaaacatatacggcaggtagcactgtgtctgagacatagtaagtggtcaattaatgttaacttttattaagtctcaaacaaagacctgtctggtatttctagttgctctatgtcttcattgctcaacattcactactagaagcatggcattttgggcatagacctatatgtactaaatcatgtgagagactacagtgtcctagccattggcaatggcttatccagccgtggtgactagctttgttttcaaatataagcaaaccggtgacctaatggactatgagtttgctccaagggaaagtagccaactcttccttatttaatgccaataagaccttgacctttcctgctttctatgccagcccttctctcataaagcaaacccagaccacaagtctagccagacagtcgatatgaaattaagcctagaattttaaaacattgcccaggtctttctcaacaattacaatttcttttaagcattagactttctttatggggcccccaaagagttgcagaatagaactagtattgttaaaccttcttccaaatctctgtagtctactcagcatcatttctttttaaagtctcccaggtgtgatacttgtggcctgggcttgtgttct

SEQ ID NO: 38862 - DNA, 2551 bp, Homo sapiens
ccgtctctactaacaacacaaaaattagccaggtgtggtggcaggtgcctgtaatcccagctactagggaggctgaggcaggagaatcgctcgaaaccgggaggcggaggttgcagtgagccgagatcgtgccactgcactccagcctgggcgacaagggctagactccgtctcattaaaaaaaaaaaaaaaaaaaaaaagacttgaaaccccaaggagagggctgcagagttcactatcaaggagaatggggacctagtggtgccgtcctgagagacctctgaaagaacaattcagtagtttccagccacggaagtccccctgctgggtttagggtgcagtgggtgcgaatccctgctgtagaaaacaggctgaggaaagaaagcgacacaggatgttgtctggagaaaggcggggaggtaggatggggcatatttccaggggtccgggcaggttgtgtggcttggaggcctccgagggccgtcgacgtcagccatggtccgggcagagccccgcaaggtgccacagtatcggggccagcgccccccggaaaagcatgctccgctggcggccgccaggtttctccgcggagtctcggaaaggaaaacccgtccccacgggggtcccacgacgcccccgggtcccaggccccgggacgttggcagaggcgcagcagaccttcttccccagcccgcacggctccagcggtccggccgcgtcccagcccgggctgcccgtcccccgtctcccggcggcgtcggaaagttcccggggctggcggcggtcaagagcagagccagggcagccgcagccgccttctagcccgccgctcaccgccgcaggggcaggcctgagcgggggtttccaccaagtcgccgacacccctcgggaattcccccactgggccacacacaaaccccgcttcctccttcaaatttccgctgccggctttaccgatgcgaaagccgcggtggagtttagaccactcctcccggcgccgggctcagcccgccttcgccttccctctccccgcggaaccccttctcgtcgcccgaagaaacccgaaggtcttcggcaagttccgtccccagcgcgggggcggggccgctcgagctgctccgggcctagctcggctgtttccgtgcgcggccgctgcgcactcggcactgggcggcgctggctggctccctggctgcggctcctcagtcggcggcggctgctgctgcctgtggcccgggcggctgggagaagcggagtgttggtgagtgacgcggcggaggtgtagtttgacgcggtgtgttacgtgggggagagaataaaactccagcgagatccgggccgtgaacgaaagcagtgacggaggagcttgtaccaccggtaagaggagcaggaggaggaggcaggagccagagagagccggggggacggaggggggacggggaggcgccggacacccgcgcttggggccttcccctcgcaggaggggccgcggtaaagatggagcctccgcccgagccccacaacatcgccgccgctcgcagcgaacaaagaataatggcggcggactggagccagcggcggccggggcggcagcgactctgcctgcagccagcggcggcgctcatggcggggggcggcgggcggcgggcggcgggcggggtgggagccggcggccgggggtgtgtgcgggcggccggccgcggcgagctggcgcccgcgttcccgccgccgccgccgggccgggcgcggagccgggaacccggagccgccccgggggaggccgcccgctcggcccggcgctgccccccgcgccgctcgctcgtccggcccccgccgcccgcctcgcccccggcccgacccggccgggcctccggggcagccgccgcctaggtgccggtgggggatggaggaggaagaaggcgacagttgagggcagaggaggtgaaggtgcctgctgccttcccggtggcttcggtgcctgccatgcccgcttcgcaaggggaagagctgcaacgtctgacctactcttctctccactctttgtgcaataaagttcgaaacccaaggtttcctctcgtgctgtattttattcgtgccctttcccccccgctcctacaccgttgaggaaatgctgctttctgccctgtgttgcttagttgagagatgagagcttgtgcttttggggggaatttttgactccctcacccctttgctttttttttttttttaaagtcagtcatggaaatgcatgctttttgggagaaagggtgctaagaaaaacatttataataactttttaaactgttgggatcttataaaagggaagctggtgtttgaaaacagtttcggttttaaccctttttaataaggtaatcatcacttgagatctatcattctgaaacacttcgttggaacgagtatcagccgatgtactcttgttttacatcatttcgcggggtgcaaccttgccaaccgcgtttgggtcatctggatctcccctcaccctccgtcccactccccctaccatatttcccacgaatttctgtgtgaa

SEQ ID NO: 38863 - DNA, 727 bp, Homo sapiens
catacgaggcaggctgcaggattgaaggggagagagccaggacttccatcaatatagggtcaacagataagaatctgggctcatctgtatattttgccctttagaaagaggaagacacaatgctaggccgggcgctgtggctcacgcctataatccaaacactttaggaggctgaggcgagcgaatcacttgaggtcaggagttcaagacgagcctggccaacatggtgaaaccccatctctactaaaaatacaaaaattaaccaggcgtggtagcacacacctgtaaatccagcgaccttagaaggctgagggaggagaattgcttaagtccgggaggcagaggttgcagtgaactgagattgcgccactgcattccagccggggtgacagaacaagattccctctcaaaaaaaaaaagaagatgcaatgccagcaggcttctttatgatgatagcccttaacacatcttatctctggagtcacactattttgtccagtctggttgtccccagagtaggctgtattgtgtcatcctgggaattcctttctccctacttccattttctcacagtttgtgtttttgatatggtaaagcatgtttttcagtggttttatgagaaagaaaggttggctgagtaaagatagcatgttataaaaattgaatgtatgggccgggtgtgatggctcacacctataatccccacactttgggaggccgaggcagg

SEQ ID NO: 38864 - DNA, 2870 bp, Homo sapiens
cgacaagtcattaactttcctcagctttcatttacacctttaaaatgtaatctatgtggagggacaagaggagtgactaagggatacgggtttgagagtggcagtgatagtaaaacttttaaaattgaagcggtaatagttgcactactctgtgaatatactgtatttttaaaaccgcactgaattgtgcactttaaataggtaaagtgtatgctatgtgaattatatctcaataaagctgttctaaaaaaaataaaaaataaaagccagtcttgcaagtgtgaacgttttcagaggtcccccagggcttacttaccgcatcccaaaccaccgctgcgactcccaggtgtctccagtcctgccggatctggatcgtgtggtttgcaaaggaaaaagttgcaagaggcttgtggaatttctgcaacccaaattccgtggtctcctcatagggcacgagggccattccgcctgcaccccgccctctgctcagacctgccgtgcaaaagaatcctgggtgacgctctggccaaaagatacattatctgttcttaactaactccaaatgcttttaaggtcgtttacaagttcaaaagaaaaaaagaaacaggtggaggaagcctttgtccaatttcttttgcatggctcttccgaatctgagtgagatttggctcggaatttgtgtcaacggatgtgtttggggaagaagaaaaaaaaagcccagaacattccaacttccgcagaataccctatacactgcactgctaccactccgtgaattcagaactacacaagcggcggaagcggcggtgatcgcccagggccccagagcagcgcggaaagcagcgcttccaacccagacccgggcgcccggactgcagctgcagccagccgggcggcccgggttctttcgctacggtttcgctacccacctcccctcctccatcggctgcttcgatagtgataacaatgggacagaacctgcccttagactgggtgttagcggtttgataaaccagaaatacatggtcgccgcagttccgtctccccgaccctggaagtgagcgacactgggggcctccaagcggctcgcggggacagcggggactcggaggcctccccgaactccccctatagctgccccccactcacccctctcccgggacgaccagtgcgcccttcctgcccgggggccccggagctgcggcaaccctccaggggtgagagggagaccaggcgaggggggtcacagggcctcttaggatccccaggccatacggggcgccgtgagctgcccggcggagcacccagggctcgcccaggccgggctgaggcgccgccacgccggtacttacggcccgggaggcggtcccgcgtggagcgcgcgctccgctttccccgccccgggctggctgcgaaaaccgccggccttaaagagcccgcgacgcgggggcgggcggccccggcccggagccacgcatttccggtctcccggcacccagcctccggcaggtgcccccggagctcacggcgagggcggggccgggccgtggcgcggtggaggagtgacgttgcgggaggggggaccggggctttccctcgtgcgtccccagggtacacggacgacttaatccgtttcccccgccgccgagggaggcgctgtgggggcgggagcaagagtgagatcggggtgccgaactgccgcgggtgcacagggagagcatggggtgccctgggctctcctagcgggagagaaaagccacccacctggcgctgaatgtgcctctcgaccttttctatcatgtgctccgccgctctctgcctctgactttgtcgcttgcgcgttgtgcctgttttttaaaggtggcgcgttagcggatgatggagacagctcgctccgaagaaggcatggtcactctagtccccgcgtctccacggtggggtcagaagcggcgtaatagcccgcttggcggcaatcgagtggaaaagtcacaaaacccttttcaactaaagcacagtgggggaagtgaacacgtggcgcccgagtccaagtttttaaagtggggcgggggtcggcgggctctggctgcagtcggaagcgcggagctctgggcgtgcgctcggctccagccccggccccaggcggcgctgcagactccagtgccccagtctccctcctcccgatgccaagacgcacctgcccgtgaggacccacgctggacgtggaaggtgccgagggcctggtaccctggccgcaggccctggcagagcgcgcggctggagtgggtccattgagtgggaccgtgcggggaccggcatcctcccggggcaggcttctttttcctcctggggcccctcgccccacaccgcccgctgcgctctcagcgcggctgcacgttagaaccagctggggtaaacctcccttaccagtcccccgccccaagagctggccatgggagggggcccgagcgctgatttttttgtttggttttttgcttttgtttttgtttttgtttttgttttgagacggagtctctctctgtcgcccaggctggagtgcaagggcgcgaactcggctcactgcagtctccgccttccgggttcaagcgattctcctgcctcattctcccgtgtagctaggattacaggcctgcgccagcacgccagctaatttttgtgggattttgtttgtttgtttgagacggagtcttgctctgtcgccaggctggagtgcagtggcgcgatctcggctcactgcagcctccacctcccgggttcaagcagttctcctgcctcagcctccaaagtagctggaattacaggcgcccgccgccacacccggctttttttgtgtttttagtagagacggggct

SEQ ID NO: 38865 - DNA, 1144 bp, Homo sapiens
ctgtgaaaattaagtgaattcatctgttcttcaaaagtggagaaagaaaataaagtaaaatttttattagaaaaaaaaaacaaaaactggctggacgcggtggctcacgcctttaatcccagcaatttggaaggtcaaggtagccggatcacttgagcctaggaattcgaggctgcagtgagctatgatcgcaccactgcactctagcctgggtgacagagtgaggccctatctcaaaaaaaaaaaaaatcaatgtagaagaaaactagtttttcacccctccttcgaaataacttgaggccatttgctcatatgcctgggtcctggccagtatgatgtgggccgtaatgtccctgcctaaaagccctttcttccccatctgcacaccctcagaggtgggcaaactggagaagctggatccctgagtcattgcttagaggagagttgctcaactcacagtggattgtgacatgagcaagaaatcaatctttgtcatgttaaccactgacatttggaatttattcactattgtagcatatagcctatctccattaatacacaagggcaggccatttgagctggggaaaggagagggctctgaagaggtgacatttaaatggaaatttaaaagagtagaagaaaacagccacttgaagagccaagggaatggcatttcaagcaagggaacagaaactgcaaaagcccccaggcagaagaaactgtcaactgaccagccaggagcaaggggtaagtggcacaagataactcttaagattaagtcaaacagaagaatgaaagctttgaactacccaaactccactaacaacttacaccctgcaggagaggtatttttgcatcatcactacacaactctctgtgtgagtcacagaccctgggtgccctcaagggtgaggctggctgccctgaagacactaccatacagctaaggagttggcttaaggatattcaaaaagccttaaggaataaagctccagctggtgctaaagaaagacaaccatagacagagtcttggtataactgtgttcaccactgtcttttttaagttcttgtctagcttctcagtatttccgtaagacctgactgcagagagaaaaaacaagacaactgctcagcgctaccttga

SEQ ID NO: 38866 - DNA, 614 bp, Homo sapiens
cacagaaaacgttttacattgctacaagagcaaatgtataatcaagaaagattctttgtaatgttatctaaaacctgaaaagtctgtagttttggttgattgcccagtacattgaaaggactttttttttttaatcttgggtttcgtttttcttggtctaaggcccaatctattgccagtggtgagtcagaagggatgcctgaaatagttcttgtgaagttatctgtgttcctgtcttatcatccacggatggccaagactttctcattcatctatatatttcacaaaagcctagcacagtgttcccatgttaaatgtttgctgaattataaaaaagcatttcaactaatctgtcaaatatgtgagacaacaaatagcattttgtgatgtgttcacggatatgtagttagaatcgtaaggccaaaagtaacccagaagtttccttttcccttttccttgaccaggaagaactgtccaatgaacgctattcactgatgagggaaaagttctggtaaagatattttttcaaagtattaagataaaactaaaagcacttattttcagaaagtgattatcattagctagaaaaatctaatcacaaggccagacatggt

SEQ ID NO: 38867 - DNA, 1934 bp, Homo sapiens
aaatcagttttaatatatctgctaagtattaaaggtgctactagtaggtacagtactactaggtactaagtcaataattccactcatagttttttttttgttttttttttttgccaagttctgttgctctcctctttaatgtatcccagaccattcctaccaacattatatgccaatctttcttgatgcaagtttccttttacagtcatgatctttctttttagagatggggtctttctatgttgccctggtctcaaactcttggcttcaaaataggaagatctgtttctctcgtgttcgctttgaatggctgctggaccactgtttccgtgcacaggcaaaggggcagagctgaggaacagtcatccctcctcgctgtccattatctgttgccaacatggttattctcatctttgtgccaaagtctcactgctcacagcattttccctctcgtgtacctgctgcctcctgattctcacacatatgagtgtgaccctgggcaggtccttctgttaagagctgaagcaatatgaagagagtttgtggccttttaactacttatttagatcttttgacttatctgcataacttttgtaaagttgcaaaacttaagtagagttttggcccacattaaataaccaccttagaaactctaatcaaggtaagtagaccaatttcctaagtgctctctaattatgtttttaaatttattgtcaaaccaactatgaccataagttgaagtgctgtggttagagggcacatttctggtcaaatgaatcacaaactcatgtcagctggtcaaggaataatatgctattttcagtttttatagtactaggaagcaataaatgacaaggactcacatgcaataaagctgttatcagtctgtgagaaaaatctcatatattagtagttatgttatagctataccaacctaataaattcagatgtcttttgcatattagattactttcccaccacaagtgagctacaaataatgtttgtctttctgaagacaaacatttgtcacagtcattcctaccattcttgcatgaatcacactggttcatctgctgtgacttagaaggttacggccaatgttcaacacaagccaaagtgataaatgtgcacttagctcatgtgaaagcccatgtagacccatttctggaacaacgggaggaagatttatggcagtaaggcagtggcatgtgtgagaatttcctcagtggtggagcagagacatggatggaattggggtgagaggttagacccatcaagtttagagagaactgctgagtcaaactcatggcagcaagccaggtgcagtagctcgcacctgtaatcccagcttcttgggaagctgaggcaggaggatttcttgaagccaggagtttgtgatcagcctgggtaacacagcaaaaccccatctctaaaaaaaagttaagaaaaaaaagaggccaggcgcggtggttcacgcttgtaatcccagcactttgggaggacgaggcgggcggactacctgaggtcaggagatcgagaccattctggctaacacagtgaagccccatctctactaaaaatacaaaaaaaaaaaaaaaattagctgggcctgatggcatgcgcctgcagtcccagctacttgggaggctgaggcaggagaatcacttgaacccaggaggtggaggttgcagtgagccgagattgcgccattgcactccagcctgggcaacaagagcgaaactcccatctcagataaaaagaaagagacagagtcaaagaaggtttcagatcgatgctaacctagatccccagattcacccagtggacatactgtaggttctatggcacatgagggccccaggccctggtttcggcactgggcagctctgctgttaaatgagtggagtcataattttatctcctttcctcagagg

SEQ ID NO: 38868 - DNA, 2434 bp, Homo sapiens
caagagcaaaactccgtctcaaaaaaaaaaaaacaaaaaaaaaacaatcccattttgcaggttttatagaagaaattgggacgcagaagttaagttacttccgcaagcttacatgactgctcagggtgagggtccctgatcatgatgatcagaaaataaaggtagaaatcaagcttagggaggaagtgacattgtgtgtatatatatatatttgtttatttatttttatttttatgttttatttttttgaaacggagcctaggtcgcccaggctggagtgcaatggcgcgatctcggcttacggcaacctctgcctcccgggttcaagtgattctcctgcctcagcctcccgagtagctgggaatacgggcgcgtgccaccatgcccggctaattttttgtatttttagtagagacgggatttcaccgtgttagccaggatggtctggatctcctgacctggtgatccgcccgcctcggcctcccaaagtgttgggattacaggcatgagccaccgcgcccggccgggattgtttttaagggttaaataaatataccacagttggaacactgtctggcacatagtgcttgccaaatggtaactattcatcttcatggaatcaagactgtggtgccccactgcatggttctcagttttgcgtgagaaaatcgtgctttctgtgctgtttttagtacaagaagagaaacctggaagtccctgcctagaggagagaaacaggcaagaaaagggagttggcgagtcccagcatttcagagttggcagggacgagttaggtccctattttatggatgaggaagtggaagggtgacgtgtcctcgagtctcattcaagacccacagccacaactctttatggagagtaggaccagggccccagggttgctatgatcacgttgcaggtgaaaactaacgctcattggaagacaggagcggagcactgagttacaaaaacagttaacaatttgggtgtaaccaagtttagtgagcaaacgaaagctgtcagactcggaagaagagttgctaatggagcgaactctttactaataacggctttctacagagatcattgacacagcttccagttacaaatgcccgtgcgcttccagtaggaccggaaagctcccagcagccagcgatgaatgaaaacccgagtctgggatagcggcgtgaggggctgggcagctgccaggcgggggcggggcagcaggtcacgtgcctggcttcgaggcgggcgccggagggggaactctgaccatgattggttcctcctaaccaggtgaccgcaggtcgcgttccggttggcaggcaccggccagggccagcggccttcagtcggtaggcggcggcggaaggaggaggagctccagccgcgctctctcccggcagtggctgtgcttcacagcgcttgttgggttccccaccccttttaaataagccgggctggtcaccgccctcgcagacgagtcagcttaagggaggcggcggcagcgcggcggtgggggtgcggccgaggcccgagccctgcccggggccgggccgcggggcgggcgggcgaaccgcgggcgaggcggcgtctgcttgcgcggtgcagccccagcgtagcccggggctgccggtgccggccgcgccattgttgggggagggggcggctgttgagggcggcggagtagggggcgagcgaaggcggtggcagagaggagcggaggcttcccatggggaacacgctgacctgttgcgtgtcccccaatgccagccccaagctgggccggcgcgcggggtcggcggagctgtactgcgcgtccgacatctacgaggcggtgtccggggacgcggtggcggtagcgcccgctgtggtggagcctgccgagttggatttcggagagggcgagggccaccacctgcagcacatcagcgaccgcgagatgcccgaaggtaaggaggcggcggatgccatccgccctcgggctcacctctgcccgcctcctcccccagagtcccccgggaggcatccgccgcctcgggctccttcctgccggtagccggccccgggacgaaggctggttctgcctcgcgtccccaccccttattcttgccctgctgcgtctggccagtttcttttcctcctccttaccgtaacgcccagttcttgctcccgcttcccattctcccaagccggcgtgggaccctctagtccgccgcccttcttgtttgtagctctgttcattgtctggtgggactttgctaagacttttggggtatattgttttccttttctcaatggaaactcaaatacctcaacttcggagtactcatcccattccctcccttaacccatccagatggtacctaagtgaaggaaccaggtaagggtctgattgttccttcctcccatccgtgaagatagctgatgcccg

SEQ ID NO: 38869 - DNA, 1381 bp, Homo sapiens
tgaattttaatttcctgttttaatcttaggctgcatggtggaagggaaagccagttagtgaagaagcaatcccagaaaagtgtagctatttatttaatgcatttatgttaagacagtgtcgaacataatgtgagaaggagaggtgctttttattggatgtttctggaaaaacgttagtttgttatgagttacaggtctcaaacaatgtgtactgctttgcaaactactcttggaagaaggaacagcttgtcctctactggcaccatagtgtatctgcatttacattttccctgtcgtgcatgagcacctcttgggcacaatctgagatgcactttcagaacaccctaagatgaacttttcaagtttatttaaaaaccaacaacaacagcaaacaactccattggggttgtcaggaaactattaacatctccttggattatgagcgttgattttcagaacaccgttgggaagtgctacactagaatattaatgtccttatccctaattttactttttagtctaaaaacataactagcttataaacttaattttgtttctaatgtactagcttttttttttagttaattcaattgtcagtaacttctactttaaaagcagcaaatttacactcataataatgtcactttcctctctcacttaaaacaatagttgaaatcaaattgtgtttcagcacaaactggactctgactctgtctaaagtcctgagctttggcacctactgagtaatcattcaatgtttgtattcagccaaggtcctaaatccttgagttaaaaaaccactccactttggctagagtccctggcttcttttgaattcaaaagattctgatgtttctataagattcaaagtagttttaaagattaaccttgctcaaacaagtataatagatttcatgcttttttccccccattttagtcttaatttttagatgtctacttttggaagtacagtaagttttaatttgttctcagtaagttttagaaatgatcatttggtatatttcactactggttaaataaaggtttcacaagtatggcaaattgacttttaggaaagattttgaaaaatgtttatcatggcttactagtgcgttattctcataggttgggtgagccatatcagaatcacttacgcaacttttttcaaaatatatgtccacaaacaaattcatctcacctccaccttcccttgatctctaggcagtcacaagccttttaggaaaatggagaaggcatgtgaggcataattacacagacaagcacatcccagatgattctggtcttaaccctaactcagtcattcccaaaatttgcagcacattggaatcatcaccaggggaactttaaaaacaaccctcag

SEQ ID NO: 38870 - DNA, 1007 bp, Homo sapiens
acactcaagttgttttcctagacaggattttctcaaatgttaattgctctggccattttagcttcctaaatttagtccccaatcctggtcattggtattttgctggctgaggcactgtcaccccccttccccagtaatggccccacactcttcatgaatgaatgcttaaacagattaggaaagcaaacagaattttctaatagcaaagaaacctctgtgtgtatgttcatcaatataagcgttcataatgaatgaaggaatagttaaacagattagtaaagcaaaccaaattctctaattgcaaagtgtgtgtgtgtgtgatcatcaatatacaggctttctcagaagaggaagaaaactatagaggtagcactatactgatctatattttaaaaggttgtgcaagcatgttatgcatctcttttgttttcagagacggcagagagcaacgtcttgctgctcttggaatatctggctataaactagtccaaagtccaggaacacttattttcccttatttgggccaatgtttgttcacaggtagccagcctccctcccccagttcaagcacttcattcaagggtgggtgtggtttctaatcacagctctccaggagaggaggaataagaaaagcaaaaaggctgtttaacatgataaagggggaggggggaggggggagggggtggagcaaataagtgttggaaatttacttattagaagtatatccatttcagtccttacatttaaaaaggagccccctttagcaactgtcgctaagtattgtccagagggagtgggtttatacttttaccaaaattataacacaagttccttaaaaaaaaaaaaaaaaaaaaaaaaaggggatcactgaagcttaagaaccacccactacctctcaggcacaaagctgccatctcaccagcctaaaattcaagctccaccaatcaccatcgcttaggctctcactactgcaaatatttatgccagatcctctataatgctacctc

SEQ ID NO: 38871 - DNA, 5526 bp, Homo sapiens
tggtgctgttaggagtgagaattattacaagcactacagaaaagaaactgaacctccctctataaacaaagctaaggctgaacacaaaaccgctaagcactccctaaccttgtcactttggggaggccctgagctcattatgctcccctcctaggtatgacctggggctataaactgcagctcaccttaaagaatcatggacactttaagcagtggaaggagaagctggctgaaaaagcacacccaacaacttcccagtcacagcaaccgaaacgttcactgttcacatttttttttaaagacacacgtataggaaatatattttcccaattgagaccacacagttcaaagaaacctgaaccaagtggaacttcattacaacgccaaccttaggattgtaaagcccccaaagcaaaggtaaattgttgccaaaatgcaacaaagttacaaattaagaaaaatacatataaattaaaaagagggttcccataaagaaggcagtaagaaacgcaaaatagaatacacgtgagctgggccccttggagaagacctgggacaggttcttcctcgaaaacgcccctcttccctctctccaagtcgccgcgggagggggcaacagcaccatgaaggtaaacggaagtgaccttggcaaaactaccaaacaaaacgcccccctcccctcagctctccggccgagtccctcggcggcagcctcctacacgtgcgacagggacacctgcttgtggtaggtggcggcggggcccggcggcccggtcctgcctgtgagcgcggcgctcgcctcggggtagtcccctgcggccatggcgcccccgctcttgtggccgcgccgcgggcggcagcagcagcggctggtgaaacgccgccacgactccaccgtcttgcccgaccagatccagacgcccgacgtgatgcccaccaccaggcacatgaagtacttgagcatgagcacccagtactcgggcttggcgcgcggctggccggtgtcgtggcccgggcaggcgcaggtgagcgccgcctcccagctctcgcggtagtgctgctcgtacaggtagcaggccaccacaatgctggcggggaccgtgtagagcagcgtgaagatgccgatgcggatcatgagcttctccagcttgtccgtcttggtgccgccctgcttgatgacgctgcggatgcggaagagcgacacgaagcccgccagcaggaagagcgtgcccaccagcaggtagagcaccagcgggcccagcacgaagccgcgcagcgagttcaggttctggttgcccacgtagcagatgccggccactgggtccccgtccacggagctcagcgccagtgccgtgatggacttgacgctggggatgagccacgcagccaggtggaagtactgcgcgtagcccgcgatggcctcgttgccccacttcatgccggcggccaggaaccaggtgagcgacaggatgacccaccagatggagctggccatgccgaagaagtagaccaggaggaagacgatggtgcacagtgcagggcccgtggtctcgtagtggatgtggttgtgctcgcggctgcaggccacgctggcatggcccacgaccagacgcaccaggaagcccagcgacacgcacaggtagcaggctgacaggaagatgatggggcgctcaggatagcggaagcgttccatgtcgatgaggaaggtggccactgtggtggacgtggagatgaagcacagcaccgaccacaggcctatccagaaggtggcgaacgtgcgctcgtcggcactgaaggacggctggtagcagggtaccgcgcagttgggcacctggcccgtccgcaccttgttgtagagcgggtgtgactccttcagaatgggcacgaagggctcgcgacacttgcacacgaacgggcccccagcggggcattcgccccccgaggccggcgcccctggcgggcctggaagggtgggcttggctgggaaaggcctggggggcgccgtggtggcctcgctgcggttgtaatccatgcagaggacctcggcgtcgcggcccagcaccgggaggcggtcgcagctcatgcgctcgggccaggcgaagccgtactggcgcatcagcggcgagcagccggccttggcgcgctcgcacaccgagcggcagggcggcagcggcttgtggtagtcgggcagacagatgggcgtgtacatagagcataggaagaagcgcaggtccggcgagcattggatctccaccagcggccagaactggtgcacctccaggcccgcctcgtcctgcgtgtcgtggttgaactggttgggcatgtgcgtcaggttgtagccgatgccgcggcacatgggcaccgtgatttcctggcacaccggggccttggacgcggcggccgcccggcccaccagctgcgctaggagcagcagcaacagcgagggcggcgcggatgggtcaggccgagccatcgccccctccctcccctcgcctccagcagcccgcgagggacgcacacaggcagaggaatccgggccggggcttctccctccggcgtctcgtgtgtggcgccggggctggcaacctgttggttgctttttcctttaaagaaaaccgtccaaagataaactgcttcgggaaggcgctgcctccgctggcagcgctccgctcctcgccggatagggctggggagagacggttagggctcggattccagggaaaggactctttaaaaaagaagggggagaagaaagattgcaaccactccctgttggagaggcgtcaacagttcggtccccgcgagctgtctccaaatctcttaagttaacccctttcctttcctccccgctccgcctcctgtaaccaaactaccgactcccccaccctctctttccaagctgggcccttcaggcagtgcccggagaccagaaccctcagcttcccggaaaagggcacaggaaacgggagaagaacagggagaaagggaaggttctcacctccacggatcccgccgagaagagcagacagtccccagccagcctgggtcctccgtccctgggtcactccgctgagaagcgcgactcagagccgggctggcgcccggaaagtttagcgacaggctgggtacccgtggcagcggcacatggcagcaggtgggggcgactcagagtggggggcgcccccagaacaggggcggcgcaggccggtcactcgccctctcctcctcgggagccccccgcatgatccagacggagccgggcaggggcaggccgtgcgttctccccggggccgggagccggacggagggcgagcgcgcctggcagcacctgggcgggaggaaggcgggaggcgggggccgtgggaccccgccgcctcacagcaccgcgagcagccggcgctggccaggccgggactgcatggtgagcgccggccgccgcgtcccgcccgccgctcgcctcctcccctgcagggggctccgcgctccagtggactcctgggggcggtggcgacgctctcgggacgtgccctgctcggctcctcccccgcgctctcgcaccctttcgcccacctctggcgagcacggaaccgcgcgcggcggcgaccacagcggactcacggccgcaggctggctgccctctcccgccccgcccgggtcacctgcttctaatgcccgccgggaagccccgccccggctccgccccctcaggcccgggcgcggttggtgggccgcctcgccaagctctccgcgcgtccccgcccactgccccgcgggctcggcctttcccccggcgccctctggccccgccaggagcgggcagccaaggagcgctgaccaatcgcgggcctggaggagatgggggcggggcgaatgctaatcatgccgctctgggcacccgggcgggaagcccttgccagaagtccctccggagttctctgcccgcgccctgggtgcaggactcgctcctgtaacttcctggcttatgcacctttgctcccagggcccctgccctttctgcctgcagctaagcgtccttacagagttcagtgcttctttgaaagaactgctcaaggaatcactcttaggcgtggctgtctcccttccgagctgtcttggaactgtgtgaaagaagagaggatacttactgagccctttactgtgtgcccaacaaagtgttaatcggttacatcctttttttttttttttttttttgagacgagttgttctgtctcccaggctggagtgcagtggcgcgatctcggctcactgcaacctctgtctcccgggttcaagcgattatcctgcctcagcctcctgcgtagctgggattactggcgcccgccaccacgcccagctaatttttgtatttttggtagagacgggctttcaccatgtaaggctgttctcgaactcctgacaccgtgatctgcccgcctcggcctcccaaaatgctgggattacaggtgtgagccaccgcgcccggcccgtttacatcttaagacaagatctcactccttacaacaattctgaggcaggtacttcctacaggtgaagaaaccgagactgagacttggccaaggcaaccgagctaatcatagttcccccaagaaagggcgacctcggcaagcaagttcacctccgtattccgatcacctggcacatagtagccgcccaaatggcaaccctgggattcgaacccaggtagttggtcagcggcactcaccatcgtagccgcccctccccccatactatcgcagcctccctggcttcgacctttacttttgcatctcttaacaaaatcttgttgtgacaagaaaatggatttctttctgcctttagaagacccagaaagatgtgagtcctttattggtcgaggtttataatcccaggcagttccgaagtcgcccgcagagagaagcgataccgacccagggttctgtgctgggcagggcgccggcctccccgtgcccttccgtccccggctgcctgctgctaagccgcgcacttgcgcgccgcggggggtcggagggcgcaccgatggcggggacacggcggcgctcttcagttgcgcaattatgctacaagttttaaatgtcctaaaaatgcctcttttctatgtgttgtaattagattggaagactgaggtatttagcatacttgaaatacattcacacgcctaggaagagggtttaaattttttccttctccccaaacttttccttccactgggcaaagggcgaaaataggcaagagggcctggggacacttgaagggatagggactggactaactggactagatccagatcaaccgcgggttactgtccatctcctgtgctggatcccattggcacaggttggaagaataaattgcggaagtgccactcccctcctgcgtatcaacaacgctttgtgggcaataatgaagaacacgtgtgttaatcccagcctccaagttaaaaaggaacaaatatcaatcacttcgcggatatcaaaactattaataaacgtttaaaaggccgggcgc

SEQ ID NO: 38872 - DNA, 1059 bp, Homo sapiens
atttgtgaaataaataaatgagtgaatgacaactgatactaactttttcaattttagcaactggcattcagtccttgaattcagatgaactctccctctgaggttgaccaggtcctgttaaatgaagcctaagtccaaattttggctctgcctttacaagctaggcaacctcgggcaagtcacctaacagctccaggcccccttacttctctgtaaaatagagttagaaatagttatctacctcccagagctatagtgaggagtaagtatatttatatggtaaagagcttagaaccatgtctagcccctgagtctctataggtcttggctattattattagtttcttctaaggttcattctgtttttccagttttctgtattttcttttgtatattactttaacaagggaaaaaataactatttttttccaggtgtactttatttctgagaacactgcaggctctcaccagctatctctggcacttagatattggtaaatttagtgccaaagcagggatcgtgtcacttgcccaggatcaaagtgcacactcctgattatcagtaaccatgtatgtgcacacttgctggctcaggatagaggccaccagccaacccaagttcctcacaggtatttccagactagctcccaacatgtcctacagcatctctgatcactgctcttcccatcgtatcagatacctcgagacacaaaccagaggattaaaacaatgagccatttttcctgggttcataatgagagtatcttttgtaagtggaataattcaacagtaatcttcagtcctctcttctcctacaatgtggtggagattatagaagagtaaaagcagctttctttttctcctcggggtaatggaagtactgggctaatctttgccacgctgatcagtggccctcagctgcgcattgcaatcaccggggagcttttagaaatactgaagcttgggccctgtttaatcggagtctctggttgagggacaggaaatgtgttttggtttatttgtttgttttggtggtggttttgtttttaagtcttaacc

SEQ ID NO: 38873 - DNA, 1572 bp, Homo sapiens
gacttatctgttctcgccctcagatgtgcaagtctgcagcctttgtaaatataactttgtggccagtaatgttactactattatttggtttaacattcgtcacaagtgaatattattatttatagaattgtaagtctctgtatagtgagcttataatctaaaccagagagagagctgatgatcacagttatctgagttgaaaagtgggttctctcaggtttctctgaatgtgttcagtctgtttggatttcatgtcatatgtgactggcctcctagcatatttattctggcagtgaaaggggtagggtgtgtgaaagaaatctcttggagaagttttcactgaaaacttggtgttacacatctaagtctcttcttgagcccttccaggaaggaaaacaaatctcagaaaatgtgaggcttgttgcttgtccatatttctcctctaagatgatttcagagtttctcagaattgttaaaaaatgttttcttctgttttagatctctctcccacccctcatatccgcaggtttatatctactcttccagttacccacaacccttatcctgctttgttcagtctttcctagactttttggtattaaactccctttgagacaaagtgtctggactgttgctcactaatttttttttcagagcaattttctcaatataaattacactctcaattacttttatcttcctagagcagtgaatcacattctaaaaagccattagggtgggggcagctggatgcagagctgagaggttcgagccagtgccagcttgtcaacctcactctttgtttaccctgctgcagcaggccaaagtgcaacctttgtgctgaagtcaccagccaaagaagtaccttcagtgcccatttctgctacacttgtgtgcttggggtacctatgtgatggggaggccatgttttagagaatgggcttgtgcttggaggcaagaaaaaaaaatagctgaatgcaggatggcttgatatttgaaggctgtgggagttcgctttagcgcctccactcttcatccctcctgatatccataccctctgccatgggactttgcagttccttccatcaagagatgggtatattccctacacgtcgattctgaccatgacagctgctttggccaataggatgttacagatgtgacacaagcagagacttgaaaatgttcttgtgtgattggactcgctccctcgcctctctgctatttccatgagaagagtaggccagggtgccagggctagcccgctggtcccagcaggaggatgagagatatgtcgggcagagctgctccaaggaagctgccccaggctcagctctgcctggaacagagcagcccagctgacccagaggtacataagcaaacccagccaggatttgcaggtctgcgtagcaaggcttccaatgaacagcagatgcaggagctggagtaggaagtgattgttgttttaagtctctcaatttttaggtggtttgctatccagcaatagcaatgaggtcatgctctctgagacttacgatgattacctgagcaactagaaacaaaagcactttg

SEQ ID NO: 38874 - DNA, 1139 bp, Homo sapiens
actggggaactggaaataaagatattgagagagaaaaccgggagagatgggaagttgctgtttgcagagtttcatgaattgcttatctctacatccccaaaccttagtcctcagcatttctcattgtcacttctaataacacatttccttattttattatgggactgctttatacatgttgctgaatggaagctccctgaagtgcctggatgttaggtggcttgtccaagctcccttggttagtagtgggccgggactagaatccaagcttactttccagattacatagaaggaggtgcagaagaccggaatctcctcccccttccccccctccccccacccccccccaccccgccacagctcaactgtgagctggaggctgaacaaagacagaacttcctggatctagatgagtcactggtttgttcttccctagccacctccagaaagccatgctgaacatgccattttcctcacttggactcagtggtggggagcctgaccacgtcttctcacctccaagacggggcaaggagttggctaatggcccagcttcattcctggggcatctacctttgaaaatgtgtgctcctacttggagctctttagcatgactgctctctttacacatgaggggactggggtcctgaatgattgactcaccaaagacaaagtcagtcccaggagaagcgagagctggctgaggtcttacaaatccaagttcctggtatctcctactctaaaatgctgccgcctcccattccagcttatattttcccccaaactctctttgcctccattttgtccaggcagtgaatcttgaggtactgagtgacaggaagaatgtggaaaacagtcagctttaatccagccattctgctcctagacattcacccaagagaggaaaaacacctatcttcaaaaagacttagacatgttttttttttttgtttttttttttttttttttttttgctgtgtttgttttttagagacagagtcttgctctgtcgctcaggctggagtgtgcagtggtgcgatctcagctcacggcaacctctgcctcctgggttcaagcaattcttctgtttcagcctcctgagtagctgggattacaagcgtgtgccaccatgcccggca

SEQ ID NO: 38875 - DNA, 1182 bp, Homo sapiens
tgcatttgcctataatttggcccataactcctcagggtggataccattttatcctcattatacattatgaggaaactgaggcacagagaacattagtaacttgcccaagctcccactgatgggcagtgggggcctagaattcagagtctgacaggcacaaaggatgtagtgccacttgatcctgcctcttttatttacttgctctgcagacaagatttggcttgtctccaaagccaaatgagttctccagtccctggcttaaactcccaggaatgagactgccaggagggagtcacaggctatttggggaagatgggtgccgagcgctcagcctcaacctgttggctggcctgggaccccactaactccggccccgttcttgggacatatttcagtcctctgagctcagggggcttgagtagctctgcccaggcagggcttgtccaagtgtccccagatgctggaggggttaacagttgagaagctgtttgcagaccattagaaacaataatcaccttacctgtaacctgatctacctcaaaagaagggtcttgattttagcaaacagtgtaagtggcctctgtgtaaagtggaggggtggagccggctgcctgactgcttagctcttgtttctcaagccaggcccaagggtcaattcctgggcctacagggtgagctcacacccttttctggctgctttctccccttggaattctgaaaacggctgccctgtgtgcagtgagttgctacaagccccacatggctgctctcctggcccagccagggggagcaagtaactttctgtttgaggtcctcttgaccaagaacagtcacgaactctttcctgtgcactcaagggcacactcttctttaatcctcgcctctaagcatgattgcttgctgtgctttccaattcacaggtgagaaagaacagacttagagacagcagtgtgaggaagccagagctggttgttaaacttcaagaatttagtggccgggcatggtggctgaagcctgtaatcccagcactttggggggccgaggcgggcagatcacgaggtcgggagatcgagaccatcctggctaacacggtgacaccctgtctctactaaaaatacaaaaaattagctgggcatggtggcgggagcctgtagtcccagcctcagctactcgggaggctga

SEQ ID NO: 38876 - DNA, 1004 bp, Homo sapiens
ggtcaggagatcaagaccatcctggctaacacggtgaaaccccgtctctactaaaaatacaaaaaatcagccgggcatggtggcgggcgcctgtagtcccagctactggggaggctgaggcaggagaatggcgtgaacctgggaggcggagcttgcagtgagccgagatcgcgccactgcactccagcctgggcgacacagcgagactccgtctcaaaaaaaaaaaaaaaaaaaagaattgacaaatgtacagatcagggcttgcatttctttccaagctcctactgatgggcagagtgctggttgttaaacattgaccagtaccctagtgcttagagaggtcaactaacttgacaaggtcacagggctcatggtggagccaagcagacagctggactccagaacacttattgctgtgctattgtatctcttcaaaaataataaagaataacttcgggccgggcgtgggggatcatgcctgtaatcccagcactttgggaggctgaggcgggcagatcgcctgaggtcaggagttacagaccagcatggccaacatagtgaaactccatctctactaaaaatacaaaaattacctgggggtggcggcagcacctgtaatcccaggtactcggaggctgaggcaggagaatcgcttgaacccgggaggcggaggttgcaatgagccgagatcgcaccattgcactctagcctgggcgacaacagtgagacttcgtctcaaaaaaaaaaaaaaaaaaaaaaaaagaatatcttcaaaaatcaatttctaggaaatagtagacttgaaggagggctaatggttaaataatggttaaagattaagagacttaaaggcataccattccatcacagtagtcgtactttcttctgattaaaataaagtgtaaaaaaattatgtaattgatgaagcatttgcaaatgtgagcactcattagatgattattggtatgaatgaattattatttttcagtgtattatcttttttt

SEQ ID NO: 38877 - DNA, 1289 bp, Homo sapiens
caacaagctccccccagctgattctgatacacactcaagcttgagaaacactggtttagatgaaacaagattcaccatgagttgatagttgttgaggctggtgacaggtacatggggtggggagttcacatgtgtttttgaaattttctataataaaaagttaaaagaaatgattaagcacattggaagggaggagtgtacatataatgggggaagggtcattgctggaggacctctggatatagagtgagacaaaacagattcttgtgcatgcatctgtgttgccttttgaattaaacatccaggataatggttgcattagctcctgcctttaacaggaagctctgctcccccaccccgccccccaccaaccccagttcctcaggtttctcttcatttggagcctaagttttaacaggattagatcctggagcctcaaatctcttagagaagcagcgatttgaattttcagcttccacctgaaactgtgtcactgtaaaatatgccacccactagacctgctttatcagctgcagacatgatgcaattaactaattttctgcaacctctcaccacacaagccgtggaacttctagtccattgtgtggctcgtttacttagcagatagggtctaagagcctgtaactatttacctccctctagaggggctgtcccagacaggtgaattcattagttggtgtttgtaaagcagcaggaaaaccaaaaaagcattaggcaagtttttatttttatttctttatttggcctgaacgccactcaagcgatgtcctgtcctgtcctgcgttgtcagtttgcctcccttcatatccaccccctcttctctctagcccatttttctcttattcagaaatgagagatgcccacaactggaaaactcttcccattttgtcccagaggatgcaaagttctgcctgcccatcacatgggatcagcgatctttaggttttttcatttaaatgccaaggcatctctgcttcctgtttcaggtgtccttctgccccatctttgagcagtggtcttttctttcttttcttctttccccacttccattttctctcctctctcttttttttttgagacaaagtctcgctctgttgcccaggatggagtgcaatggcaccatctcggctcattgcaacctccacctcctgggttcaagtgattctcctgcctcagcctcctgagtaactggggttacaggcaggcaccaaaacgctaggctaatttttgtatttttagtagagacagggcttcaccatgttggccag

SEQ ID NO: 38878 - DNA, 822 bp, Homo sapiens
tttgagacggagcttcactcttgttgcccaggctggagttcaatggcgcaatctcgtctcactgcaacctccaccttccaggttcaagcaattctcctgcctcagcctcccaagtagctgggattacaggcatgtaccacacccctggctaattttttgtatttttagtagagacagtgtttcaccattttggccaggctggtttcgaactcttgacctcaggtgacccacccgcctcagcctcccaaagtgctgagattacaggcatgagccactgagccccagctcccttgtatttttcatagaaaaggcacaaggaagaagttcaatgatgagaaggaagaaagaatattcctcaagtgtaattaaaggtaggaaaaatgacagttcttttggaatccaagtttgaaaatatttctttttaatgtggtaggataaaacaaagcataacagtaaattgaccgtttaaccattgttaggtgatagttcagtggctaagtacattcacactgctgtgcaaccgtcgtcatcagcacttccagaacgttttcgtcatcccatactgaactctgtactcattaaacgtggaatccccatttcccctccccacccctggcaatcaccactcactttctattacatctctgtgaatttgactactctaggtacctcatataactggaaacctacagtatttgtttttttgtgtctagcttagtttagcataatgtcttcaaggttcattcctattgtagcatatgtccaaatttcattcctttttaaggctgaataatatatatatattataattatatatgatgt

SEQ ID NO: 38879 - DNA, 2178 bp, Homo sapiens
acgtgatctcggctcactgcagcctctgcttcctggattcaagctattctcctgcctcagcctcccaagtagctgggattacagatgtgcaccaagaggaccggctatttttttttttaatttttttttaatttttttttttagtagagatggggtttcgccatgttggcaaggctggtcccgagctcctgacctcaagtgatccatcctcctcggcctcccaaagtgctgggattacaggcatgagccactgcactggcctgagaacagtttttatattttatttttacattgaagtcagtcagatttgcttcagcctcaaatattgtgtttatgtgaaattaaatgagtgctggcagtgagctgcactttttttttctaaatgggaaaagggttaataagggcttatgttcattcttgtattgctctctaaactttgttccttgtcacagaagaaaaatagtcaccccttttgaggccagagacctgggttacactttttttgtacacaacccttcctaaatagagcactagattcaactattgactgacaaagtacatttttagtggacactcagagcttctgtaagagtcagctaagaataattggtatgaacagctgttctcatagaagaggaaaaagagaaggacaaacccctcaaactcagttttatgattccggaacgaatgaaagtgtgctgtgtatccgtttttatttatttatttatttacttacttatttatgagactggggtcaaggtcccaccagcactcaggctggagggcagtggcatgatcacagctaactgcagcctcaacttattgggctccagtgatcttcctgtctcaacctcccggctagctgggactacaggtgcatgccacaatgcatgactcattttaaaatttttattatgtagagtcagaggtcttgctttcttgcccaggctagtctggaactcctggcctcaagagactcttctgtcttggcctctcaaagttctgggattataggcaagagccaccatgcctggcctgtatctgtttttaaatgcagccagcagagctttaaggggaaccctaccccgctttgcccaacacacactttcagctatcatttctgtcattctcatcctaacttctggggtgtagctagttttctagcacctcctttgaaaactgggggtgccttagggaatctggaggccatggtggtgggagtggtggcaggaagatgaggggaaggaccaacattttccttggaggcctgaaaattgttttatgcatttttttttttttttgagagggaggcttgctctgtcacccaggctagagtgcagtggcacaatctcggctcattacaacctctgcctcttggattcgagcgattcttctgcctcagcctcccaagtagctgggactacatgcatgcaccaccatgcctggctaagttttttttttcagtagagactgggtttcgccatgttggccaggctggtctagaactcctgagctcacgtgatccacccgcctaggcctcccaaagcgctgggattacaggcatgagccaccctgtgcccagcctattttatccttttaatgatcataatttaaaatagcatatagaattataattcaaatcctgtaggggttttctcttttttcaactttgtgaatcattttgttttattttctttttctgaccacattttcttttttgtgtgagtgattaaaaaaaattttttttatttccataggtttttagggaacaggtggtattttgttacataagtaagttctttagtggtgatttgtgagattttggtgcacccatcaccagagcagtatacactgaacccaatttgtggtcttttatccctcccttcccacctgcttcccaccctttcaccccaagtccccaaagtccattgtgaggctgatgggggacttgctttctgtgatttgcttgcagatttttggccatagagatttgttgtgatttctaagccagctgctctcatctgtgaaattgtccccaggcaatcttctgttacctgtgtaagttacagaagtcctcattgaaagaagcaatgcaccttgaaaatggaatccttgccaggtgcggtggctcatgcctgtaatcccagcactttgggaggctgaggtgggcggatcacc

SEQ ID NO: 38880 - DNA, 2744 bp, Homo sapiens
gtgttagaggaatgtggagcaggaatgagaatggcaagaccagccaccacatttgcagggcctgtgcaaaatgcaaacgtggagacccttttgctcaaaaattattcagaatttcaagatggagacaggtgagcattaaatccagtgagcacacaggttgtgtgctcatgaaccaagctatcctggtggcaggagatgaagttaaagagaaaggtaggcccatattatcaaaggctttcccattcatgctctggagcttgggctgtgtcctgaaggtggcagagccataagagattcttaacctggggtaaggcaagatcgggcttgcatttttacaaagactgtgttgggggcagcacggaagaagctggcaggaaggctggctcagaagtgattggaatggtctggagagagaggatgagaacaggaggatgtcccactctccatgggacagagaggcgctggggctctgagagctatgtaggtggtgaacttgatgccaggccccagcttggagagtgtacgtgcagccagctgcctcctgttgagatttcttgtgcctcctttgcaagctctggagtctttgggttcccattacccacacaggacaaaggccaatggtgcagggacagtgggaagggctgatgccacacttgccacaaaccccttgccaggaactctttcaggaatccccttattctgttttccaagaccctttggactttccaaaactctttggaaaacagagtaaatctaaggagagccaaagaatgccccctctcctctccagccctggaaatacagcatttagaggaagctaaatcattgtcgcttcaataacccctcccctggatttgcatttcctgacttggatatttgtgacattccaggggtcattatcagaaggtttcacttttcatttcctggtggaatcaggacgtgccccttttgcggggagtggtggtggtgagggagccggtgtgcaatgaggtgtctgccaagagcacagggcaattccacaacacagcagagaggggtgaaaaggaagtgaacgtgccctcctccactaccagacaaaaagggaaaccggtgtgtattcagtgccaggactcctcccttttgataaaatctctctcctaatcctcattacaatgcctgaaggtgtgcataacgagccttttacacatgaacgcactcaggctctcccaggactggagctacctgcccattgtcacttgttgacgggatgtggattagaactctggtcttctcatttccggatggctgccccatccccagctgcccctcccagctggagtcagtgcctaggaacaaccatgggtcatcctgggtacaaaattagccaggcgtggtggcacatgcctgtaatctcagctactcgggaggctgaggcaggagaattgcttgaaaccgggaggcggagtttgcggtgagccgagatctcaccattgcactccagtctgggcaacaagagcaaaactctgtctcaaaaaaaaaggaagaggtgcaatagtgagacagaccatcttgggtaaattccgactgtcttgtttctaagatgagggagactttatttgaaccttgcaaggagcggacgtctccattagcttatttgttttgttttgttttttgagatggagtctcactttgttgcccaggctggagtgcagtggcgtgagtggcagtggagtgcagtggtggctcgctgcaacctccgcctcctgggttcaagcaattctcctgccttagcctactgagtagctgggattacaggcacgcgccaccacgcccagctaatttttaacttcttagtagagtcggggtttcaccatgttggccgggctgctcttgaactcctgacctcaggtgatctgcctgcctcggcctcccaaagtgctgggattacaagtgtgagtcaccgtgcccagctccattagcttatttgtaaaaaagaaatgaagaagtaaaagctaggagtctggtctgacccagagagagggaaaggggaggcatagttaacgcatttgagggaaaataagaaacacaagcaacagagtgaagcaggtataagttgtgaatgggctgcactgggctaggttgttggaagaaatttttaaagaaaaatgtatgaatatgcttgtaagtctgagttggtgaggtaattctggactttctagaaatgtggggatatggtgggggcaagtgggagagggagaatgaacttggccatttatgagatcagcctgacttcagggtggctcccttgcccacagatcgttccctgtaccttgagctctaacaagcaggggccacatctgattgttgtagggatcttgggggaggaagagagaggggagaacattgggagagaagtcgtgttttccagcagaagggatatctgtgcagatgctcggaggagaaggctgctttctcaggtcaatcgctcatttaaactgggatcttaattttacggataggaaaagatctcctagacataaaagttttgctgacagaaaaagtctactacccatgggctctggatgaaaggcctgggcctctgcgggtatcttccgggctgcaaaaagggctaggctgctcgaaaagtacttgaaacaaataaaacagtgactctaaaacacacccatatgtcacattcttagagaaaagaccttctgtaattagttacaagctttagagaataaaatccaatttacctgtcaaag

SEQ ID NO: 38881 - DNA, 1983 bp, Homo sapiens
acaccaccaagcccggctaatttttgtatttttggtagagacagggtgtcaccatgttggccaggctggtcttcaactcctgacctcaggtgatccacctgccttggcctcccaaagtgctaggattacaggcatgagccacctcgcctggtgtgattttctgttttaaaaaccaccatccagagtgtgaggttcacattcattggattggcctcaactgggagcggactctcacatgcatttgaggaccaatcacaggataactgggaggaatgaaaaaatgaatgggagcatacagagctctccttttaggccagcttagttgcctgcagctgcgacctggacacttctattcactaatgctctctggcaatgagatatactgataaatacatgctaatcacaccctggaagaaaataaaaggggtgtaaaggtaaggctttatgcaaacaattgcagtccatgagcagcaagttccaaagtgctgtgacttttaggaagaagagaagcaacagctgttaactgcagggcagctaccgcggttcttccttccaattcctcttggcactgttcccactgtggaccatcaatacagcaaacaaatgtttatttcaaggcaacttgcttcgtttaagctagtggttcttcacctccagaatgcatcgggtcacccagggagcttttaaaaaatacaaatactcaagccccatccggagagattctgagtcaattgtctgtgatgaggcccggagattttgcttttatttctgtgtttcgaatgcaggaaccatggatttaaaccatcatgttgagccgtcatcaaagaacaggacatgggaaacaattaagggagattcaatcatcctcatctcctgaggataagagatgaacaaaatagtgtctctttccacggttctgacacatttttgcctatcttctctttgatgtcagaacttcctggagttatccagccttgccagtttcctacaactgggggaaagctaacctgtcctgtgtgattcatctgattatgaatccaggctctgactacatcgtatgtctagtttggttcagtgaaacattaacccgtttctctttatcgtggattgtggcaggtttcgtgtgacgacgaagtccagttatttcttggacagagtgggtgtgagcccaggccgatttcctgagggtggagtgggaggggccaggcataaacttgtttaggtgtgtcttagggtgtaaggctcagggttcatcttggtaaatgttttaccagaagaaccttttctagtctcttttccatgtcttcctttgggaaagtgagtttaaatcgagccttctaaaggttccaagtggatagttgttgtacccctggccttttgagtgggtgagggtcagcccaggcatgaggccctgcagatatttctgatcatttctcaactcccagagagctgccgttttgaggaggaagtttttctttactctccactctttgctccttctttgctcccaaaatatggtccctgaaggaaggaccaacacttttgcctagctggccacctggcacttggccatctaatttggagagtgcaggaatggtgaaatggaatcagggccagaaggcttggggaaaagctttggtgggagaacatccatgcatgagctttggcagctttgtcttggaactgaaagcaatcatgcttagattcagcaaataaggcccatgacactacacctgcatctttttaaaagttacactacatttttcatgagcatggaaagggctgatgagaatattgtaggttgatgaattgttttaaaagtctatctgtaagatacttgagataatttaaaagtggttcttttttttttttttttttttttttgagacagagtcgtgctctgtcgcccaggctggagtgcagtggcacgatctcagctcactgcagcctccgcctccaaggttcaagcaattctccctgcct

SEQ ID NO: 38882 - DNA, 2121 bp, Homo sapiens
tacatactcttcttccaaaggggtctaactggctagttaggaggccgctctggggctgatggattgttgattggtgaatccctggccttcgggtcggctggagtcaggtgttctggtaggacagctcgaacatggtgcaagcctcctctagactctcgtccatgttcagtctctgccagaaagacttctgcttcttctgcagctctcggcgaacacacctcgggcaggggacagacttttctttgcattcagaatggaaaacggctccacagctttcacacctgcaaaagtcaaccatggatatgatgagcaagactgaagccagcaagacacaaatgggaagccctgtggcctcaggtgcagctggtggcacaatctactgttctggacaaccctgccaatgggaagggagatgactcactgaaatgaactgtttgtttttccaaaatgctcaaggttgaatttcacttgaaaaacatttttgcttttctgatctgaactagggcttatgagtgggggggagtccgcagtcacccagcaattctggttatagtgacaatggacagaacaccagaagctctccattgagaagggaattggcagtgactctagagtgaaatgacagaaaatgagaggggagtgcctcgtgaaaacgctcggcacaccagtgacagccacagcgttacatccatggcgaggcagctttctacatcagttaacacgagctaagtggttctctgttaactagctgcctttatttgacagtttgaaaagataaaatgacacattttcattttctgaatgacatcctgtggtctatgaaatcttgtgagttttttaaaaattaggaaaaaactcctacctttgtaagtctacctttataacatgagcgtgaacattaaagcaggagacagtggggaagaaaacatttttcaaacaatatgacagatattgtaatatgtagagagcaaacattccaggtggatgactcatttgttgtttggcttggtggaagcctgcacgggagtctaaataacttgtttttacagcgaagtttttatttatttatttttttggagatagggtctcactctgtcacccaggctgaagtgcagtggtgtgacctcggctcactgcaccctctgcctcctcctgggctcaagtgatcctcccacctcagcctcccgagtagttgggactacaggcacccaccaccacacctggctaatttttgtatttttagtagagacggggttttgccatgttggccaggcaggtctggaactcttgacctcaggtgatccacccgcctcggcttcccaaagtgctaggattacaggtgtgagccactgcatttggtctgcaaagcttttaataatgagtaactgacaagctcaaatacagctgctccagtgagtggtttgccgatatggactgagttttcatccttccacgagggtaacaggcaacttttaccaagtcctaggagcccagggaattgcacctgtgtaattttgttcagcctgcagcattcagggagggtccagaactgactgggttcgaagagggttgcgaaggaaccagtcccgagggctcagcctcaggcttcttttgctttttcacagcgtcttgagtttcagtgccaggtgcaggatggtcttgggggcattatctcctagtctgccactgacttaccccaccaccattcaggacccagagggcttagtgaaaggaagatcttcctacccaccctcataccttggagaggaggcagtgacttggatggagacacactgttgcggggtggggggttggaagggggagaaagagaaagtgtgtgtgtatgtgggtgtgtgcgtgcacacctattccagcagaggcacaggaagacaagacttcctgcacccagcagctctacccccagcttggctctctgggtcaagtgaaacatacaggtggtgaggccagccagcaaggagcttcacatcaattcctggctgtgtgactgctatgaactgaactgtgtccccgttagtcatatgttaaaccccttacccacaatgtgactatatttggagataccatgcttaggaggtaatcaagattaaatgaggtaggccg

SEQ ID NO: 38883 - DNA, 761 bp, Homo sapiens
aggagatcaagaccagcctggccaacatggtgaaaccctgtctctactaaaaacacaaaaattagccaggcgtggtggcgtgtgcctgtaatcccagctacctgtgaggctaaggcacgagaatcgctgaaacccaggagacagaggctgcagtcagctgatattgtaccattgcactccagcctgggtgacagagcaagacaccatctcaaaaaaaaaaaaaaaaaaaaaagattcattggcccccctgagtactcactgagtttcttgactgtatttaaaatatgatttagcacatacaacttttcaggaacacatctttcttataaggcaaatctaccaatgtaatcatctctgctgaaaattgcaacaggtaatgaaagagaaatgtccctttggtgttcctgtgtgatacatgaaatgaaagctggtgtcttcattctgagtcatccagtccagtgataagcagtttcactgcttgttggatgttgctgtacatcacagaaaacaaagactaacgtcctccctttgcagtgtctgcaactgcagggagacatttgctactgaccaaagtcatccaatgggtttttctgtttttttttttcttgaaaacattcattgcttcatgttttctcatacctagggatctcaaccttggccctactgacattttgagttataatcctttgatgtgagggggtgtcctgtgcatcataggatgtgtagcagcatccctggcctctctcggctagatgccaata

SEQ ID NO: 38884 - DNA, 532 bp, Homo sapiens
cacgatgctcttattgtagttattgaaactaggaaaatgaacctgctgcaaactagcagaactaagtatgtgcagggggaaaaggtttgcttctcaaatattatggcaaagaggcaagaattcctggctgcagagtttcctgttctggaatgctgatgatgtgagaccaattagagacaggcccaatggctttgtctgcacccttccagattctagctgcacacagggaggtcacaggaaactgctaaaggccgctgccccgagttgaggtcactgaaatgcttctgctgtgttcatgttgggttcttctcctgctgcatttttatttttggctcaggcaatggcctcagatatttcacttggattgaaattcaggcttcagtttggttgcatctctgacaagcaaaaggacaggcctgcagagcagggcagagccttggctggtttccactctgcagagcccacaacgaatggggtggggctcagaaataagtgcacgttatcaggcatgtgagtgcggctttgcgtatgg

SEQ ID NO: 38885 - DNA, 5532 bp, Homo sapiens
tgatcccaactacacatcaaccaccacaagtgagactagttaaaggtaggtggcagagtcctttgccccccaggttggtttgtgggttccccagatttcagggctactgctgtgacaacagggtagggcagaaagggtactgctctgggattcagcagcctggatcttccagtagctccaggtgtggtttggagggggattccggccttcaaggaggtgggagacatgggcagactattgctaagctccccctagctctacaaaggttcgatgctctagtataattttgtacagagggttaacatgggctgcacctttctctctattttaagtgctctgaaagcatcaggagctgaaatgataattattaatggtagctgtagatagttgtgaagatgtttcctgaggtagcattgttaagtggtttaaatattcagaattctgcaggggcttagtaaaagtgtgataatatacattagatacttaaaaaagattttttaaaagacaaatttaatgaggtattactatctgtactcctataattagttgtatgaaagaagtcttaaaaataacaaacatgtattgacaaaaccaagatactattgtaccctttgtaattctaaagcataaaacagttcatttcagaacatactgctcagtctgaaaagtcaacacattttgtttggaaaggtaaatactccttctcttccctattgtgtgttcaggttacttatttacagtcccatggggaagaaaaagcacatgctaaaaaccgacctaaaagatgttttgaaaatgaaattacctgagtagcttagcaaagctcacattttttacatcatctctctcctgacattaaagtctccactgacccagtaaaacacatccatctccaacatatgataaggatgtaagccatcactcaataaagtcacatatctcggtaatgcctacttaaataatgaatttcctgaaatcactttaaaagccatttaaaagaaaatatgttaataactacagattatagttgaaattacagaataaagcaaactctctattcattcatgaattatttatggagcagttactaagtgttgtcttagatggagcagtgagcaaaatataaaaagtctattccctcatggagcttacattatttcaaaacggtggactgaactgcaatttggatttgtatctaaatccctttgggtaaacagaataaaaatcagccaactttacggaaaacatcatgacaaactatcaaacacaaatacaaaatgctgagcaatggagcagaagcaaagatcttactccttttgtcaataaaagcttaaaacagtgccatatgcctggtatgaaggtccagcagagtggtggcttgtcaaaggtcacacaaattagtagctaggaacgacatcgagacttctttgttcctagtccagtgatctttttgttttttgtttttgagatggggtcttgctctgtcgcccaggctggagtgcagtggtgcaatctcagctcactgcaacttccgcctcctgggtttaagcagttctctgcctcagcctctcaagtagctgggattacaggcgcccgccaccacacccggctaatttttgtatttttagtagagatggggtttcaccatattggccaggctggtcttgaactcctgacctcatgatccaccaggcttggcctcccaaagtgctgggattacaggcgtgaaccactgcgcctggcccagtgatctttttatggactggcctgcctgtgtttattcgatggatcttaatgattttagagccaattaaaatttttttcctccagcctgggcaacatggtgaaaccccatctctacaaaaaaaaatacaaaaattatctgggcgtggtggagagcacctgtagtcccagctactcggcaggctgaggtgagaggatcgtttgagcctgggaggcagaggttgcagaaagccaagatggtgccactgcactccagcctggatgacagagccagatcctgtctcaaaaaaaaaaaaattttttttttctttaaaagtacccattaatataagtttatagattaaatgtgactatttttctggttctgatacaatgtgataaaaaatgctggatataaaattatatattcaatatgattctaactatttaaaaatacatatgtgtagaaaaatggagaaataatggagaatattttctttaattttctgtacttttcaaattttctataataaatatcaattagttttatagttagaaagttaaaatgagttaaacgatgaacaattcctctttaaacagcaaaaaattaagctgtctgaaatgcttaaagctaagatgatcaatacaatattaaccagatacctaactagaagcttggtaagaaatgtgtctaggtgacagccatctattcaagtgaccaaatggcctcaaaacacaatggtggcttcagcagctaggactgtgtttataaatgcaccatatttatcaagtggcttaatggcataaagggtcaggtcagccctgaggttttcacagaagtctcagttatgttagcagacattctgaaacattttgacatgtgaatacagaagccaccaggccaaggtgaaatgttatttaccaagttactctttgactaaagtttaaaatccagaaaaactagcattgtgctgaagagttttcattaaagaaaactgtcattgacacaataaacacatttaagagtgggcagtcagagctgaagaagggtcaaattccatctggggagtcatcaccctgcctctgccatgcacacgacatgtgagctgtctgggcttcaagtttcccacccccaaaatgtctaaagggtccccacagtcccttctatctctattagtttataattctaaaacacaagcgagagtctggtcctccaccattggtattagagaaccactgagaaagttcctcaaaatgttcctcttcaacaccagagaaagaaaagaacgattagaaacaaacagctcctctgaaaaggtactctacagaggagcagaagtttcctttagctgcttctaggatcccacacctcactgcaatactcactgagtggctgcttcccaagaaaagccacagaaaggaaatatcattaaaaaatggcatatacattgggggaagctactccctccctgaagaccggcctagccaaggctgttgttctctattgttgaacaggatgtaacaagactgccaagcgcagcccacaaacctgctaattaggtgccctgacagtgtttgttttggaaccatttaccaacaaaggaatgtgtcaggctgattagggagaaaagggtatgtaatgtatgtgtatttgagtccagatgagggcataatccaggtatttagtctgtttgtgcaaggactcacaaaaacaaaggccgagcaaataggaagccacggggaaagcccagcttctgggcagtgcttctctccccttctcctctggagttttgttccacctgcctccatccccaccccttccccaccaaaaaattttgcctaaacacttaacatgaaagtctctttcaaaaagtgacaaactacagctggttcctcagaaaaatgaaagagtctttgtaaggttactgacacatctggggcttgatggtttttttggcaggtaagtaagtgacaactttaggcaaaatcatctccacattcagcctccatggagccttctccatgcactgtgcccaggggcaaatctaagggcaacagggcaacagaaaacacagctcttgatggactgattgttcaagctgtgctgagaacaattaggcatctcagcaccatctatgggaagaagtagttccacattttataataaagcaggttccttctttttaaacaagcctttatatggtttgagtacaattaggcatttgaagcttcatgtgtacatgaggcttaaagaagggaagaaagtgccaaggcaaagaacaaagtccatgccccaacaagtttaggtcctcaggagcagggtggtatggattgcagtgaaacgcaaaatgacaaagaccaattcaaaacgttgagcgtgttgggaggagtctccatgttcttcaggacaagctggacatttctgaagtccggccagatggatgaaagcaatggggcttggactaagtttcatgggaggctgccttttttggtaagattacctgacaaaatagattttaaaaatgaaaaagcggataaaccctgttagaagctcatctgctatgcacttttccatgaggctgatgtttgttctcaagactgatgtagaaaatattctttaaatgtgtgcagactggctgggcgtggtggctcatgcctgtaatcttggcacttttggaggccgaggcgggcggatcactggaggccaggagttcgagaccagcctggccaacatggcgaaaccccatctgtactaaaaatacaaaaactagccgggcatggtggtgcacacttgtaatcccagctactcagggggctaaagctggagaatcgcttgaacccgggaggtggaggttgcagtgagccgagatcctgccactgcactccagcctgggccacagagcgagactgtctcaaaaaaaaaaagtgtacagactagatgtagtagcagagtatgctaactcaagtggtaagcaggtaagattttggtgttaataagttcaatgccctgtgtgccaccattatttcttagaagaggggatggagtggtcaactacttgtgcacaaagaaaaactggcaagcaatgtccagcctacacctctgaattccagtgctttaaaaaacaaccctttttagaagagtaaccacagagctgccgatgccctactaacaaaggaagaacacctcctctgatgccttccctggtgttagtgaatgttgctgaccagggcaggcttatgctgtcatcagtgaaacaccttaaatggtatgtcaattgcttcaaccttatatagaaagctttagtgttacctcagacttgtgttatgctcctctatctttggaggtgttttatattcccttaactaattagtttatttaaaaaatgttgtcagtgttcttatgaatgcatatatacttaggcaagcttaaaccaaacagtaagtatttatgtaacgcttagtccatttcgtgttggtaaaacagaatacctgagacagggaaacatttttttaaaagtttatttggctcctgattctggaggctgggaggtctaggaaacatggcactggcatctgctcagcttttggtgatgcctcgagctgcgtcacaaatggcagggaagtggaaggggaagcaagcatgtggaaaaggaccaaacacaggaggcaactcgctttctagcaaccccctatcaccaaactaacccaatccctccagaactcatccattcctgtcagaaggagattaatccattttaacgacctcatcacctcttaaaggcaccacctccctacacctctacgctgggg

SEQ ID NO: 38886 - DNA, 585 bp, Homo sapiens
tttctagtattatatctcttgtttatgtttcatttcttgttgcatcacccagggctcctaaaacagtattaataatggtactagtggttatttttattatttcagtaagaatcaaactggaacttatggagtttatagtgaatgactcattttctccattaaatacgtatatcccgtcattcaccacatttcatttattccccctcttttaaaataactgctatactgagatataattcacataccatgtgattcacctatttaaagtctacaattcaatggttcttagtttattcagagttgtgaaacatcaccacaatcgattttagggcattccactaaccctctgaaaaaactctatatccattagtagtcacttctgttttccctctgccatgcccctgcaagcccaaggaaccaataatttactttctgtccagatgcagtggctcatgcctgtaatcccagcactttgggaggtcgaagcgggcagatcacctgaggtcaggagttcatgaccagcctggccaacatggtgaaaccccatctctactaaaaatacaaaaaaattagccgggcatggtg

SEQ ID NO: 38887 - DNA, 4431 bp, Homo sapiens
ctaggaacagaatccggccatcctagcatctggtccagaggtttcatcactatgaagaagtgggctccaggtgtgatttctcctagggttctttttgaaaaagcatacatacatagacacacacacacacaaaattatataaatcattttatatataatacatacataaatgcatacatacacacatagacatatacatttatgtttataaatatattatttatttattttggatacgtgctcaaaaataaatcaattgtctttcctcccaccatcccaagagccttaactttcactcccacttcctagccatctcggtaggggcttaaggggccatattatacaaatactaggaaggcagagtggcctcaaatattagaccaaagccagaggagcatactaccttcaggttccaaccaagaatgaagaatagaaaagagctgccagaatgccactgggccattggatctgaaaatgactatgggtgagacaaagtcaaatgaggcatcctggccaacaagtacacaacagtgagaaaagtcagacatttgaactctgctatgtcaaccctaaactgctgtgacttgctagagtgaccacagtcctcaacagggctcagcgtggggaaaagtcctagaaacagtgtgctctggctagagttgatgcaggggaatctactatcactgagatcaagccaggaccaactaggacaaaataaacttcaaaatgacttccttaactggtcaaagcttattattattttttttttttaaatctaaacatggtagagtttttgcttctcagaaactggggtattttccaatggatagtggtggactcattagggagtctcccagaggggctggccttcgggagctttccataccccatcataactcagttgtctctgggtattgggaagtagtggggtagagtggaaaaagcaaggctgatctgaggacaaattctagctcatctactttccagctgtgagactttggcaagctacttaacctctttgagtctcagtttccttaactgaaaaattaggacagtatccactttgcagggttgagagaaggatcagatttaatacattgaaagcatcgaatatagtttctgacttacagcaagggatcaataaataatagctaattagcttatcccaatctaaatagagattttctatgatttagactcattcctccttttaaacacttgagatttacatcaaggggaaggaaaaaagctatgaaggccacatgtcattttttttttaaaggaagacatcaagttgttcatctgtttggatgggatcagtagaaattaatgtaaagcagtcacatccatttcttctgatattatctgtttggatgggatcagtagaaattaatgtaaagcagtcacatccatttcttctggtattgctgtaaataagaaaacagggcttgtacaagcatacgtaattttgccaaggccaaaatgctagggggaagacatttaacatgcctcaaacttaatctgaatcacttacgtaagataacatcttagcaacacctggaaattgtgtcttactcctttcctacttgtacttaaattagtcataggctaatataactttataacaacccctcaaaaagtcaaaaggacacttcatctttagcattagaaggctggtagtttttagttaaaccaggcggtcatttggtaatatgactagtgatagtgaaacagacctgagatgaggtttagttatctctatttattccctcaaagggcatgtctacgtgaacaaaatcatgacagtgtaattagaaggaaacgtgtagctcttcccccatttccttgcttccctgcactcaacctcctttccctttctccatataccaaattgccctatctccttgagaaaaggcagatgtccaaaatagggtgaaagtttgtttctgttttccattaaacttaatgtcttgtactaaggaaggtactagtctgatttatttacttggggagtgtgtatatatgactatttcagaggtgttatactaactgggtattcaaagaatacacattttcatttgtaacaaaattaggtcactttattgccctgtaacacaaagacaaaatgtagcatcaagcttgtatcggcttccagattttgctatttttccacctttgcagtctgtctataaattcttttcaccatcattttaggtacttctagaactcaaggaactgccaaatatcactttccaccatccagtccctgacaaatatgtcaaatatgcttacccttcttgtgtgaaagaagcccatgaaatctgcctggttgaacttccagctcagggatacacacattttgcctccctcttctattctggtcaagatggtcagcattggaatttgaggcctatggctttcttgcagactaagacaacagactttatttgatttactttcttgcagaccaatcaaaaattacaattaagttaaaaaataacctagtgctgccttccccaaaccacagtttcagaaacagctgcttattactcatgtgtggcaccaggaaattgcagtgtcatgttcaaggtctgcagccaatagagatctgtgggattgggaaaagggcacaaatgattcttttatgttggttaccttcactccctcagcaccaccacaaaattcaaaatttatggggggcggagaagacagagaactagtaacctgggcaagaaaaaagagaggaaaaagctctttctcatcaaatttccttatgcattggctaattccttccctctgatttgtcaatttaccttccatttcaaaacaagcttccttagccattgtgtaacatctagatttggagcgactgtcgggaatgctttggtgaagagggctgctgcacttgacaaacaactccgtctctgaaagtctaaccaaaagacccaattcacagtgaacggtcacctgccactcactaggaacaggctggcttgacgaaatggaagaatcaacattgtcacacattgtgaaataatttcccatatagttcagttgcatttgcctggccagacaaccatgaaaggttgcattttgtttctagggtcatttctcagttcatttaataggtgggtagagtgaagtctagtggccttggccaggtgagttcatgggaagttaggaaaaaacagcctgtggattctgctcaagcttgaaaatcctaacacacctcacgagactattctgaatcctcaattttaaattttacttctcttactcatcaatccttaaaaatagaaaatgaaaagtaagctggatgtgggggctgatgcctgtaatcccagcactttcggaggccaaggtgggaggatcacttgagcctaggagttccagaccagcctggcaatgaagtgagatccctatctctgtaaaaaattaaaaaattagccgattgcagtggtatgcacctgtagtccaagctacttaggaggctgaggtgggaggatcccttgagcccaggaatttgaggctgcagtgaactacgagctatgattgggccactgtgctctagcctgggtgacagggcgagaccccatctcaaaataaataaatatcaccaaagtatatgggatattcctatttcaaaaagttgttcaaaactccattttcccataattaacctttgagctccttatcatggctcaatgctgggatgtttgtacataaacatagaagtgtctcttttctaattagctgctcctcaccctccccaatccattatgggactactctaacaagacttaaattttggctaatcaagcactttactgagggtggattgtgatgccaccaattagctcttatctgatcctctcccaaaggtgataatttctgcttagagctgggaaactatgtgatagtttaatctggtttaatgcaattgggtagatttatgagtggccaccatcactcctatcaaattacattttgctctctgctggaaactaggtcttagggaataaaagatttaaaaaatttcaatttcatttttctcagtggctagaatggcaaagatgaaaccgagaaggcacatttcttatccagaaaaatatatgggatggggtctacttcagacagcttttctgcactaagtgcctcaagggttgtggtttagttaaaccacaactccatggaacttaatgaagcatttgcaaagagtaagtacaagaatgtggtccaaatattctgagctcaaaacaggttatatgatctgatataggtacatgtgttttatttatgaggaaaataaactacagtattttaaattgagacaattccagaaaattctcatagatggtcagcagaattgtgcttctctgttgagttagttacatgtttgaaataaatctgatttaggtctctactattcct

SEQ ID NO: 38888 - DNA, 1290 bp, Homo sapiens
cctattccctgaaacatctattatggtaataagtaccatttattgctattaccatgtatgagttctgggtgctttctgtatttcattccaattctctctgtaacttccccaaatgagtattataatcattttgcagataagtaaactgagacatagaaagattaaagaacttgtttatggtcagagagctaatatgcatcaaaactggaatttgatctcaggcctgtctgattttaatgctagattctttctcctctatgcgaattcctctcaagtcacactctttcacatctggctcaaatgtcacctagtttctaaggcatttgtgactttgttcaccagtttgcgtcctcttgctctactgccatccatagttatgaacagatcacttgttaagaaagaagtgctcttgcttaatttctattctaggcctttccaagtgcattcaacctttgcattcaaaaagctaaactaagtatttctggaacattcctactgcaagctctggatccaaacatttaaattgcaactttgtccaaacaaaatggcaagtctttgaccagaccgggttatggcctaatggcaggaacacagagggcaaatggagaagttgctgccactagagcaccacatggacttcagaataacctctaggggatgtgtgattcctgagctcctgggacatgggtcattcctgaggaatgagctagccagctctctaaacaagaggacaacggagggtggattctgtgggctgccagaaaggccaaaatgggcaatttttaaattgattgtgaaaagcattttattattggaatagctgacattcttgttgattatgcagggtaaaaaaaaataccctaacatttgaacatttggtacatgttcagctccttctgtacatcaaaagtgaatattaatgtacaatctacacaagtctctcaacttgtcaggaagtggctctgtaattgcttcctgacaagttctggcagcatttggttgtcatcactcaatcttacttgtatttaagattataacataagttaattgtttaactaaaaaattagcctgctcccaaatggacaaaagatataatcaaacaattcaggccgggcatggtggctcacacctgcaatctcagcacttagggaggccaaggtgggaggatcacttgaggccaggagttcgagaccagcctggccaacatggcaaaaccccatctctactaaaaacacaaaaattagctgggcgtggtggcatgtgcctataatcccagctactggggaggct

SEQ ID NO: 38889 - DNA, 1206 bp, Homo sapiens
aggtccacacctcacagcaacactaatagcaatactctacccctagtaaagtgcctatctcctaagcccttaagtgtcaggcaaagttctaagtgctttatgcatactaactctaaggcctcacaacaaccttcgggggcaggtactattattctcacttcagagatgaagtgcttaaggcacaaagagaagtgacttgcccaaggtcacctaatatttctggggtgagtcggcatttgaacatagacaggcagcctccaaagctgcagtgtgtgaccgctgcagcggccagcacctctgcaatgcccaatgttggatatcatcatcccttaggagacctttgctccaggcagaaactccatcccatgttcacctcacactggcgtgctggcctcctaaaagctcctgacagccatcttaattttgatttctatttaattttctacctcacaaagcaatgtcagggtgagggagtctggtgatacctttagaatatgatttatcaaccaacagcttaagggaatgtagggcttccttgctgccacctgacctttgtcttcagccttcctaatgtttgcattgctgccctgaccttgcaaagtgacctggaatagcttggctgtttccttgtgtgtgtccactttcagagtccagctgtcagcctgtgcaagtctgccaattagtatctcaagggtttgggatggggtctgccgccttttgaggagcacaatctaacactaacctccaaattccttctcgtaattcagcattcattagtttgacggaacaaaagcaggcattctctattataaagcagaggtcaaaactggtggctgtgttttgtttggcctgcagagtgtttaaatattgagaaatttcacataaaaatacagatttccggcttctcttggaaaacgggaagagcagacaactctggggctactgagtaacagctgcccctttcagatatggaagctctctctggttcatctgcacaacctgtctccccttgggcctgcttcagggacagatgccatttgcctggtctctgcaggaataccaatcaacatagctctattctagagccagaattccctcctttaaaacgtgaaatggaccaggcgtgctggctcacgcctgtaatcccagcactttggaaggctgaggcgggcaaatcacttgaccccaggagttcgagatcagccc

SEQ ID NO: 38890 - DNA, 2155 bp, Homo sapiens
gggccagagtccgcatctcataacttctactgatcctgtgtgctctgcacagaaaggtgtggcaattccctgaatcccaggctcttggatgcctccaggctcatcttccttttgcctcttctcccctgttcacctcctggctcctcctgaattatgatctgcttaaaataaaagttatagcagctaatatttcctgagagcttgctctgttctgggcattaaatccctgaatcctcgcactttccttatgaggtggtattgtctccaggtgagaaaactggctctgaaagctaacagagacagaaatgagctctgagctcaggccgtccaacttaacgcagagtttataataaaccacctccatttgtgtcctcacttttttcttttttctcagtttgccccacctgggcttggtaacccagctctaatcttcagctttgtggtgaggctgctgctccaggtaatggtccctccctcaaatcactgtaccgcaactgcctgaggggcgcattgtaatggcctagcccaagccttaggacaccccaacacatcttctgaggaactttgaagtcgacctggtgttatttcctctagttctacaggactcttcatgtctgtcttttgagagaaccacatctagacattcggcatcctttgagatgaacttcctgaccgagttacggatctagtatctgagacatcgacaaactctgttcttaatatttaattacatggccttggggttaaaacctcgaatgcctaggcccagggaaccaccataaacgaattaaatgggctggagatgagaaaaacagggcagcaatgtgttatatgccaagtggcactgggtttggggagacaaactagagcagaagaagttatggcaaagtggcaagtcaagtgtctaaagctgatctctgctacacagaatgagggaagttctgtgtaatcagaactcatttcccaagagaaaccagaaagcttcactttgtgtgtgcatgaaaactcctgatttttttaaagttggcaactatttcacaatttcaaaactttgtggggccatccctgtgaggccaaacaaaacatgtctgctggccaaatctggccttgaggtgacacattctaccgtgcctgtgtgtgacacatcctgctgttcctgtgttcagcaagagctgaggctcttcctagcagttcttaacgtccctcccagaaatttccctaacagctgctgatccggatgtgtcctgacattgccatgtatgcccagattttccacagagttcttcatgcaccttcatgtgtggacactgtaaataattcttctcatgaaaagttaactagaccttgaactaattcagcaggaccgccatctgggagtcctcagaaacagtgaattgtcagcactgtaaacattttaagcttcggggaggacactgactttttctaaactaatcacccctgccagtcaagatgtgcagtgtgggttcaagaacaaggcgttcatttaacaacaataacaaaaacagtgaggatgaataccggacagccatcataatgaaaggcctaaaagcaaactatgacttccctaataaggcgacggccaaagctggctccctggcggtcgagcgctaatacaattaatcagtctgttttcagttttctcacgacagcaatattaacagtttgctttattctgtttatatggtgctgacaggtcttcggcatgttgcgcctacttgctggagattaatggccactctcatattgaggtaaaaaccaggcaggaagagaatgccttttacgactagataagaactggattctcttgcttttttttgttccccatcaactcctccctctttcagtttctatcagggatatatgagattagttaagtccagcaagttcacctcactgtttaaactcccccactttagatgtcgtatcctcaggtaaaacaaagggagccttaaatattgattttggataaactcattacatataaaggtattggtgactaactttgtttttaagaagtcagattcagcctgggcaacatggtgaaagcccgtctctactaaaaatacaaaaattagccaggtgtggtggcataggcctgtaatcccagccactcaggaggctgaggcaggagaat

SEQ ID NO: 38891 - DNA, 2039 bp, Homo sapiens
catataattctattgccttccaaggaaagccctgatcttttaaaattaagatctgcctagactttataagaataaatcctgaccactttctgtgctttctgaaaaacaactaggtaatagaatgactaccactgagaagtattttgctttatggcagctgtcttttcattattattttatgagagcttgtctagatattatatatcctttactatctacatttagttcttttttagatgcccggggttatgtcagtttctttggatctaattggatctcaaaactccatcacttcaatactttccaaaagttcttaggcaggtaggcttacctccaaaaacatttaacatgactaatgcatgctgctggtcatttctattaaaacaaaaaaattaaaaggtatttttagagacttatgaacgccatcaacaattatttcaagtataagctagtttgtatatgccaagggtgagactttaaatgcctataaaatctgtctgtaaaaaaggaattttatgagagcaggcacattttactttcaactttaaggatctgagcctgctttggacttggtgttctatgaactatgagctaactaagttacgggaaagcagcctgcacccacggtaagatgaaaaggcagaatcctgggcctgtgcattttaattatagctctactgcctgcatcattgaccaagtttgggtatttgtttctgtacagaaaataagatttgaggcccacacagtggctcacacctgtaatcccaacactttgggaggctgaggcaggaggatcgcttgagtccaggatttttaagaccagcctgggcaacagaatgagtctctgtctctattctttaaaaataaaaataaaaaaataataaatatataaaataaaataaaatttgaataaccatttacttatttcccattgaaaatgctttttagttatgaactattttaaacatgcttattttttgctgatgagaaacaggaattgaaattgggaaaagtataaaatactacataagtgaccaatatagatatttccatgattattatctcaaattaacatattggtaagagaagccttcaccgtcctgggcactcgatccatgggtgaaagccttcagtaacggtgaatgttattttcattttgcttggcttaaccaaatggggaccttggagtaaaaaaagtaaaaagatgagcccagagagaggctggcagtggagaggcggagggcgagccacaaaattagaggcggtccgtgctggaaaggccctttggagataatctcaccaccctccgtgggcgggaaagaaaaacaaacgggagccgtctgagatttatgactcttacctgcggcggagatcctctgccaccgctgcccggcagctgaacaaataggctcggagcgacttcagccgctgccgcagccgcagcacggcggccagcggctctgcgtggtggtacagcatggcgttctcctgctggatgtcgatgagcggctcttcgtacacgtactccagaaactccttggcctgcttcgacacctacaaaacaagcgtcgtcagtcagtcctggagaagcacctggctctccacacctgctcaaactaggaaccatagctgaaatatcaaaggaacacgattattttctcaatacagacaaatgaaaaagtctgtagttgaattaaatgtaaattttgacttctctctcttccagacattcaactgtaagctaggaaggaatttattaattctgtatcttgactgcagtggtgattacaggaacctacacatgtgacagaacggcacagtatggtgccgttatactgacttattataccaatgtcaacttgctgtttttgtttttgatattggaccttagttgcctaagatgtagccaagggaggaaactgtgaaaggtacacagaacctctctgaattgtctatgcaatttcctgtgaatccacaattatttcaaaataaaaaaggaattaagaagactgttttaacacaaatgctgatttttaaaa

SEQ ID NO: 38892 - DNA, 2720 bp, Homo sapiens
ccaccacgttcagccatttttggcagcaaggctgagcacatgcactcatttttgagaatcagccactaataatcggtgagggaatttttgagagaactcaaaatctggcatggcctactatttttgcaaaatagagcattgtatccccactgatttcctaagttctaaatgaccctccacactggcatgaggattgtactctcaaactcaactcgaattaaaaatgttaaaaaaaaagttacttaggaacaaaagccaaagatattcttaggtgataaagtttatgtgagaaaaagtttttttgttaatataaatatttcatgaattatatgtgaacactgactatgttccaactaagagctaagagctactgtcctacttcttgccaaccaaactatgaaaaacctaaaaagcctgctgccatttctgatgtaaagaaaaattcagctgatagtcaggtgcagatgaatgagctcaaatgaatggtttcggctggcactcttttccatgataccactccattcacattagtattagtattgacctattagtattttaccaaataatatttaatatttattaattatattccttctattcatatgaacgaatttctttccatagcttttgtagcttataaacagaacagtttaagctataagaactcaactctgtgacagtgattgtgctgcagtttgtgaactgattctttcttcacaaccctgccatctacatgattcaagagagatgagaaggaggaatccaagaggaaagaggcctcctcccctacctcacattcaggaggaggtggagaaaatggtaaaatcacattatgattagctacaaactaacaatgatcagatctgctatttacacatatacatttataagtaaacacatgtcacttgatttgaacattattaagtgtcatcagtatagattcgaacataatacgacttttgttacgctagtgacagccacttcttaaaaacaaagttcttgaatgttgttcaggtttgcgtaatcctgagggagagtgttctggtatgctcccccacaaaaatagcccctggtgataacgtaatggggcaaagggaatgtttaaccatagatagcaatttggagacgacatggtattatggtggtggtagtgtggactttgtttttattaaaggaggaaaatgtatcagaataaaacacgaataagaaggacttgtagaataacaaagactagtaaagataatctaattcaatttttctcagcttgtgttccaaggaacactagtcccacaaaaaaagacgttttaaggtccaataagatgtatgccacacaccactttgtttccttggagattcaaagtacagcatgtttgcatattaaaactgagacatcttgtaccgaagaaaacctgcttaacccagccacttctcaaagctattttactacagacagggcagctgttgagtgctgcacatgatgcatgggcggtgggagtgtgggagataagatccagcccggacccccactcaccaaccagaagaaagggcgtctttctctaccttgctgcatcctcttgctaagctgtgagtttgctgagctgtgttctggaggggctcttttccaattcccataaagctggcctagctgtggccctcctttttgcgtaacacctactaacacgaaagaatttggtaatgctccatggaatacactttgagaaacactgaactaatccactgcctgtatttaatagaagagaaaattgagtacaaagagcataagtaacttatttgtggtcatgtcatggtagaattagagccacaactcagatccctggagactctgctctgtgctttttagcattgtttatattcacaattcttattttttaataatgttaccatactctatcagcttatcacttcataaaagagttttcctgtcccttctccatcttacagcaagtaggctacaaatgaagactaatctataatgtaattaagcaggacactgacatgtaggatcccatttgattttaactttaaaataaaactgaagttcaataacatttcatttatacaaaagttacttatttgtgcaatttattttattttattctattttagagacaaggttttgctctgttacccaggctggctggaatgcagtggcatgatcatagttcactgtaacttcgaacttctgagctcaagggatcctcccacctcagcctctggagtagctaggtaggactacgtgtgcatgacacaaggcctggttaatttttaaattttttgtagagatagggtcttgctgctgcccaagctggtctcaagcaaatccttctgcttcagcctccaaaagcactaggattataggcacgagccactgcgcccagtctatttgtgtattttttttactgtctttctcctttcactggaataagagcatccataagggcagaaactatatccccagtgcctagaacagtgagcacaataaatatccaataaatacttgttgaacaaatgaatgaataatttacaatgctctggccacaactttgaagcatacactcttgctttagacatagttcctacagcttggttatttgtttctaagttcataacatatttagagtccataaagaagaaaagatagctagaggcagcatggatacaacataaatgacagctgacatcctagcaccaggggaaga

SEQ ID NO: 38893 - DNA, 600 bp, Homo sapiens
aaattcatagccaaaatcataataaaatcaattctaacggtaatacttcttagtcctgttaaaacagtcagtgggctaatggaggagaaattaggaaaccttcagtttaattacaatttgttctcagaatctccaaatgactctgatcaagaggtttttcccatcagtgagcttttcctcagctccacaagggcagtagagcttgccttgaatacctctcaagatgtagaaataggaaatggtttatgtaacatggaaaacccctagctaaatggaatgtgaatattcaagctaggatacaaataaatttttttaaaacaaaactaaggggaactatttggaagagttagggttgtttgatttccttaacatctctttgctacgcttgatatttttgattagggggatagggaaagttatcttcaaagagattttattagaaaatggctatagaaattgaggatagggtttagcgcttcctaatcttggagctcaattcaatcttcagtataacaccagaaaatagacgaaatcctgctttaaaaataattaggattattaatactccagagggcaggccaggaaatgcttaagatgaca

SEQ ID NO: 38894 - DNA, 520 bp, Homo sapiens
ttttaggatttgctgttgtgggtgagggcaagaggaagacaagaggtgtgaaacagcacggtatgacagggaaatagacggatggctgtactattaatgaagagattggtgctgggaaacggttatggatgaaggagctaggaaggcaggcagggactaaggatcacgaaggctaagagaattgtatttgtcctgtatacaattgtagtcaaagctaaccataactgagggcttatgatgcgccacaccctgtgccaggtgctttctgtgaatcatttaagcaaacagcaaccttatgaactgggttctattattatttccattctaaaggtgaagaaactaagactgagagagagtaagaaacttacttaaggtaagattaggacttttcttttgaaatataccagccagagagtgatgcttaaaggcaggaagcgcaaataggaggcttctgtcttccttcatgtaagtgatactgagggtttgagttagtgtggtgggactggagtacagtggagag

SEQ ID NO: 38895 - DNA, 1171 bp, Homo sapiens
gctcattaagtgatagctcttactgacagtattaataataacaaacttcattcaacttgaatcaagctgtaactaaggagaaaggaaagagtagccccttccattctgaataaaaaacaaaacatcactattctgtcctgatttttaagcaccaatacacagaattcaaccttccatgtgttcatgcttggtacagtacagttttctacaatacagttggtatcttcaaaggacttccaatctggtgtgggagatggatggacaagcaattatctatcgtgcacagcagagtaaaatgtgccatgggaacataaagtgaaagggaagaaaaaaaaaagaattttaattgagaaaaatctggaaaggtcccagggaggatgtgggatttgaattggcccttgaaaaataatggaggatttttggaaagtgaaaagggcagggaaagtattctgggatgaagagacagcaaaggcccaggagcttgaaagcacatggcactttcaaaaatggcaaaaaggttcaaaagcaagaaggtatgggtgataaggttgggaagatacctggatgctttataaagtttacacttgattttgtaagaaatggggaactatggttcacttttgagaacaaagtgacatgaaaagatttgtgttttagaaagaaaactttagcagtttataaaattagtaaccatagttttccttagccaaaaagaaaaaaaaattaataggacaaccaggaaaaaatatcagacattttgatttaaaggttcccatagagaagtgttatgaatcagaatgtgggctgtcaatgaggcatattgggtttccaaatagctgccacaggccaacattcaataatgtaaccaatggaaactatacgaccatataaaatcaattttctgtgacctattttagcaacttctttgtactgactaatcttgctgaagggtgaatcataaattcagcaagagaccatgtcctggtgacctcacttgttcttagcctgcaggaatattcccacctctactggctccaaggcttttgagaaacatcataattgaaaaagcagtcattttagtataagtcccaaatttggctttttttttttttttaaagtgaaagatgggaaaaagggaaccgaaacagagtaacacaaaacctgagataaa

SEQ ID NO: 38896 - DNA, 829 bp, Homo sapiens
tcttgcatgaagctgtcagcctacaataacagcctcaaaggttccaccagagagtgagcactatgtgaactaacaaccacacatggaaggcaagaatgcaaaggccttcttcacaagctgttcaagtctttctgacccacagacacattcctgtccaacagaaggcctttgctgggtggtgaggatgtcatgggaaattaataattccctcacttcctgttgactttaactcttttggtcattgcaactcaccagcagaagggagaatacttaaaactttaaccttcaaaacaacaaccggcttatggcttagcacactctcacaaaccagtttctatgggcattcagagtaaatgtatgagagaagtaattagttgatttattttctgtctctgctgaacttgaacctgctaaaaagtgagcctaggtctttgttaactggcatcccgagagtatgagaccagtgataagatctaagcaaaaaggtgactcacctcttgtttgaaagggcagacatactcagcagtgatgggctgcatctatgacctctccctcccttttggacttaatctgtgacaacaaccttggctaccaatcagcctcttaaccaatttagtcaggaaacaagcaaggctggcaaaggcagacaaaacactgtctctgaccctcaaagataagcacaagataaggcaaaataacagaatgagtctttgtcatttaactatacacaaattgaaggacagaagaatctctgcccatcacacaggacagaagaaaagcttataaggtatgaaggataagaatagtaggaactggccgtgtgcagtgg

SEQ ID NO: 38897 - DNA, 594 bp, Homo sapiens
gtttgttaatcccatgacccagagagttaattgctaaatatcatatttacacccagggaagtagtttatagttaatttacaaaaaaaaatcacctctataatacttctgtgttattattataagttctctacgggaatggtagaagacaggttcctgaacaaacacagtaaaaagttgttctctaactaaatagctaacctcaattgtcttagtgaccttggacacattacttggaatgtttgcaagagtataataactgtgacttcatttaggtgaaacaagtgcttctgcaaatgtttacatagtcctaattgcccaagccttttactagtgtttccctgcaacatcattttttatttagccaataaatagaaacacttgtaaaaatgtttacttaaaacaacctgcaaacaaatgtttctgtcaaaagaattaaaagaaatatttcaaattagatgttacaatcgataattcaaacatattttgatgattaaggcatattgaaataaatcgctggccaggcacggtggctcatgcccgtaatcccagcactttgggaggccgaggcaggtggatcacctgaggtgaggagt

SEQ ID NO: 38898 - DNA, 1743 bp, Homo sapiens
aattataatttacatgtagtattttataataaaatactttataaatacaaatcacaactcactacgattacttaaaatatagagaaaaaaattcagctgtttctctctggtcccttccaaggaagaaaaaagaagagagaaataaacttctaaataagtttacaacagcatggctcaatctcagtttaacctggtaaattcaaatttgtcttgctttgcaaggtatacatccagaccagtctcaatttgtcatccaaatatatatctcagtagtaatttatttttgtttaagggatgagtgtgagattttcttatcttgattttttagcttaataattctttcctacaagaccaaaccatgcttgtcatcagtcatgtggtgtcatttactatacattaaaaacggacagagtcgacagaaagaacaatcgttttctggaagccccagcctgatgtaggttaaaagctctgctggggtttggttttataatccccaggcggggatggcagggatactaataacgcactcaacaagatcacctactatttcaactactttctcctcctattacatacctgattcacaaaaataagcagacaatgcatcatgtaatctcccctcacccattagccattgcagtgtggtacaatctccagcacgtaataaaaacctgagcatgcaagaaacagcaaaatcactgctatccctgggagctgctcggatatttacaatgcagtcgtccccaccccatcccccaaactggccggccaggcagcacagaagcagacggatgctcacctgggccccggctgctactctccattcacctgcggggccttcagtccgctcctggaggggcttgactcccgcagcctgccgcccgcctcacggtgacagcccgcccgggcgctgaccatcccggcccggctctgtttacaagcggcttctcgcggtcccactctgaaatgcttccgccggcggcccgggcagccagagccggacacacaaggttccaggccgcgaggacgagtctttcctgcccgagggacccggcagctaggcaaggcctgaccgcacccgccaggcctccttatttctttgctttcttatatacagttcctcttgtacacattgtgaaagcaatggcgtgtgtcgtggagtctcctcactgctccacccaacgccaaaatgggtgtttgcgattggaaaatgtcacttagaacatgtcaggatcgggctggtttttagcagctcccttgtctaagggaattaattactcaaataagttctttccaaaagtgggactattctggagattgcttctcatttccggttttggggctgcagtgaaaatccgttttcactgtcctttcctacgcaggttgaaaaggggtggttttgaggtgaggtcttcacccccacttgcggattcccagcaaaatagggtgtgcgtgtgtgtgcacgcgggcaggactgcctggtaagaccgcccacatcccacctgcagtgactgtggtcgctttgcagggatatgctggtctgattggacagaccttccttgcagtttcctgtctgttttccatcatagcacacttcttagccattttctcactttataagtacacacttatttatcagttttattggttttcccacgctcacccatctcacctataaactccctgagggcaggcactatttcagtttcactcaccaccatctagtaggcacctagcacaggc

SEQ ID NO: 38899 - DNA, 617 bp, Homo sapiens
cgcagaaaaaaggcacgactgaactggaaagaatctagggtgatttttacaagattagcgagtttgcaccactgccatctaccttcccttgcttgggcccctgggagctatttctgaaggctttggccaggatgaaaggatagttttagccacagagtggaacaaagttaactgacccctcaaggactaaactgtttaccctcaacacactgttttcaatgatggctacattaaaacctctggatttcagcatgagagattcctgtttttaaggtccttttaagacataaactactttctgtgaaagtctgaaacctcagtttcaacactgaactttgattttgtttacttggcagtttttttgcttaatttggcaacaagtgtactggtacagaagtaaagaagcaatactttttttccaggcaggaaggaatgctttagtaaggctgctttcaactaccgagtcagttttttttttctttttctttttcgagacagggtcttgctctgttgcgtaggcagtggtgtgatcatagctcatagctgtaaccttgaactcctaggcttaagggatcctcaggcctcagccttccaagtagctgggactataggcacat

SEQ ID NO: 38900 - DNA, 1063 bp, Homo sapiens
catgtaaagtcctgaaacaggagttcctaagatgctttttttttttaacctagttggaagatgtttttatgcctaatttcttatgtttggttgacttctgcaagtatttatatcttatcatgatttcaatatagacatcagcagcttaggtttagaacaattaaaaagtatgtttaatgacattatgtgaattaaatgtctccactcaaacaggtccttaggacaaattttgatgactaattctgggctgaggcaaacacacttagagttgccaatagtttggctgaaacgtgttgctcaatatttttctatgccagtcttcagccactttacccttttaaaaattctatctctacctaaaggtacaaagaacagaagcaagtttatgaaaaacacagcgaaaaaaatgagagaattacatagacttttgcatctgtccccaggcactttacacacagggcaaagggacacaggatttaagggaattttgctggaaaggaggggttcaactaagaaacatcatgaattctttctgcactacaattgtatgaaaagggcaaaaggtgaggcatgaaaaggaaacaggtccattgactaagtaaagtgatagaaaattgagtttgaaatgacaaaattgtgttaactgcatttagtttactgtttcttacatcctctcttatttcccttttctcaatacattgtactattcttagccactgttttattacaaataaaaccttcacaggaaacagaaggttagaagaatctgaaaatcattctttcccttataattcttgacttttagatgataaatccagtttttctagcagtatgttaaaattagaagattcatctgaatatatttaggcttaaaacaaactttattcacaaaacacagctatatctatataaaaaaagctaacttcacctcaaaataattcagattatattctttttttttttcctgtttctccttcccttttttttccttttttttttaaagtgatggggtctcactctgttgcccaggctggacttgaattcctggtcttgagggatcctc

SEQ ID NO: 38901 - DNA, 3922 bp, Homo sapiens
tgaacacttcagtccaactcatcattttactgggctctcaagatgtccagaatggtgagtgctagcatttctcctcctttaagaggctgtttttgttatttaataaaaataactagccatgaggagattcagctggttcctgtgacccatattcagggaaactttaagtctaaaagcgagacgaagaattcctggtggaactgttttcctagagataacacagacattggagatgtggggctaaatacaacaaagtgatttctcaattagaagaatctctatacagtagggccactgcccaggacccaagcatgtccctgtcatcttcttctggctgttcacaggcaagggtaagctgctagtgagtgggataggacaaactgtgcattgtcctaggaagacagcactttaaggatagggtgtgggggtagcatatacaaatcaatctgattctcagaaagtgcaaggttggacgctttggaagaaatgaaactgtcccagcttgtccctagaggcagaagaagctctgagcctgctaaaagttatctattccttctaatgatgctctaatcgaaactcttttttaatccaacaacacagctgcaaattgcttttattctcttaaggactaaaaaagtcaagagaattgactttaaagaattattagataagaagcctaaaatagtctttcttgaaaaattgagctaaagtaatttggtctttaaataaaaatgtaatgattagtagacagtaagcgtctgtttcttgacaagcctggatgtatttccaatccccaggcccattttcacttcccaaattcgcaattctagaattcttcttactagtgtttaggagattcctttgggggaaccttctggaactgaactagactaaaagaaatgaacagaatggtgtggatgagtcaattacttcccatttgtaatgtcaagtataatttgtagtacagctgaaagcatatgattcagttcatgtttgattccactgtcacacctatccttgttttaaaacaaagcaaaaaaggaggcagtgaacttatctggttcctgataatacacttccatggccatgtccctatatagtatgatgcaacagtcatgacatggcaatttattcttgatggcaaatacagttaatagaggtcaaatattgtacctaaaatgtgaagactgatatctttttagttcactatttccttctcagttaaagcaactgtactctctgcagtaatctttctttatctcataatgcatacttcagacgcttcaggttttcctcacattacttagccatgaaatttttaccatcttttaactaaaacagtgaagctttattgttactaccatgtggaacataattgtatttcttctggatctgatttccatgggatgggcttgaggccccactggactgacttctccacctttgttgcccctcagattttgtctccaacccaatcccaacttcagaaggaagggctgttccaagaccagcaggcaccagctcatatgaagtagctgaatcctatctcctaacataattgtgcaattccagaaaataaacctggaataacaatacagagtagtttaatgaaaaaaaagagccatttaatattattttcatcaacctcaagtttttggccagattgttttttgccgagttcatgaactacaataatttctgggcaaaaaggatctcttgcagataagacactgtattaaaagaaacaaggaagctgttggaattcgttgttggaaatattcctcactcattcccttgcagtgcctcggcctgcccccaagaccagttaaacactgtactgccacatcaaagaaagtacagaagaagggggaaaatttgctaattctcaccttgacagtgaatagatttcttatcaccccagttcctcccagtcttgcagactcaactgaatgtagtttatcgcctaaaacaaaacaaggaataaaagtgttaacatacagaacactcacaggagaatttagctgtttttagtacctgccagacagcccagtttatccggtttaaagtacagtgctgagtgtactcggtgggacaaaggccaattttaggcccgcaggcactttccaaataaaggtcatgggagcacaatttatctctgcgtgtgcgagggcgtgcccccgcttcgccgcccgttagcaggtcttggggtttgcatgtccttgctcttggcctgcacccgtccttatggccgttgtgcaagagggctgcaatcaaggctggatcggtacctccttccaggtctccacgcccgcccctcccctcccctcccctcgctggtgctgggaccttttaaactccaggcacccggaactggcgggggtgtttcccccagccccctctcgccccgtgtggcctagcgacccctctgaaggccgctggagctccgcccctccacgccccctggcggacgcgagggatcggcttcaaggctattcctcgccgcctgagttgcctgcagacgcccgtctgcggcttacagccttctttgcatccagcccccagctgctgcacgttttcttcctcctacactccaggcttagtcttctacatgcattcttgcaacttccacccctcgattttccaacccaagtgcagacctgattttccccttgtcgttgcatccaacttcctcaccgcccagtttctccctcccaggcccaaaagcagaccttctgcatatccaagcatccagcatcccctccttcccttttcttttcccattctcaatacctggatttgttcccttctttgcacgcaggccttgactccctccacacccaagatctgcgcttttttcctttaccccattcctgccttctgcggaattagagccacccctccacagccagggaccggggccgccccttggagcctgaggttacctgccgggatgatatgctggcgaagagttggggcgccacagccgctcacaagctcagactcacaaccacagcctggcaatcccaaaccggactcccagtgcctccgcttctgaagtagactctgcagaaacccgggaccacagggtaggtccgagcttttcctcttcccggctttgtcccctcccaggccccgcctcctcagcccacctcccccagccccgcccccgacacgcctccaatcgccacacgccaattcccgtgggatgggcggagtcagcgagaggggcgtggccacagtcaaagatggagaatccatggtgccactttcccggtgatcccggtgggggaaggggttgccgcccggcagagattcagtcccgaatcccgacagcgaagagacttgtatgccacctgcaggccggggagcggggcgcgctggggctgcaccaccccgaactttgtaacaatctagagcaccacagagtgtttccaggtcggcacaaaagcgaacgggacagggcgccctgggcggcggcagcttggccggcccgctgcctagcgcgcccccgaggggcggtaatggaacgtacctttggctgaagaaagagtgctcccggccagcgcggggtcgcctagggggttccgcgctgcctaatgcaaaggatggaaaagttacagaagcaggtcctgacaccacctatgtctaggtctttagaaactccattgattgtttgcattagaagataatgaatgggattcttattattttcttttttaagacagggccttgctctgttgccctggctggagtgcagtggagcgatcaccgctcactgcagccttgacttcctgggctcaagagatcctcccacctcagccttccgagtagctgggattacaggtgcacacaatcacactcaactaatttttctttctttcttttcttttctttttcctttggtagagatgggtttcagcag

SEQ ID NO: 38902 - DNA, 1529 bp, Homo sapiens
taaatgaaaaaattaactataaagccgacatcacttactctgggtcagggaactgtgccattcgctttaagtgcatttacttaatctcaaaaaagtattaagaagtgagtccttttattaatccgactttacacaccagaggtctaaggcctaaataaatgagcaatttgcttaagatcatatggctggttattggtggagtcatgcaagtctggaaacagagtcatcgctaactccggttcagtgctacacgagtgaactgtctacaacaaagcaataacatattatgagtgcccacagtatcgaacacatacggtaaccgcagtccagccagcacccctgcagtgcccagagcaccaagcacccatccgttgaccccgcatgcgtgacgctcacgcgcgcagtccccctggcttcttccaggaaggctgaagcggcctaatctcggccaaaagatcaggacgactcgatctgggctggactccttctgcctgagcatctgatccgagcgtcggccgggctgggaggagccggcccccgggaaagatttcggactgggggacaggaaaacagagggcggagtcttgggggggggaagcgagaagccgcatcaaccatgtaagcagcttcgcttcctgccgcaaccgtccgcggcctgaggagcccaccgccgctctcgggggccgacttccgggggctgagccgttgaagcggaggctggggcggggggcagccggcgcggccggggcaggaggcgcaggtaagggagggggcctggagcttggccggctggggctcagcatgggaaggaggccggtatggggagctccagggccagagctgaggtgaaagtgagaaccagggctccgcagtcgggggctagggcctggctgccggctgagcaaggaagggcagagaatctggctttagaattagcttgtcctccctattccccggctgccttgtctggcgagtggggacggaagccgggtggggcccttgagatttccttggaaacatttgaagttcctttgcctctctctcgacccttacgcctgaacttaattaggaggggaagagtacagttacttttccctctgagtgcatgagttctgagtttgtcagaggcgcatccgtaggctggaaaagaaagttcatgagctgcagaaacgataccaaccgtgggggttcaaataagtgtttgtctttttaaatgcttgcctctgctatttgagacgattccatttcaacttaggttttggagtttcttgaggaggagcattatttcccaattagtgtttaccctttgcttagaatgttcccaacaaaaggatgagaatggaatgtgttggaaacttttaggacttaggggttttctgcccaatcagaggttattcctaagacagtcaagaaatataagaagtgctagaattctgtataaagcaagttattcgtgtgtatctgatgtgtatacatgattcattatctactattgacgcagtgcatcctgtgttgtaaaatatgtccag

SEQ ID NO: 38903 - DNA, 794 bp, Homo sapiens
atttatgtcccctttcattttgacatttaaaaattatgtctaatgctgggtgagatggcccatgtctataatcccatcactttgggaggctgagacggcaggatcacttgaagccagcagtttgagaccagcctgggcaataaaatgagacctctgtctctaccaaaaaaaaaaaagtgtgtgtgtgtgtgtgtgtgtgtgtgtgtgtgtgtgtatctacctcattgtgtttgggtatgggtttagatcaggaataggcagactctgatgacctgtttttgtaaattaacgtttattgggaaacagacccattcatttacttatcatctggttgctttcactttatattggcaagttgagtagttggaactttttcagagtgaaatatttgctctgtctctatatagaaatagtttggtgacctctgggttagtccgtgaattagtagttttaaaaaatagcaactgctgggcccagtatggtaatcccagcactttgggaggctgaggcgggcggatcacttgagactaggagttggagatgagcctggccgacatagagaaaccccatctctactgaaaataaaaaaattagccgggcctggtggcgcatgcctgtaatctcaactacttgggaggctgaggcacgagaactgcatgaacccaggaggtataggttgcagtgagccgagattgcgccattgcactcctgcctgggtgacagcaagactctatctcaaacaaacaaaaaaaccaactgctgtaataaattttgactagtaattaagatatctg

SEQ ID NO: 38904 - DNA, 1117 bp, Homo sapiens
aagcttgagatggttgtgaaatcaacaggaattttaggtggacaaggtgagaatttttgttttgtttaaattgttcacatgtatttcttatcagttaaaattttaaaagtggatactgattcttttttttagttgtaaaaaataagtggttatcattgatttcattgtcatttctaaagtgaccaaacaataatgagaattatataggtggggaaatattgggtgtaaatatgtgttaaaatgtcagaggttctcaaaaagattttttaaaaagccagatgttctgaataagagattgtctttaattaacacttgagacttccaagttctctaagcactgttagcctcatttgtgctcttagacatcgctcatctctaggcaggagctagtctttttaaacagaaactcgtaccaggtaggactttgtcccatggcatgtggcacaacagataacctttcctgcccactcagactgcttctgcatgtgtatctttatggcagtttatatgaaagaacatggtcagttgacttcagttgcccaatcaattatataacagctttttcccccttttctctttcataatctcaggtaaaatgccaacagtggtgtctccggagttgtacaggactaggttttgtgaggcaatggacaagtatttcctaatggtaccagaccactggacaggcttgggtctgaattgctgaaatcaagcacatattttgaaatggactgtgaaggaaaaggggacaggaacaaaggaccaaaaataagctacatgttttatttcttcatcgtgttcaccactgtatgccaaggcttttcagttctgtggctgtttagactgtccgtaatggaatggtaaaactccatgaatttgcactttggtttttgatacctgtggagctgtctgtaggttgggaagtggcatgaaaattttcttaagctaaaatacagacatgtttcaaagggctaaagttggagatgagtagatagggtgaaaaatgggttaaatttgctagcttaattgttttaagaagaaaacagtgtctcataaattgactatcctggcatcacatttaacatgttatctacttagaaagcatttgtagagctgc

SEQ ID NO: 38905 - DNA, 622 bp, Homo sapiens
aaactcagaatctacttactccacttagttttgaatctgcttgaagaaattgacaacaaaaggaaatggagtttgtcctgcaagcctagtctttgtgttactggtggagggtgtccaggttcttggcgttttgaacaaagaattggacaaaacacaaaaagcaaggaaagaatgaagcaacaaaagcagagatttattgaaaacgaaagtacattccacagagtaggagcccaggagcactggggcacaacagctcccgttacagaactttctggggtttaaataccctctagggatttaccattggttagttggtgtacaccctgtgtaaattaattagtggcctgcaatcagtgtgattggttgcagaaagcaacccatcaggctgaagtgaagttacaaaggttaaaccctatgcaagtgtcgttgtggaaaacaaccagtcagaggccgaagttacaaaggttacaccctatgcaagcatctcattggttgtggaaagcaaccaatcagaggctgaagtgaagttacaaagttacactcctatgccaatgtctggttgcagaaagcagccaatcagagatgctttcaattttccgtctgccatgcagaaaagggaaga

SEQ ID NO: 38906 - DNA, 3259 bp, Homo sapiens
tagattaatttggcactgggaagcctccatggaagctcaaggtcagtgctttacccaagtaagactattggaaggaaatctctctacattgaaaataaatacagtactggaccttttctgggtaacatttcaaaaatgtattgcaatcaaattctgtgatttggcttcacagatggcactaaacaaccctccactgtcattgttacttggattataactaagtatttcaatgtgagtgaatgtcagattacaggataatattcctggtttgtaggaaaaagtagtgggatatggaatagctcaagtgttcccctagttggcttgaccagcacccatgactatagttggatggatggaccttaacttggtcaataaataaaatacatttctatagtaaccaaggctaaattaaagggtttctctgccaggtgtttcacaacctgttttaccctcatagcctaacagaagcacattggaagtgaagatgtgcagatgccaacatgattgatgataagggttgtgaaagacacagaattccaacttggttgttcacaggttccaccactatgaccttgtctgtaaacaacactggtctctctctctttttttttttttttagaaggaatctcactctgttacccaggctggagggcagtggcacaatctcagctcactgcaccctccaccttccggttcaagcgattctcctgcctcagtctcccgagtagctgggagtacaggtgcccaccaccatgcccggcttatttttgtagttttagtagagacaggatttctccatgttggccaggctggtcttcacctcaagtgatccgccagcctcggcctcccaaagtgctgggattacaagcgtgagccactgtgcctggcctggtctcatttttatgtagcaataagatatataaaaggttcccacctaagtggtcagagaaatgtgaagttggatatctggtgccttcccttaccagatatcccactttgaatgctagccacattacaactggggttcttttatatataaattaatgccatgtagatgcacctgatgagacatcatagacaacgcacttatgtattgcaaccctaagttctcagtaatgagaatgcttttccaaagcctggcaatgtacgatgtagaaagaacaatcctaagcattccaaagtaatgaacaagcatctggtgccactatacagactgggaagcctgccatttacaagttagcagtgtagcctctgttgcactccaaaattgtgtcctagatatgctgactgcccaacagagaggagcttgtacaatcactggcaacaatgctacttctatataaattagaaaggaaaaattgtgtctaatctatatcatttaaaaagaaaggttggccgggcacggtggctcacgcctgtaatcacagcacttcgggaggccgaagcgggcggatcatgaggtcaggggatcgagaccatcctagctaacatggtgaaaccctgtctctactaaaaatacaaaaaattagccaggcatggtggcgggcacctgtagtcccagctacttgggaggctgaggcaggagaatggcgtgaacatgggaggcggagcttgcagtgagcagagatcacaccactgcaccccagcctgggcgacagaacgagactccgtctcaaaaaaaaaaaaaaaaaaaaaaaaaaaaaaaaagaaaggtcaacattctacgttaggtaaataaggcatagtccaattaactgaactgaactgacctattcccacgactgggagactggttcaacagaatatggaccagtgtgttcagatttttctctgttgtaatctatgttcttctttcattttgcagatctcttacctcccagcacctaatatgagtcttttctacataggaaataatccaaatatttgtgaaacttcatgtgaagtttcaaatgggggaagtgaaggaacgaacaacccacctcctaaccccaatttatacccacctgtgttagttcatttgtattgctatgaagagatacctggaggctgggaaatttataaagaaaagaggcttaattggctcacagttctgcagggtgtataggcatggcatcagtatgtgctcagctcctggtgagggcttcagggagcttacaatcatagctgaaggtgaagggggagcatgcatcttacatggtgatagagggagcaagagagagggtcggggggtgccaggctctttaaacaaccagctctcatgtgaaataccagagccagaactcactcatcaccatggggatggcactaagccattcatgagggatctgcctcatcacccaaacacttcccagtaggccccacctccaacttggggattgtatttcaacatgacattttgaggggacagatatccaatattcaaaccatatcaccaccagaaaggcataaagattactttaaactgaaaatattggaacaaacaatcgctgcggaaagcagccttatctgaccgaaagcagacctgtccaagagttctgctatcatcaactccttctgagggactttccagacagcgaggtgacagatgtttacaaacgtgacgttaaaaaataaagttgtgtaaatgagtcttatcagaaccttttatactttctcactgaagcctcagttggtatataaacccttaccactggctgtttgggaagtgactccttacagagtgctccctcaggcatggagaataaacttttctcctgttaatgtattttcaactaattcgcaggccctagaccactcagatctaagttgacagatgaaatgttttcctcccaacatgaccaagcttatagtgcttttatggtatatctgtagagattgcggtcaggcataacattgtttgttagggttgcagtacctttcaggaaatgctcaaagtttaattgatttaggggactttcactggatgagatgcctctctgagtcatcataggttgcaaagtattagttttttgccactcactgtgtgttgtgatatgacatactcataatggggtaggacaagatgtcagttttgcttccaaactttccttacttgtttcctttttggttcaccactaatgttgaagaaatgcaagatggaaaatctcaatagttgacactgattgattgattgagatggagtctcactctgtcacctgggctggagtgcagtggcgtgatatcggctcactgcaacctccacctcccaggttcaagcagt

SEQ ID NO: 38907 - DNA, 1910 bp, Homo sapiens
gtttggtgtcttttaacctaaagagcattgtgcattgtgccatatttgaatttaacagagctaaattcaggctctagcctgaatttatatcccagctccagctgttaccagtcatttgaacttgggcaagatatttttccactccatatctcaattcccccatctgcaaagcgcgataataataatacctacatcatgagtgcttttaaagattaaatgagctaataaatgaaatcacctgactccgtatctgactgctcatgttagtatttgctattattgtcatgtgtgttctgtgaggataggtctaattgccgttttgagtagcaagatccaaatttggctcctctaacacctatgaggagcttttgttcagcatttataatgccttgcttttcttcaaatttcagcattgttctcattcttaaagaatctggaaacagaacttgagtattatcatcactcccctctctatcaattgtttgacaatgcgtcctttgaaggagcattccataggaggactagcaccacagcctgtaaagagtttggacatcgggtctagcctgccctaccagtgatttattgcataccaagacagaagtgcaaataaaagactgcagaaaaagagagagagtaatgcccaaatataagctttactcctgtgcaattttgcttaggaccagtatttccatgcttcagtggtctatggcttaaaatacttaataaagctctattcagcacctgaatcttgaatacctataaaaaagaaatatttcaatctattatgtaaaacattatttttcctgacaagacttcttatgtatttgaaactgccttgcaagcatttaatagtaaagtttttttttctctttttggtgtctaaaagaagtttcaaagttacaaatgatttttacttgttaatcataataaagtggttttaattctaaccactgcagcattctctgttccttctcaggatgacctggcatcactagctggttatattgctccttatctgattggagccttgtcaggaatgctcacctcttagaactgccaactgaggcgatgccacgtcagctcattgactcacggcattgaaatgaaactaacaactgggactgaaactacaggtcctgtggacaatggcatcacagacacatgatctagagctatggcttcacgttgatcacaagtcggagctggaacattttccttgcatttaaattgctgatgcatttctttcttgaatcagggaaatgacccatatttaaagcatgtatttctgcagtttctctagcctcaactatgagtataacatggtattgaaaacagtatagctgtgtattccaggcatgttattgcgaccattatggtaaacttttattttttaaaaaacaaacatcaattatcttagactgttgtaaagacaaagcaactacacagtaaaacaaaaatctatggacctgtccaactgttttaagaagggaagaagtcatgctgagaagtatcacaaacagagaaggctgctgattcttttcttcctcctcaaggcatagtcatttaacaagtgcagccctgaataatctaacaccatctcataccagccctattgtttgtttaaaaattggggcaagatgcatctccatattgtattcctttatccatttctacattaagaagatgataaaaattcagtatcaccatttgaacctaatttattttaaatgatctaactagtaataaaaactatacaataatgacaagtacaatatgatttatggcccaaaagcagttatctggcagaatgcattactatgaaaggatttatggtctttcttgatgttgtaagagtatgtctgtcaagctggaggttgccaaaggatgacatgggtagaggtgattttcac

SEQ ID NO: 38908 - DNA, 1126 bp, Homo sapiens
cattttcacaccctttgctccacctcagcaatggagagaaaaacttgttcttctagttcttatgatctcttctccacagactttaatatgacacctaatcaggtctccattgaaatggcaattttctgtatttcctcccctccctaccctttttcccctgtgtgtgtgtgtgtgtgtgtgttgtgattttgtatatgtgcatgtgtgttgagagtgaaggagtgagaaaggaaataaaactcattctctctctctctctgtcttcagttcattgccacaggtaaacattttacatctcaccttcttctctgtaatttctatagcctccccacagacaaaagagcttccatagatactcaagacaggtgcacaatgagttcctgatgaaaccttttctgcttggctttgtaaacagatttgacaacagtttccaggaaattgcatttgatgtttcaaggttagatctggctgtcaagcatgctgagtcatatccattgagtcagagagtgctatgctgtaagagaatttgtctaagattagctaacatctttgctttgagatgaagaagtcaggagagttctttagcaaatgattctgtagaggtagaaaagctcccctttaggaaaggttgtattgtttgcttttcttcaaggttctgccattattgtctgagctcaaccacctgggaactagaagcttataactcaaatcacatttttaataaacattatgatggaagaaagtcaaagatgtaatgtgaataatttaattaagcttctgtagactcaaaacaaacatataggtaagtgccagaagcctaaactttaagttctcaataccaaaaaagcaaaataccagcaaggaagccatagccttctatgtagatattcacaagtgaactagtgtctactgatatgctagaaatggtggtctagatatgataaattgaaacataattagaaccttaaggttacaagttaactggaatccacaaaacaaggtgaattggctttcatctttaaaagaagctatttatcaagattgagtatacttcctcatagcatgaaagacttaagggttcacaatcaaaataaaagcacatatgaaacagaaaaaaaacagttat

SEQ ID NO: 38909 - DNA, 1775 bp, Homo sapiens
ctccctcattctttgtggttttaccctttttaaattcttcaataaacaaaactaactaaaattgttcaaaggtgacttcagctatctagacctttggtaactaaaagttttaggaacccaaaggagaattttcttccattaagccacttaccacaagaatatttgtatatttatgtatttaaatttatctgtttgattttgaacctattttataaatagatgaaaagtgctattttatttaacaataaatttgctatgtaaagtttaaaaaactttttgcaaagtgaattgttagtgtcatcaattttttttctacaatacataatgaatttcttttaagcaaattccattcggacttttccatctccaataggggcacaatcaggccaactgcagcaggaatgcagcaagatatttggaagcctttctacatcgttgtgactggcaaactgtaggatgctttactaaggcagaaaattctttctctgaagtttttaggaacaggatgagtaacttctctgggaacactgccatcctgaaatctgaaggacagactggaatttccagattatttaatacagttccatgtcacatgcttatcaaactttgccttcattgatggcctgcctcttacaaaagagtgaaataatcaaaatgtgctttgcttgcctttttctacaatgtagtgttactcataatattacctgaatccttacagaacaactggtgctctcatcttccaaaacttatgagctgtctgtccactgtgggaaaaattaagtgaactagcatcactatatgtagcattctctagtacacaaatacttatggaatgacatttagttctcacagcacaactctttgagaaagatattcttctcccaacttcgcaataggagggtcagaggtgacaagcttgttcaaagcagaatagctgattccaaattcaatgctctttcctacaagctacatttttctctattgtctgataacccctaaaaattaaccacaaatatgtctaattggaatttttcagggactgtggcaaaacaggtggggaaattgttttagagctgggaaagaggagagacttttcccagctctcttcaaattttgataagtagtcagtttcacagtctgaccatgcctgagtcccaaatttcaggggtttttttttgttttttgtttttaataatggcatttgtcctttggtgattcagttgcatggcaatctgaatcttgtagaaaaacagcacattcttacctcagtgtgtttctcctatagtcattttatgcatgaccaaaatagatcatctcttaagtcttattactcatttaatccaaaaatattaggaaatatcgggaaatcaagagtgacactatcctacttagacctaatggttactttgaaatttttctttggtatcattgtcagcacttgcaaagaaacataaacactttaaattaatgttataaaaattagtgcctagagaaaactttcatgaaatgtttagtcatgcttgtatgtttacctgatgattcaaaagcttgattattctggaatgaaacttcatcactatctatcaatatacacttgggcaaattcacagatgtaacaaattagcatttgttaaagtacatattttagcttggaattcataatgaatatttaaaatacttcaaattacaaatgaatgcatattaaatgatgtgtcatttatttattagctatcattattaagtgatgcaatgcatattgagtgttttgccaggaa

SEQ ID NO: 38910 - DNA, 3616 bp, Homo sapiens
cctttgtcttttctggatgcacctgtggttgggtttgtgaggcgaggccagtgagctttcctggtgaggtgccactggcaaccccgcctcatagcgacacaggggagggaagcagggggtctgcggaggttgctcccgagagactaaagctgttgcccccgattttccaaggacgccagtgaggaaggcccgcctgtcccgccgcccgggcactggcctcactttgtcgcgggaggggaccagggctctggagaaggcccgggccagcggctgggcggggctctccgaggctcccacctcgcggtccccgcctggcggccggcggctgcggcagaaggcgaagcggtcgtgctccccctcccggacactgcggcggtggcagcgccagccccgccgcggccgcccacgggctcgcggagtctggcgggacctgcgcggggcgggacctgcgcggggcggggaggaggggccgaggcggagctgctgcgctgggagccggctgggggcgccgctctcagtctggggcgggcgctcgggctgcgcgggctctgggcagcagcagcagcagcagcagcatcctctcttcctttacttcccttccgcttctttctcttccttctccttctttttcccccccctccccttcttcccctaacccttctacccctctcctttttctccggagggcgctaagtccgtgagcggtggcagtcgcgaccgcgggtgcatccagtttctgcgcccaggtaagagaccgtccccacctctggctctatgtagggcgcctctccttttgcctcggtctctgagtagaaagagataggaatggggaggggttgtgtctcgtcctctgggactcgcagcaggcagtctggtagttggtcgagtggccagccgtgcacctggcggaagattcgggcctgtcctctccaggtgtcactgcggagcagggggccggacgctactggtacctgagccctggcttcgtagaagagcgagtgagcttgttaggtaccactttgaaacaactgaaaacttacgccaggttagaatacgtgtatcgaaagccagtattacctgcgctgtggaaagaaggggagtggattctacaaagatagtggaaaataggaaatcgaggtaggggatttttttgttcatccagctgcagagaactgcacactgggaagtgagtgagtgagggaagccttgtccatttcaaatcatgtttctctgtaattccttcagaaacagctgggagaggaggactgatatttataattgtaggaaaatgaaaaataaatgcctggtggtgttggagggcggggcacgaagaaatgagtctggttaggcttccacacagtcgtttttctttttaaacgttgggggtggacctctgaatctacagtgcatctattcttttcttccttttctttttaaaaggcttttttggtggggagaggaggactgcagtgctggctgcctgccttcccccacctcgtcttttgtttaaggatggaaatttcaagaaagagtgtgtggggggctaggagtggggagctgtatatttgggtgtgtatagggggaggggtatggatggagtcagaaaaaaaatccttgaaaactggaaattaatgttattctgcctggcatccggacttcaggatttttgtcagaaaataaaaagctttcattagcaacaagcccgtttgtgacaattgctgtgtgccatctgtcgtaagctcttagcacaatgcttccaggacatagacgctttaaaattgagtccggtgtaaagggtttttgtttaaatgcctaaacacacaagtatgcacacaaatgtataatacactatatacatgttacaaaaggaaataggtacttaagagactgattttttaaaattgtatttgagggtttggaaattatgttgtgaataaaatctgtagtgcaaaacaaaaaaatattgttgggtggtatataattttgggtgtgaggcaaagggattgatgactgttggtaaggaactaatttaaatgttaaaggtataatttattttaaaatgatcagtctagaaaaggaaatgattgcaaactgaaattgaggtttgcagccacagtgaggcgatggagaacaaagccttctatgtgagccacattatgcaaaatgtcccatgcatgagctgcaggtaccagcccagttcaaaagcatagttctttcactatgtcatttcactgtggacaattatgattttttttggcagtcaaatagattgaataaatagaagccctttagaatgcttttaattttatgcccagggaaaagattacagccttccatcagaatataacacaaagcagccctttaaccgggcaataggtgtattttggtagaaatccttgtgaatttgcaaatcatggatgttccaaaagccccagccccatgcacacaaagaacccttccttcaagaaaaaaggcatttttctcattcagtaaggattattatatttgtgtgtgtatgtttatgttgatttcctggtaatttcatctgattatcataggtgtacatctgcattcatgatttgtatattatcagagccattgtggctttaggatcagtggtacatgctgtttatctgtggtttatttaattttaatttttcatattttacagtttgctacaatattatttaatgtccaaagttttcttttttaaaaccataagtagaaaattgcttaacacacatctgaagatctaagtaatttaaaaatagagctaccttttataaaataatattttagttatattaatttttattttatttatctcctctcttatttttttcccttttctaatcaaataacctgtttctttatggctgctttagtcttctatactgccataggagggccagtgttttcaagaattttgaatttaggattgttcattctctgcagcacctctcaggatgacttgtttacagcaccttctcagggaggagacagggaaagaatgtgctgaaagagcatgacccagtgaaactggcacagccattacctcatcctagtaggtacttcagattcattgagagagcaggcatcctctcagtggaaaccaaacaccaggagcacacccatctcagggcaaaagcctttctcttcccatagcagcctttactaatgtcattccactgaggttaaagggatattttctcttttatgtattccttttcagggatcttgaacttggttagaaatatgtagccagaaatgaaacttggcacagaatcctctaagcctgaaggaataatttcattcctttaccccttttggtttaaaccagttcgcaaattttctaaacatcagaagggaaaaggaagaaaaatgttggtgtatttttgtgtattttcttatcacacacacatattttgtattgaattttactagcagttagacaacagactggacatgctattaacaaatgtagttgcactgttggcattttaaaaaatcattattacatttgcttataggacaataggtgcatccttcagtgattcattgatgtccttttgagactgaccatatgaaactgacatggggattttagtattcaagt

SEQ ID NO: 38911 - DNA, 753 bp, Homo sapiens
ctgccaggcaaaaagttacaggaattattaatagagatctctgaagtgtttatgagactagtttgtgatatatttaataaataccttagatatgaagtaactaatgaaaaattagaacttaggaaatagaactaaaattatttatcactgtcttaatagcaccttattaaacaatgactaaatacatatttgtatccttgtattttacagcatatattttaaaaaaattatcacatattacttcttaaggtttcactaggagaaaatgtgattatttctagcttactgtatttatttgccttatgcaatctttgtctatttctgtgtggtttcaccacttaaggatctactccgcagtgctctactcacattccacaaacctgattcatgttgttttctaacattgaaccgatctgaggaggcaaactttagaagtagtactcattaccttagatgctctctatagtggtttaccaaggggagcttgagatatgggcatactgccaggtgttgaaccaaagcaattttggctacaactgatttgtggtttaatctttgtaaatgtacttaactttggtctaagttttaggaagtcactgcaattcaatggagccaaatgtgtaagtgcctaaagacaatgactttactgcatgtgttttgtcagttggatttttttttcttagatagtgaaagttatgagtcctttgtataatttatgttacagcatgataggaaggcagttatatcgctgtt

SEQ ID NO: 38912 - DNA, 3279 bp, Homo sapiens
tcccatggcaatatcatgaagttaccctgtatggtctaaaaaggtgaggcatgaataatttaccccttgttaggatataatcgagaaataatcatacaaatggacaaccaacagccctcagggctgctatgcctatggagtagctattctttattcctttactttcttaatagacttgctttcactttaaaaaacaaataaataaatattgccatcttccaaagtttttgtcccactgaaaacacagaaagaactaaaagagattgagatattttcatttcaaaaatttatcattggttttcaggtttcttcaaagcatgttttcccctattgtttctgcctgaatttgaatatgccagaactccttagagaattatataggtaggaaaatctgtcagtgctctaaacttaaaaacagaagatgaaaaaataatatatgctggccatatatgtgtatatattccaccttatctgtgatttttgttatttctttgccttaataaaagacatcggtaaacaaagccacccgaagtttggactgggcggagcccagcacagtgccgtaagctgctgtagccagactgcctctgtagattcctcctctctggacagggcatctctgaaagaaaggcagcagccctagtcaggggcttgtggataaaactcccatctcccggcgacagagcacctgggggaagagggggatgtgggtacagcttcagccgacttaaacgttcctgcctgccagctctgaagagagcggcagatctcccagcacagtgctcgagctctgctaagggacagactgcctcctcaaatgagcccctgacccccgtgcctcataacggggagatacctcccagtaggggatgacagacatctcatacgggagagctccggctggcatctggtgggtgtccctctgggacaaagcttccagaggaaggagcagtcagcaatctttactgtcctgcagcctctgctggtgatacccaggcaaagagggtctggagtggacctccagcaaactccagcagacctgcagaagagggacctgactgtcagaaggaaaactaacaaacagaaaggtactggatattcaatctttataagcttagttttctcctaggaataaaaatagtatctgctgtgtttggcctttgtgaggattaaatcaataatgcatctgacaaactttgtagaatgattgagttgtattaaacacttaatactcatttcctataattgttactcatttcctataattgttgttttgtattagaatggtactctagccttcataaaacaaattccatgatttagacatttgaaagttcttcattttcaactgacatttatttctagttactgcatcacctagtcattttatgttcagtgttgtgacagcaaatgggtgaaatagtttcaatttcccagcatgtaactggcctttttagccttaactttcttttccagcattgttacggcagctacagcaaacatgtcagagtacagaacattccattaagagccttatctcatgcctcgcttcctatgatgttttgtatgaataatacaatgtctagaggtgaaattagttggagtgctcatgactcagcctctttttctggggagtgagtcattccacatttatagattcctgactttgtgccgtataccacactaagtgcttggaatacaaacatagatttgctgggtcattgacccagagcagcccacagtctgggcaggcagggtatggcattcattaagaacaatatgggcttacacatagccagcactctattaatgttatatctacctgtcaaggcaaagtgtgattaaatatacaataatatgagctgtctagacaacttaattctatgttttggaacatgtacctctgaccctatagccctatattggtatattttgcctaattatatcaccacaaatttaactcctttattgttttgtttggatactgagtttttattcctttgcatatcacgtaaaatcataccctccatgaataggtcagttgcctgatgaatacctttcctttattatcctgccagaaactcacacttaatgtgtctaataaagcccattatcctctacttttacccagcaacctgatctcccttcaggctttcctgtttctaagaatgtactgggagtctgtttttcttacactctcaaaattctcttggctcctttcttcatcctgtgcctttcctggccaatgaatccttaaattctttttttgtgtgtgtgagacagggactctgttgccaagggtggatttcagtggtgcaatcatagctcactgtaacctcatatgcctctggcttcagcctccccagtagctaggactacaggtgtgcactaccatgcctggctaatttaaaaaaaaaaattgtttttgtagtggtctctctatgtcgcttatgctggtttcaaactcctggcctcaagcagtcttctgccttggtctcccaaagtgctgggattagaggtgtgagccaccatgactggctttaatccctaaattctgtatggactgtaaatactgttatggactgagttgtgccccaccccatccatatgttgaagttctaagtgcccgtgtgactgtttaaaaatagggcttgtagcaggtaattaaggttaaacaaagtcatcagagtggggccctaatccagtagggttggtggcctcataagaagaggaaaagagagttctctaaatttccccacccatcttcatgtctttctttctccgccatgtgaggatatagtgagaatgtggctgtctacaagccaggaatatagccctcgccagaacctgaccatgttggcatgtgatctcacccctccaacctccagaactgtgaaaaagtaaatatctgttgtgtaagccacatgtctagggcattttgttatgttagactatattaggccatctcttgcattgctataaagaaatacataggactggaatttacaaagaaaagaggtttaattggctcacagttctgcgggctatacaggaaacatagtgctggcatcagctcatggggaggactcagggagctttttctcctggcagaaagcaaagcaggagtgggcacttcatgtagtcaaagcagaagcaagcaatggagagaacaagagagaaagagagagtagaatgggaggctccacattctcttaaatgaccagatctcatgaaaactcactatcacaaaacagcaccaagccataagggatcacctcc

SEQ ID NO: 38913 - DNA, 1499 bp, Homo sapiens
tacagatgagaaaaccgaagttaagaagtgatttgccaggtcacccagctagtatctggcagagccagggttcctccagctcaaaagaagagctctaggagaaatacgaggaagaaaggtttttaattgttgttttaaagggccagcataggcgctggagaggaaagaaaggcatatgcaaagggtggagaaacaaaaagtgatgttaagtcaagagccgaggagagggaactgcaggagaagcaaagtgaaaaaaggttaagaaacgccttgagtactgcgaggacgttaagatccaaacagcacaagaaggaaggtcaaaatcaggtgtacgaggcccgtgtgccccgccccgccccaggcggacggctgacagcgccccaccccaggaggaggcgggacttcctcaccgcagagtggctgcttccggtagaatccggaagcctgtacggagaaggggcggggccaaaactgcgcgcccaatcggggtgacgctctagccttgccggggactcgtgggtaacttgcttttgggagccagcggtatggcgtcgggctgcaagattggcccgtccatcctcaacagcgacctggccaatttaggggccgagtgcctccggatgctagactctggggccgattatctgcacctggacgtaatggacgggtaactcctccgggctccggtcgggcttgccgcgcggcggggcggatcagtgcacctttattgactgcttgttggatgtaccgcgtccctgtaccaccgagcgcctcactctgaacgcgatgctagaaggggtgtggggtaggagccctggaggctctagcaggagcagaaccgacgcggtatcctgggttgcggccgggtcccaaacctcagttcctcccctccccccacgtaacgtgtggtcttccatcacttaggacccggaagcgacctaaatctttaggacatttcttcactttcagctagagaaactgaggcccaaggggagaagcatgacttgcccaagctcatatagctagttagtggcaaagctggggaaacagacttctctaacgatttaagttggcacctgcggttaggttcccgagttctgccacttgctgggttaccttggacaagccactaacctcattgagcttcagtttcataatttgaaaaatggaactactaacagaacctaccgcttaggcatcttggaagatgaaatgagcgagtacatgagaagtttacagtgcctggcgtatattaagttctctataattgttaattacatcattattacaattctgattttcctgtctattttctcttcaggcaccctgctcttcagggaggtcagttttttgtaagtaatttttaagcaccgtagttacagcacataatattgtttggagtcaggatattagtttctgaagttggttacagaatgaggaaacaaccccagagaaagcagtaagactccctcaagattacagaagattgtgacagactt

SEQ ID NO: 38914 - DNA, 548 bp, Homo sapiens
atacaggaattaatggaaagtaggaatacaaaatacagtgttgttttcaagatttcttcatgccactttacaggaattctcaatttactgcagtaaacactgcaataactggcataactaggattcagtcagctcagtactttatattcaatgatgttttataagcaagaacttcttccactttgaaaactatgcctaaaaaggaattctctttgaagactaaaggaatttaattaaagataaagccacttgggtggctacataacacatcaaacagatcatacttcaagcagaattattacttttcacttgtaagtgcatgactcatagtcatttttttctgtgtatatcgatttggatccaaaaatctacatgtagaagtacactatcacatttgctcagtctatatactttagcttcaatttaacttcacatgaataaacactgattaatgacctactgctgaataaaaatttgtttaaataaaaacaacacacttgagaattgtcttggactggaaacaaagcctcaatattatataaaataaa

SEQ ID NO: 38915 - DNA, 3113 bp, Homo sapiens
catagataaaaaagataaatattagcccactggcaagtatttattgagcacccactaagtgatctgcagcatgtcaaacatgaaatatatttctttctctcaagcactttacaataagttaaaaaataaaagatacatcacagattagagtgaaaaaatttaaaatgcaaattaaagcaaggtttttagttttaaagcctaatactaggtgataaacaaagacataatgggaggcacacacataccactagatcactgtaaatcaatacaacattctgtaatttggtgatgacataagagccttaaaaaacacacacacaaacaaacaacaaaaacagactctttggcccagtaattcctcttctacaaatctaagggggggaaatttcaaaggtttatgtaaaaggatattgtctgtagtgaaatatacactagcaaaaccagaaacatcccacatacgtgccaacagaaaaaatttaaaatatgatagttacatggcgaaatgttaagcagctattaaaaatatttttcaaagaataatgatatgcgaatgtctgagttaaatgaaaataccatgtggtctcagttttaggaaaaatacacatatatgcagacagaaatatttaaagtacaaaatatttatagttttcttatttgcactcatctattttccaattactttataataataagatttaacaaaataatcgattgttatttgcaaaggcgcatcatgaaacaaaattaaaatgtaaatgttaaaagtcaatgtgagagaattggcctggattaagaagtttcacataaaaaattactccagacagtttgcgggagagaataatctatgtagattaaaaccatgaggaaatggttgcagacgctgacactgatctaagtaggtggaaactgagggagaaccaaagataatggttacaacagattttaaagatactcaaatatattctatttcatgattaattcattgtttatatttccccaacatgtgggcttttaaaaaattcacttttgttataaaaataacactacttggcaattggtagagattaggaatcacttttcctaatacaaggcatttcttctttcttacaatctcttaagacagagaccatattatgaaactttacaaaaacgaaacaagtttgacatcagagaggtgactaacccaaagaaatggctagttattaagaacgggaaaggcagagaccactcactgttaagcctctttctcaatactgaattatttttagagtcattttttcctagtcagaaattgccagttttgtctgcagtgctcacttcacttaggttttgtggctaacaaacctgccccatccagcaatatttaaaattattactgacccaaactcagatgaagttaagcaaactggctaaagacgaaggaagtttgtctcctaaacctcgccagaacatgaatgtcctgaagtttggggaatcaaaaacggaatgtgcttaccacagttcaaacaaaaaaacaaacaaaaacggactctcccagagtaagaaaacattacaagaacgtccatccagtgcctgccctcccgactgcaaagccagcctctttcctttcctgtggtttctgaaacggccaggataccgcctggtatttcttgctaccaaacaccacgcaatctgactttttccagcaagaccggtcccttcctcagcacaccggtgacacaaacttggaagcaccgtccctcaaaaatcccctagattctgctctatcccatctaactctaaagcccaaatctacgttttcctgaaagaaagtgtgaaataaataaaataggggtctcatcaaatccagtgggctccgcctcagagccgcctcaaaagagccgtcaccacacccccaatgggtgaggctcagccgatgaggcaagaggcgggtccaggaaaccacgtgttctgccttctgcgcacgcgccagccaaaacaaaagggaggtctgccaagccccaccccccacgtgaccggcgtccaggtccgcccccacccctccctagaccccttccctccccagctgccaaggctgttaggtttagccgtttaaatttggctgcggtcagacccccgccctagagcgcgatcccgtgccgagaccagagtccagcagcccagaggattcggggggcgaaggggctgccggtcggtcgcctgacccgcaagtccacccggcagtcttctcccctccccgcgctgccgccgtccccaagagggaagacccacccccgtcatcccgccgctgagacgccggccactcgcctgctggggcgccctggctcccctccgccgccgcaccttcggtccggccgtggtgggggctgctgaggtgatctctagctgcccgcccgcctcccccacccggggcgccgctgactcgtctccagagcgcgccccgctcccgccccggccgccgccgccgccgccgccgccgccgccgccgccgccgccgccgcggtttaacagtccgcccgctgcccgcagctccgtgcggctcggggggacggaaccctgccgcggtctgggagcagtgggcggggcccggcgctagccaatggcaacgggggaggggcagcgccatgcaaatgaagcgggtggcggggaaaccccggcagggggcggggcctgcagaagcggctcggagtgttctggaagtggcaggagcacgactcccttaactctggtgcagggtttacctcggctccctcgggacgggttccgtgcagctcctgcttcctcccttctctttcccagtgccatccctggcgagggggaaaaaaaaaaacacggccaggagacttcccacccctgctttgctatttttgtacctccgtgacagaaaaacaaaaccctgaggaaaagtcaggcgacttcattccctgccgtccgcgccggggcctcgactactgctggcgtccgcggctttcgcccgccgctccacaggcgagttttaagagatttctcacaattgtcaagtccgcaagtctccgtgcgtttgcttttatttgggccgtgcgttcaaatgcgctcataattctttctgaccctcagaggggccctgaagtagg

SEQ ID NO: 38916 - DNA, 1251 bp, Homo sapiens
caaccactatcactatcaggaatataaactaatgctttagcaaatattatttcccagaaagttaacaagtaacttgttttttggaaatggttaatagtcacttcagcaatgtgtggagttaaaatactaagtggctgagtccattgctatacccacaccaaagaaaaaaaaaacccaaatatcataagttcacttttgatagtcatgataacaaccgtaccactgtacagttgtttttatcttttctcatctcattttatcctctcagctctgggattggggagggataaatgttaatactgtttccctggtaaaggaactaaagtagagagaagttaatatatttcctaattaatggttgctatttaatggtcaccaacaacacatcattggcagactggaatgaggatgtaggtattctgcctctttttcaaatatcttttttgtatattgcaacactttcattggccaaagcacttagagctagttattgaactttggactttcctggtagacacactcaaaggcttttcttttttttttctcaagtataatcttggtgttttgttttgtttaaatttgatttttaagacaaattaaatgtgccagctctctaggaacataccacttttggacttattcttctccatattcatcagggttccttacaaagaaatggacactcagtaaatatttactgatatgatttacggtgttacaaaggaaatttacaatctcagaactttctgctgaaagctttaaaagcttgagatatttatgttttcaaacatttttttctgaacggattttgctattctctacaaaatctagcacctgcattttgagcacttacctactgtaagcctacttcagcagtcccaatgcgtttagatatatatatatatatttgtaaatgggctaggcttctttttacattaaagaagttccaatggagtaaagcagagattagtagaccttttatatgttactaattaaatttagtcatcaactaaaattaacagtgaaaggcggcagcagaaatgtttaaccacactgcagtgaagttctacatctaaggcagctcttcccagcatggcagagaaatcttaaaatgacaaggcttaaatctcactcctcacgggctcgagcctaatgagtaagacttattaaataaacccacatgctgaagaccagttattaaagaagacaaaaacaaaaaaacaaaataaaaaagcagagaaaacacctctt

SEQ ID NO: 38917 - DNA, 1035 bp, Homo sapiens
agatacttctttttatttaaaataatttaaaactcagaccatacgacaggtgaggatatttctaagcaatatattaacaatataattattaatagacaagactttggggacaataatatttggatttctctaattttttatatttggcaagtattttagtgaaatatttactgggctataactagttgcctcctgtgtttcagtgtgaaatatgagcatgtgtataaacctgaggttttcaaataacaaggtcaatggctatccaaacttctctttttccaaaaatatgtaaattttttttacactttttgccactagtcaaagaacttcttgtaaatgtaaatataaaaagtctcctcaaaagtgcaagtttctgaaaagtaattccacattatttttcaacctggcaattttgttattatgggatcattatataaagcacaaaatatttcccctgttctacctgtgattgaactgaacacaagttaatgaataatgacaggaatttattctaagttactcttgggctaatgatatgggagaatgtttgtttttaaaaagaggaaaccaaatctacttccagaatctgatttagactgtatattctaaaatcttaaaatatacaaaagtctgacatacagggatgttttttcattcaactcatctttaacaccattgctaataatctttaattcaaatcgaagtctttctaaacttaataggatttttattctcctttcacttaatagagcctgtgaaactttgattggacagccagttcttcctgaattttttcttaaaattggaaagcaccttaaatagaaaaatcctgtccaacttagtcatttcacagataacaaaaacattttcctggatggaattaagtttaattatagttatttaataaaagaatttggactctatctcaagactcctaagttttactgttccctttcagcctcactatactgccactcttcagataatttgaaattaaactattacttgaatgaatgaatcagtcatcctatcaat

SEQ ID NO: 38918 - DNA, 696 bp, Homo sapiens
tcaaatcttgccaaaggatgctttttctattttgcattaaattctaatttagtgtatttcttccttagttggactctgccttttcttttctagtccttatccagaaaagatctatttcatgtaattaatcaaagtagacttaaagggtttttaaaaaaataactttttactattacatgtttctttcctttttttttttttttgtttgagatggagtctggctctgtcgcccaggctggaatgcagtgatgcaatcttggctcactgcaaccttcgccttcccggttcaagccattcttctgcctcagcctctgtagtagctgagattgcaggcgcctgccacacatacccagctaagttttgtatttttagtagagacggggtttcaccatgttgaccaggttggttttgaactcctgacctcaagtgatacacccatctcagcttccaaagggctgagactacaggcatgagctattgtgcccagtcgctattacaacctatttctaagttttccctaagtatcattttttttgtggcttattcattcatttagttagcaaatatttactgagtgccaattctgtgccaggcactgttctagtaacttgggatacaataacgaacaaaggactaagatgaggacaaagatcttggcttttaagcttacattctaacaaagggaaactgaataaa

SEQ ID NO: 38919 - DNA, 2930 bp, Homo sapiens
tgcctgtagtcccagctactcaggaaagctgaggcaggagaattgcttgaacacgggaggcggaggttgcagcagtgagccaagatcgcgccactgcactccagcctgggcgacagagtgagactctgtctcaaaaaaaaaaaaaaaaaaaaaaaagtttgaggatcactgtcttataatgttccaaggaagagttaagtatgtatcctaaagaaaagtcaccttctcagtgacgtcttcccaaatctccccaggaaaagtaggcattttgtttcatagctctcaaataaaattagagtagcttacaccaatgctgtcattcgcaaatttgccagttccttcacccttattaaataatgaattctccatgcttccaatttgtttacccagtgaatagattttatgcatcagacagtatctgaaacttttgatcatattataaacaccaccttagtagtcactgaactacttagactctgtcttcattaatcctctgtatttagttagatttgttgatatatctaaagctaatttccttgtttgatggaaccctcgccaggtcatttctagcccagtttgtcctggacaattctggtccgcgccgcagcccgggcactgagtccgggtcccaagttcactaccgcgcggcgagtctaagccgtggggaacgccgggttcacagctcgaactgggacacagatcgcagcccgcgctcctgcagccgggcccagggggtgaccacctcctcccaaaacgcaggctcccgggtcccactgcaggccgctgaactagacgggttggattggggctccggaatgaacttctggagaaatctttcggctttccccgacgtgggctcggcggtctgttctcggggcggcacggctgacacccctttttcctccgcccagatgctggttgcacccagtccgcgggatccaggaaaggaggccagctctagcccggcgccggagttggggagcactcccagccgcgcgcgcaccgccctgcttcaagccagcgacaggagtgactcgctgccccaccccacagcctcccggcctgcagccgcggaagtcccggctggcactcaccgcgcggcgggcagctggcgcggcgcacggtggccgcccaggacgcgtagggaccctcggagaaggcgtgcggccatgtccgaaacacaggggcggcggggcgacggaggcgactctgcggctactcggcgactcggggcagggtccccgggagggaggacgatcagctgaggcgtccacctgtggtgtcctcccaaaaaagcgctcgcgcgcgcccttccggagccccaaccacgccacaggctggtcgcgagggaatacgcccgtcttggctgtcagcaataggattttacagcgaaactgctgcctttgcttgcagcattctttcttgtttatcgaagcagctctgagcctttttagcgtcctgaagcgctttgagtaacggatgaaagctatggagcccccaaatacgcgcaaatacctaaccataaaaatgtacgtgaagtttattttgtaaccttggaaattgatttacttaaagtaggctgaatagtttgagcaaacccttgaaggtgatagagttagccaggcatagctctgggagcccatgctatttattggtaatagcaagtagaacgaattaatccgacacaggatttagtagagacaggatttcaccgtgttagccagaaaggtctcggtctcctgacctcgtgatcctcccgcctcggcctcccaaagtgctgggattacaggcgtgagccactgcgcccagcccgttctgttaattcttaaatgtccaagttcaagtacatccgttgaacaattactctcgccctcagtgacatttcaactaataaaagcatgccctgtagaactctcaggtaaaagatgtgaaatatccctcaagggaaacataaatggctcaaagggttcatgaaatcctgggtgattggcttaaactatctgggtagtttgcttgacttttcatttaattttagcacagctaactctacattcataaacatatttgttcttacttcacaaaaggaaactcagtagaaaaaaactgataaacatgctaaccaaatgtgattcaaattaacttcaccaagaatggaacaaactagcattagagacacctgtattgaaaggaacaccacattatttatatactgttgggaaaaaaggctgagggttgggaagaaagctgaggcagggcttgcatgactgacataatgtcctctggaatgtgtctagacttgctggctccttgcttttagccctcctaggctcctattcccattatctcaagtagcagaacatgttccatacaaatgtaaacctccatttactcacctgtaaatgaagaataacaatatctatgtcatagggttgttggaaagatttttcagataacggaggtcaggtggttggcacaaagacaggaatacaataaacattcgataaatggtaattattattgtcatcattgagaaatactcatattttgtagtagataaaagaaagaacaaatcctttaaaaaaaccctctactttgtgtattccaatgcctattcaattagaaggcaaatgttcaagaaaaggaactgcttatgcttttcctctgatacctggtagtaaatgtcatggactacacggtcctttctaaaccccatgaaaatgccagcttctttaacccaaataactgcctgtgtctgtatctgtatctgtatctgcctgtttataaatgtataaaaagtgagtgattagaaattatatatatatttttatatttggtttgaagaataccttgatgacataattgagaaactgaaattggcatctgttaaatgtgtctgaaatattttcttttcccttatagaggacaatggt

SEQ ID NO: 38920 - DNA, 1128 bp, Homo sapiens
tcattgttttgtgacaggttattgtgaaaacagcccacttctgcctgaagatccaagcccaaggccttcctggccccagggattttgggattcttaagagcaaaagaaggaaagaaaacatgagagactttggtactgggtacgagcatgaaaagagaaggattggtaaaaaatatctcttgggagctcctgctgtgatgcgagggttagtcctgccatcccagggcaaacttcataaaagaggtcagatccaaagattgcagaagccagaagagacactgcatccttcctggttaggcctggttatgccagcttcctggactctgctggctggttgcctcaatccatgcctcagattgggtggagtctacagattgagggcaaatcccacctcctcccaacccccaccactaggcctatctggaagacagaaaagagcagcaagaaatctcagggattttctttgattactcagagggaaatagttttcatactcagagactgataggcagtcaataacatttgctttgtgaattttcacccagctacttctggatgagataatcacctttgctgctaaagaaaatcttagctcattttcttcttggggtgatggtataagagttgataaacaatttgtaagtatttatcatctggcatatttaacaaaatatctttgtgatccataaagcaaggcataaattacatttgaaagtgcattccattaaacaagaacattagagagaaagagagagagagagacactttggaccttgatctgttccaatgacatagaaacttgctttacagattggctttctcctagtgcactattgcaaaattagagctatactagaaacatccttagagtttgataattgaattacagtggagaaaaataaggtttatatttcttaactatacctttgaatttcttactactacagaggataattttcctggtccctggggttagtggtgaaaaactaattgttttattaaattcatgcctcattcttgtgaccccagattttcgaatttgaataggaatgcagtcaaggggtgaattctgacatcttcattctttacttagctcttaaaagccaagatactttatattacttgttt

SEQ ID NO: 38921 - DNA, 836 bp, Homo sapiens
ttaataatgttaacaatgacacatttaacattatgttagagctcaatttgtatatattaacatgtatttttaaataatttacgtatttatcgtcgaatcatgtatttttttaaagggggatgctcaactctctcaggcaaaaatgagcacctttccgaacaccgtggggagaggcagggatgcaggcagacatatcctaaactcaccctcccggcagcatcaaagtagccttcggccagggatttgttataatcagcataaggattcgggaaggccctttgagccatgacgccggaagcaagcctgcagaacaggggaaaaacagaaactaggttgagataggggcctcggccgagttgcgagggcggcggcggcgcccaggtatcccccttcctccagctccagggccatcgagccgtctcggcggtccgagtggacctcgggcccactgcggcccaactgctaggacatggcgccttcgcgaaaaagctgccagggcccttaacccacccggacaaagaggccccgttttgcaaccccgttcccacgcccgcgacttgaagcaagtgcgcctcccgcgtcctgaagcccttctcggccctggcctctcaccccgcagccccggacagtaacagaagggctattttaccgcccagttcctgccaggagggccaatcagagccttcgccgttcccgagacccgcccccttctctcttacagtttgttaaagacacaggcgtgtaatttctaaaggataacgcagggtattttaattactgggtagcagaagtgaggacctagaatcacgcggagatgtgaccaatatttcctaccc

SEQ ID NO: 38922 - DNA, 2684 bp, Homo sapiens
ttatgtgcttcactttccacatatgtaaaatgggaataacaacagaatctgcctcatagtactgctgaagggtgacatggggaacacctgtgaggcattcagaacagagcctgtcatacaataaatgccatgtcagtgtttgctcttattctcagtatacagagatctgctttgatcttttcatcttctgcaaaatattccacaaattggcatattgtgttttgtaataatctctattgattattttcaagcaagatttggaattatccgcagtagtttcaaatgtacaaaaaagtaccttattttatttattttttaaataactgatctgatctacgagtctaatctggtaagttttgtcttgagtccagtaatgcagtccaatactccatttaggtaaccctgtccttgcttggtcaatttgttccacttttccaagtttgacctgcttaccctattcctcttcaagagggcatctggttgtttagtttacatgatttagtggtgcagaaggaaagggtaatcagattgatgtatcctctgagtcctccttgatatctgcagagcagctgagctggtctgctctctgtgctgttgacatctgctctttggggcgttagggggtctggtcatttgtcccttgtctgttatgatctacctgcagtggttttctaccttgtccccaggcttcttaattcttcctgtactctcagaacctctgtgttgtcacaaccagacttgggttattttgggtccccagtttccaggccctgaatgccatgggctctgtctcaggaataggtatctgctggcctgctgctgtcatttctactacattgctcctttactgccttaaagagtggtcctggatcaggggttgaaagtggaagtggaaataaaggacgctgatgtgacgtctgtgtttccattcttcttcctaccacttcaccagatgtgaaaaattcatataatctgaatcctctagtttgagttatgataagttaaagcagtttaagaatttaacgaactcccctctccctgattaaatctacttgttagcactgtgttcttactgcaaatcccgttgccttgccagaagataaatattaactttttctttctctttgccttcctgttgtaataattccaaaccacccaaaagaaataggtgagtttgtggagaaggtcagtaaaataatttcaaaagggaaaagaacattcatgcatttaaatattattcccactggttcatttatgctgcaatgaatatctatatatctatgtatgtatctatcattttgtgcacatgttttagtatttttctgagtttcatcctgaaaaaatgtaattgctgtaaggtatgcacattttacatttcactgtataatgacaaatcatgctacaaagtgactagaccaatttatactcttgctatgagtcactgagagaattctttactaacaccagatattttgcgtaacttattctgtttaaattctatcagcaaacctccatagtaggtgtattcccattttgtatatgaagaaactgaggttcggagttaaagcaacttgttcaaggtcacacaaatggtaagtgggtaatttcggaaccttttaaaataaaacatagaagcctactatcttattgttccattctagaaatatgtctgtgtttataatatcgactactttgtattattttaaactttataatattgactactattattttcttcacatcctagttaagaatctaggataaaatggaaaacgatatcacgaaatggaaaaacaatgttattccttagttagcttagtttaaacacctatttaatggtcaaaggcaagtagttgacctcccatctttttgactcacagtcattagttacacaagaaaagcagaacaaaacccagctggatggaggggtggatatgcaagtagctttcacactaggaattgtgaagcctgaggcatagccccaagactcagatcatcgggagtgcactcagtccagagggacaaatgttcagagtctgcatcacctaatattacaagcatctttattgagactgatagaagtgaatttctcaggtcagaaaacagaagagctcttttagctgagttgtgatatttaaaagtctctcattttgaatttcttgcctggccaatcaaactgtcctcccagaacaaattgttggataatgaaatgcatataatgtagcttgagagcgctgtcccatttgcagcactggcttcagcctgaggcacatctctggctgctcctttctatctataagttaaagcaatggcctcagcaagcagtacactctgtacagcagctgcaactcgttatcggctttgtccagaataacaaacagaacaaacacattttgcaagggcttttacccctcttatgtagagaaggaggaattaagcaatcagtgaaatgctgattgatcagttgtgctgactaagagaagtccaaggccacattagtactattaagccctaaaaaacaaagcaaaaagaaaatgttcttagaactttatttaaaccagtatttctgtgatgtgaagtacatttcccccaaagggaaaaatgggaaaatatttgcatttcacttagtacactttactcatccagactgctttgtaatgtaatgatggttaagtatttttaca

SEQ ID NO: 38923 - DNA, 829 bp, Homo sapiens
cagtatattaattgtatgatacaaacaagatatacatacataaagttcattaaaagagtatgatttcatatggctttgaaggattgataggatatagacaaattgataaaattgatctaaccaatatttaactttaggtttcttcatcagataaaatattgcatcattttatgttggctaagtgatttgcagtctatttcaattaattattctttatagtttttctctgtcaatgccatttaataaagagaaaacttcagcagacagaagttatatgatctttggcactattggctgtgtgttaagccacagtaaggttcagttacgtattttattgttttataatcacacatttctcctttgattcatttcttatctacaccccttctttcacatcctaaatattttctttggataaatgtgtagggcaagatgaagaaaagaagagaaaaaagtagtcagagcttgggagtactgaaacgctttggactccagccagctgccatcactgaggtggtgaaagaacaccgtagtataactggatggccctggtccctgccaggagtcaggatggactttcagtgttgaagagccatcttggcctgttactagcgctgccccacaccattgtgtttgcctaagagctgagccaaagaatttacatatgtatgagccaaggtctgaaaatagaagttaaaaaaatggtgctaaattgacatatttgctattttatttttttggtcagttaatatgataaacttttatttaaatgtaaacattattttaaaaagcactttgttttaaataactgattttcattgaaattaat

SEQ ID NO: 38924 - DNA, 2065 bp, Homo sapiens
cttagtttctgttgggagtggcaatattttataactgggccttcatattcctatgttacagccctggtccctgaaagtcctacagctatctttgtttcaagtgtgtatgtgttataataagataagtgttaattagttaatcaagtactaattaacctttttaatttatagaaaaacagacatttatggacaagtaaatttttggggtcaaagtctttaataatttgaagaatgcagttatttttagcacaaatattctaatgtgaaaagaatttctttttctgagttatatatttttatgccattcagagtcactaatatagtactaataatactttttctattgtgtacctttgtttctctcatttgtcttacattttatgtctaatcatcatttcacaaaatttctatcattactgcttgacctcgacttctaacatggcaattaatttttatacacaaatttttgaaatcttgacagagtttttaacttcctcataccgagttctttgcttttttagtttacaagatgttcaagaatgctcttttgaaataatcaattacctaatgcaagataaattagcaacaacattacatatttttcttactatcaactgagaatgatcttgataggggcaagtataggttaaaaataaatgacatcaaaaaacaataccagaataaaacatttaattcttcaacactcaaaggcatgtcaggtattgaaatccaagtaggcacttttgactaattgttagtagtttgtagaattcaaggattagggttggcttccttttgtctttctttctcttcttcctccccttcttcatctccttcttgttcttcttttttttcccctctccagatcactaatcttctccaacaaatttttagcctatataaaataaaaaaaggtactcctgccctatgactcaacttacaaatctacaaacctggaggaagaaatagctctgtgatccattcctggggaattgcaataaagttttagggaagatggaacttaatgtttgtgaaagcacgggtcctatttccgatttccaggagggtggaatgtatcttcctgaatcacattccgctgaaaataggaggccatggaagaaatcaggttcagtataacaaattttctacaaaagggggtggagtaggaatgtgcgtaggtgacctgttctctacgtcattccagtgtaaactactgccccttacacttcacgaagtcggtaacttcaagacatgttgcaccacatgcttctctgtgatcctcaaatatgtttaatttaaagagggtccagtagtgtcctggcacatgatctggattgccatagataaccatctacctcacagctagggttgctctttagaatcttgcaaaatcatttgtttactcttgacaaaagttaagaaaacaagcccatcagagttgtttgttctgtcagcatgttagaagatggttttgttgcaatgataatcgttgtgcaaagaagactgatgatgatttttttttacattttcttaacagtatttgctatttagaatgaatgttgtctaattatttagccattttattttgtaaaatttatgttgtaggcatatttagaccaagttataagaaaatgcttcagccaaaattaagtgttgagtttgatttgtgtaattgttagtttctttactagttgttccatcatttacacaattatttctatttgaaatgcagtaattgttcagaacttatatttctatactgatgtctactaacagctttagatcaaatattaaataactcaagaataatgagatgatcttggcttacttagatatttggtttttatatctatagaacaaaggaattagaaaataattttgaagatttcatccagctatgtaaaactatctagggaatacatttactaggttttcaattttctacaaaacatctttcagcagaaagcaatcctgtttcctgatatacaatgtctgatacatagaaactactcagtacataattcctgaattgattattcttttggaaatcctagatttgatttct

SEQ ID NO: 38925 - DNA, 7867 bp, Homo sapiens
caaaatctcttatgaggcatattaggtatcacatgtgacataagcaaaagcctgtgatccttagcatgttggaaagttgctactctttaggataaggttgtccatgatgtctaggtcattccattcagctgcataaacaattcctttgatggatggctggttttctacaaccccagcattattttagcaggagaaggtagtatttgatgtgttgcaatttgtgttacatgcccatggaacatctctggacattacctcaggaggaggggttaagagaaggaggagctgtggctgaagacatttaatggcagaatgaatggaaattcaaagatcgctgtgcagtcagccttaaacactgactgcacccctcccagatttcttttacattaactaaaaagtcttatcacacaatctcataaaatttatgtaatttcatttaattttagccacaaatcatcaaaatgacgaggattttgacagctttcaaagtggtgaggacactgaagactggttttggctttaccaatgtgactgcacaccaaaaatggaaattttcaagacctggcatcaggctcctttctgtcaaggtaatacccatattgattgtttctgataaaatactatggggtatagtttagcagtgaagcaaaggtgtcccttacaaggcaaatacagttttgaatgtagctctgaagtactaatgtattaatgtttcctttactgtggaacctactgacttagcaaatgctaatttttatcttatctgagtaacatgacagtaatttttacccaacataaagaatgatgacaattcttgtgaacatgtaaaatgtaagtacactgcttgaaaaagaaacatcttttctttcatagatagctttctgtgactagatactattgcttacagtttggatttaaaaaatggagctgcttatatgtgtgtgagccacattatggtacacagtgtgttaaggtctgttctataaatagggcttactgaaaagttctcttttgaaatatcatttaaacattttaaaaacataattagaaaatatgtgtttttgagatttgcaggtcatcatgtagacactgctttagctttttccttttccttctggctgtttttttgggcaggctaaacttattattttcattttgtagagtaatacatagaggcagatagcagctgataattctgtccctccacaggtatctataattgagagggcaagcccaggaaagaaacattaattgcccttcttcctgccccccagcattgaattatgaaattcctgtaggaacctctgctccttcctgcaactttatgaagacgttcattatcagagaagcctgaagttactccataggaactttgccaatgaaaataatctttagtgactataagtttaagtaattatattagctttagatatattgcttctttagcagcaaaagctgtaaaatttgaaatagaaaaaacaaaagaaaacctctgtctgttgatgtgaaaatgggaactcacagtttggagtgttctgcttatactttgcatgctcattgagttgactaagcttctattgtttcagttgctcaagtcaggattcagtggggttttggtcctgacacctgcaaggccaaggaatattcatagattcctgtggctgccagggatagggatgggaaaggaatgggagtaaaagaaaaggaagagagatggagacagggggaggggaaggggagaagtgtgagggatgggagggagagagagagagaaagagagagaaactagctcaagatcccaggagaaaagaggaaatacatatagtagccttagtggtgtgttaacaacttcagcctttaacattgagaagattctaacaagagtataggaaattaccattttaaattaagaaaaccagaaaggaaaatgtcttttatgttgttacatattccaatgtatccaattttactctttttaaatggacatcatgttttaaagatagttaaaatcattaggatgtagttacataatggccataaagggcactgggagcagtcactaaaggttagtggcattatgtctagttatatatattttcttgaatttagcttaattatagcaaaagaatgggaaaggagaatattctaaactaacatcaaagacattgtaactagatgtaaactatgagaatttattgttagtaatacctcaaggtactcatgtatcagttcagagaaaatcaatagtaatgaaagttatcccctatgattatatgtgccatctaatacttcaaagttgggtgacttggaatatcttcttctcactctgtgagaaggtaggtatgtaggtaaggataggtgcatcttcatcagaccccagaaaccgcgaaattgagtacttacttaaaatggcacagatatgattgaaattagaatccaattctccaagatcacaataagtgctccatacaaccaccaccacaatcacaaccacgacaaaatggtctaattatgtggatggattactgtgaaagcagttctagctcatggtgacagatctgtttcaagggtctgtcacagtgcacagctaagaatgacaaatttgtaggagcactaagccatcatttcatggtgtaaaagccattactcacactcaatcattactggccagagttttggaggaatgccaagcacaaaaaatagaagttcttgaacttcacaatagtgaattaaaattccatagaacagcccaaggggacttgtgttattattcagttattgtgaaatagtcctctatctacttttcttcctgccttcactttaaaaactcaactgtcttagaaaaatatatccaaatttactatttttagatggacatcatattttaaagatagttaaaatcattaggatgtagttacataatggtcagtgaagggcactgagaacagtcactttaaaggttagtagcattatgtccagttatagatggtaaatggattgggaaagacaccctgtagtcacatctataatcattgccctgtaaattgggttgctttttcgacatatttagaggtttgcttttcctctctctttgatgacagagacggtgggtttgacgacagcaatgacgcacttataattttatgtggcccttccctgggtatttgtcagcggctaatatttatagagtgctttgccaatcggcacagttgtattttacttacaggaaagaggaaagaatttcaaggtgctctatattttaaagaaagttgatatcaagggtataaatgatcaacaaccataaaatactaaatactaaaaagttttagataccataatctttttccattagtactgaaaatgttcagcactcattattacattcagcaggctgtaacagtgtaatagtgggatatactctggattgggcacaaaaagatctggaatctaacccctgttatgcatttcctaatgccctgttcttggacaagtcacatattctctgaacctaagttttgtcatctgtatagtgcaaatgatgactgatttacttgacaaattatgtgattgtcacacatgaacaattctcaaaaatctttaaagttttaaatttaaaccattaaactgaacattttaaagcaaaaactggatatttaaaaaaaaattccattctatacattttagtagaaggacttagtagagggttagatcaaagagtccttatgttttttatggactacaagttgttgcaatgacaaggtatttgataagaattctcaaatatttataataatgatttgttcacctttgccttaatattaaacatctctaagaagatatttcttataataaatcagactcaaggaaaatgaagcaaataatctttttttttcagtatggcaaatttaattccaaaaggcagaatagacaccataataacctatttcattcattcattcatttattctttaataaacacggaacctctaccatgggagtatacaggaagaatgataaatagaaataagtggatcataagagtatagtctctgatttcaagaaacttacagacttcagaattctgagttcacaagtctgggaaagtcatcaaagctaaatagttttatttttacttgcaaatgaatttggaaatcaaaagtattaaattgtaaagcttaagttccctatgaatagaaaagtgttcaataagtactccttctaacattaatccactcattttttaacaatggtgacctgtgttataattaagctaggaacctaacaatccaagtgtcctctctgatacttcagctacgaatgagcactggtagtcattatttcttttgaaaggcattcatttttaagattttatattctgattttcacatagaagtatctatttagttccgtcttgaggagctattgtcatttgattagaaattggcaactataaaaactcctacaattagaataatttacttacattgtagtagctttaaagatagtcacaggaaatataactcattatcatattggagcctctgtacacgttagatgtaagagtggggatggggttatcacacacttttaagaataactattttattggacttttactacatatagacacattttaggacggatttcatctatggcaaactacatttttgaaatattaattgtgttcagtcccaaatgagctgttgcagaattagtttgcctgatggacaactttacatacttttggcatgcaatacttctctaattgggagatggcctttcttttgaacattttaattttttccattttttatatccccaattttctaaaatatagattcatttattagtcaccaacaacgccttgacattatgagcttcttgacataaaactcttgaaaaaactatagtttaaatgtcctagactaggttaagtgagtgaggtacctgagatgcaaaatttaaggaggctgtcactgttagtgtcatggtgtatctctttgagagttaggccctaagcacatcactcagtaccctagtcccagctttgggtcagaagctaagcattctggctgtagaactgcccaagggactagtactaatcttgacctgtgctttcctctccctcattccaatttgctcatgtctagccagactttctgacgatctagaggtgacattaggtcttattgctatggaaatggagactattcctctgcctttacatctgtattagactttcttcatatttccaacctgttccaaaaattgaggggtgctgtagaaagttttcagtatctcttaggcaatgggcatgctagaattcacttcaagccttcaggaggagtttggtatgctacgctgactgcccttgatgggatttgtatttcctggggcatttgcaatgacggaggcccgaaaaaagctgcgcgggccaaggtcaaagtttgtgttaggctccttagccctagggatctttagcttccatttgattttcttcatgtgatctaaatgagttgaacttataaaaatattttcaaggctactctgtttgctttttatttttttcaacttgttaaatgctatacattgatcttttaaatttcatagggaggtaactgactaatttgaagttctcataaatgaatcaatagggttgctacattatgaaagaattttactaagtttcttctataatgcagactgaaatataagaccattttaatttatcaccaccatacagtaaaaattagcttatgatatgtaggttcctccaggattctgaacaacttgccacatagcagatgctcagtaaggcatattaataaacctacactttatgaacatactttgtaatgaaatttttataaatgctgtattttatttacaatgagaaaccttattagaataaaaatgattcataaatcttaatcttttgtttataaatgttcaaacataaaagtacttaagtaaattaaccttttgattttgtccccttaacattggcttatgtttaaccaaagaccgatgacttaatattaacttggaatgttgtaagattattaactgagaatgtggtaaggcctaattgattactgctgttacagtgcttcagaattttgaagtgttaggccttgtaactgcagagaagtctcatgaaatatttcaaagacaaattgtgctgaaattctaaatttcaaaaatccatatcttaatagtgtaattccaagaataaaagaataagatttcatttacttgattttaactttttaccatattatctacacaataattacctgaaataaattctggctttaggctttctacttttcagtgcttagttcagatttattttttaagaggatgagtactgaggcgaactaatagcttagaaacatcaggtaagccagaaagcacgtatgttatatagccttaggccttggtgaaaatggaaaaaaaacatgtggggcctctactttttctgaagtgcaaatagtttacgtagataaatgattcaacagcaataccataatcccagagtaaattattttcatttttactactagctcaagggaattactgacttttaaatggtgtttttttttttttttcaaaccttttatggaatctattgctgaattagcttaaggctttacaggcagaacattttagtggtggagtctcatatctaggagaagaaacatttctgttcctcccatttcacagatatgtaagtgctgaagttaaaacaaggacacatggatgcctgtttttgtacgtaaaacaaaatatacattagcaaatttggttagaattttaattaggcttcaaacaacagatggatctttttaatttgaagttttgttattgtacttatatacccgatgccatagttgtgtttaacctggcttcagaatgttctaagtcatttcttctgctgttattttattgcttactcaagggctcatttacatactgaatgttatggcaatacgacacaaatttgatttttccttttctttttttgagaataggttgtttaaatcaaagcataaggaaggattcttgctttatatggctgtcaacaattatataaataggacattttagggcaatgctgtttacagttgacgtatttcttccatttcaacctaaatattgtcatgtgtttgtaacaaaacatgctgtttttcagtttcaatgtgtttcttcctcttatagtcctgtaagctccacatatacaaaagcctaatgcaattttaggctgcaagaaaagtctcattttgacttgttttccatcttgatataaaagacccgaagaaaactggttcgaagtaaaggatcgatgtccttagaattagttcagaatgctgatgggttgtgaaacaatacatgagcaatgagtagatgatttttaataacataatactgaatgcaaaggagaacctaacaataatgataaacactaggctgcttcaaaaacttttatagattaaattacaaattatgtttgaattttgactgttacttcctaagactaagccctctcaatcagtttagcatagcaccagggacagatgctcaaacctttttcaaggggaatgtagctgtgtgactctcattaatagctgttgcattattctgattctggaaaacactttgaaacatctacccttttaaactgaatctcagactgagtattaaagggtaaaattgcagtcacttatttgtggtcccataaagtttatgaatcatcttactaagaaatgaaaatatatccataaatgtaggcttacaatgaattttaattgtgaggaaaatttaaaacccctaaaagagatgagatttttagagaaatttcagagct

SEQ ID NO: 38926 - DNA, 835 bp, Homo sapiens
agcttactcattccctagttagctttgtatataaatcttagtttttttcaaattacttagtaattgtcaatcttaatagccctagtgaggctaattggtatcaacagatggggaaatagggaagctgaaatgcagaaatatgtaacttgaccaagatgatccagtgaaatgactcccaagctagaattcccatcataatttagaatgggtgccagaatcaatggagcaattgataaaattcctccatgtaccagataagtggacacatagcgagaaacaagaacttagtttttcatgaattgcatcagtaaaataaatgaaaaggaggcactcctatactctagttcatatgaaagttctgcacaaaggtgtttccaagcagaatgtttttcaaagcttttaagaggtgtcaacaacagtttaatgcctcagaaactggcttacagacagccatttctggcaaggtggcttgttgcaagttcaaatgatcagaacaagaagaggaatgtttccaaagcctatcaaagagaaaaaaatgtgtttgaactctgtctggagagaccaatgcccagtggactttgaaatcattccaataggaatatgcatgggccagattagaaacactggtccagactggtctcaggcgccctatttacagaattaatttgtgattatttaacctaaagttttggccaagagctcaagaaattcttggaatggagttttaaagccatctttcaagtcggatgcttggacccaagagattttttacatgtctactgtagcctaagtgaactctgtgagagatgatttgctaatatatttatcctctctt

SEQ ID NO: 38927 - DNA, 690 bp, Homo sapiens
tttacagcagagctgcgaatcttgtagcagtaatactaaaaattaaccatctaaatgatttagataaaacattcattaacattctcaatctaaggatcctctctagttgtccctcccacctctttgtgtccttttccagctctgattttcctctttagcactttttaacaaagagtggatgaagcctatttcaactgttcagaaaggcttctcgtgccagctgatagttgctcaagtgtaaaataatttcataaagatctctgaaacattctttagcgccagactctccttaaacaagcagtgtttctaagacacgcattgtcttagtgttgtagaaacatgtttggcagcagccaagtctagtgctgataagaagctacaaacaataagcacaagttgttctttcaggtgaatcattatttactagataggtcattctctttggagccggaagacctgacactcgtctggtatttgccaagctcttaaccaagttactgagttatttaataggccaagaatttagtgttctgtataattgggattctggtgtaaaaataaaatgccacagatgccaaaatgctttgcaaacttttaagcactgttcagctgtcacttatttttgtgaatgtcacaagaataaaagtgattcactgatttgaattacactgcttgtagcaaactccgagg

SEQ ID NO: 38928 - DNA, 927 bp, Homo sapiens
agtgttttttaataacctaacagtgctacacaaataaattatagcaaaactagaaaacatatatttttaaaacttcaccacttcaaatattattaactctagtatctgaagtaatgttccgatattttccaacatttaagtatagccgaacatcaaccatgtagtaaaatactatactgcagacttaagcatacattcctttcatttctgtctagttgctacagggcgcagctattcatatctacaaagccagttagatttacatgtgaggggcaactgggttgaaatgaaggttgcatcaccagagaaagcatgtagcacaatagaacaacagaaggattgtctcaggcacctctttcctacattgcatggcttgtgagtgtgcaggtttttttttttttttttccagatatttatcagaggcagttactatcattctttttgttgtagaaaataaatggatgggtgggaaaaatgtcatgagtagagcagaaagttatgtgtggaatgaagggggaggatgaagggagggaataacttaccaaggttctttaaatcatgccagcctaatgaccttgcatattttattaacacatacactttccaacccccagagaaacttaaagccttgtgacaatgtcagtcttctgaaaagattaaactataattcttttaaacttaacattttaaaataagtaaaaataacatttaacagttttttgacacctttgtatatgaaaacatttgtgtctacaattttggtcagtttacaaattacaaatgttttaaactactacacacactcaaatgtgcaagggaatatgacctagaaaccaaaaacaaatttagctttcctggccaatatataagtcagtgaaatttaatggtagctcaggacatttttataggaatgcgtgggatgacatg

SEQ ID NO: 38929 - DNA, 1038 bp, Homo sapiens
agtatcaagggtagaaaaactaatgagcaacacccaggatatttggagaaatagagtttggttatttggtcaggcttaatcccccataggaagaataccaaagtggttggcacaagggctgactatgacaatatattaactatgtcgtaacaaaatacctccagaaggggctgttttatattttgacaactacaaacacacatgctaaaattagataatattttttaaacttttttataagaaacttaccaaagttttactagtaaaggaagagtgatgtgctcatttttaaaaattgtattcagtaattccacttattcaacccaaagcatatcatgtaatataatcacataattttcttatgaaatctatagtaggaataattgcccctgttttactgaaggcaaagagatgtcatgtgtatatttttaaatcatgggtagatttaaaactaagactggaaagttttggctcctatacacactcagtgctaataaaactggttggacgaattaatgttattgactgaattttactgctccctaaaacatgtcacatttcatgatttttaggtcttagaaaatcttctcagagctcactgcaagacaataaagaaaaacacttctgtaaatagtgttaaatgacacgtggggccagcaaaatcagggaaaagggaatcatggcctccagtttatttcctgattcaagaaatgactcactgtgtaactttgtaaatgttgcttaaccttttagcattccagtttctgcagctgaaaaacagggataatatttgtctaccatacaatggtaaatgctctggaaataaaaaaaaattaatcttgtatcaagggacagtaaagctggtttttcatgtacttgagatatcactgacacattcacaaagcagtttctgccaaagttgtatggttaatgcttccagatcacctccctaaacaccacattgtgcactgaactctttttatcccgccttgaatcagaattgtgatcgccgtggggtgtgttctacatgactgatag

SEQ ID NO: 38930 - DNA, 1361 bp, Homo sapiens
atcaatgattccttcgacatattctaaaatgtatatttatattttaaacacaactaacttccctattagcagagacctattttaggtgtgacctgggaaaggattaactgcaattcctttttcttctgaatcttcctttagagaatttgtgggcaagcagcttcctcattttggtggtgagcaagcataaggtatttgtttaattgaatcagagtagactaatgtcagaaacttctgtttcctacaatatattcaaaagggcaaaaataaagagttggtttgattattttttcttttcttttatgtattctgtttcaagagcacctgccaacgataaaaagatggacggacagtgaggtgttttatctgtttatcacatgtttatctgccagtccaagtcctttgaatgctgaactgttccaactgcacaggtgtctaaagatgtgaattagaaatgagtttaggcagcagatgctggaatgtcgttgaacagttcgcttgaagaaaacaaaaataaaagtatacaaagttcataatactttccttggtgaatattaggatttttgttttcattttctctatgccttccccccaattccactctctccctgtttccatgtaatctgagtttctctttttagcttttctggtaagtatgattttgcctccactttctcagatatcatcatagtatcataaagtcttgaaaggcttactttcatagacatttttctccccacaactcaaatctttccttccaaggatgcatacacttgagtacctgagtgagtctcatgtaccttggagatactctgtttgagtgctcacattctcaagtgtcgcagtccccattttaaaggtagaggatagaaaatggagactagatgacttatgtattctcacacggtgagtcactaaccttcctggaagagggacccattctccctaaccattcatgcaaacctttttttctttctgcttttgcttgaactttgtatccccatcaaatacatttaggtgatagagagaaacacacacacacacgcacacacacactcacacatatacacccctaccttggcatcattgaagcattatccctgaactttttaaacattaagttagcatttgtaccgggtcaatactagtttccctgttatgcaaacccacacccatgctaagtgtctctagggctctagggttaggaacacagtgataatatgactatttggtttcagtgtttgtgcacaaggagcctgaggtcatttcaaaaaaaaaaaaatgaaagattctgaggaaagccttagcaatgaaagtgacagctctctttttatcagtgacaaagaaaaagaagtaactat

SEQ ID NO: 38931 - DNA, 573 bp, Homo sapiens
aggaagtcaatgcccccactttgacccttattcaaacctcaaggtttcaggaattcccaaagatttagagtagaagtacactgtgccctgcacacagtaggtacttcaacgtttatgtcacactttaatcatcaagcacaatcacaggactccaactaatgcttccctcagtgcagcccaaggcacattcagcaatctcactcagaacaaccaggagagatacttaacacaatgtatgcccttaggaaaaaaaagtagaatagcattatcaaaggctctgatttctagatacaggtgtgctctgactttttcatgctttcctttttctctctgaaatatgggaataataccccctgtcactgagccactggaatgttgaggagacaatgagttagcattggaaaacaattcagggtgaaaggtgcggatgtgagctcaaggtatttgttaatgttattactcaatccattctggcccagtgtggaaacaaaagcaacttttattacaaataacacaacattgttaaaataaccttaggaaagagagaataaatgaatctaccaagataaatag

SEQ ID NO: 38932 - DNA, 989 bp, Homo sapiens
ggcatgccagtacatcttctggcaaactgtgacaacagtcttcattggcaaccgagagaacaaaagaggatttttctaaaggtgatgaggcagaaaagggaagcagatggccctgaggaacacggagaaatgtcaagggaattggcctctcttcttggcactttgaggcctggccatgaggggtatgtgcctgttcattccctcacgaaaagcggagaaggaaggatctagccgattgcacactaaagataacttggaaaaggaacttgacagtcctagggaagaggagttgcaacataaactggaaagcagatgaaatccactggtgtgatgaaattaaagagacttcccaaatatgctgggaaaatcagtggaattttcaaaccattgcaaagttgtttcataagaattagattaactaatattaacttgtttctggtatgtgtccagtactatgctaagtttgacatgctttgcttcagttaatactcaatctagccctaaggggtaggcactaatattgtccccatcatgcagaccggaaaattgagatttacagaggttaagtctttagtcttaagtaattcatggaatgcaaagtacagagcaaagatcacttacccagaacttagctaggaaaagaagtgtgttcataaatacacttgtcagtgatatttaaattctaagaaaactttgctcacatcttcttgaatgaattgataactagtataatgtctggaaaggcatgtttctctgaggtcacattgcagcactttcaaaagggtttccctcaaaggtgtttcatctattagtatcagcaaaaagatctcacagaatgactaatttttagtaattatgaccggcaagtctttgttgagtcactctcttcagaagtaacaccctgattcatcagatctgtttttaacattaattatatttaacatctgacatcttctttacctctctccacatcactgaatactacggag

SEQ ID NO: 38933 - DNA, 699 bp, Homo sapiens
cctcccctagacaggagattgtgtgtatgcaaatacttatacaccaagtgcaacatatatttgcataagttcacgaattcccccaaagttcatttacagaggaccatgtaaaaaaaaaaaagccctcaccttaaaggattatttcaccctgttttggggttgccaagagctttaaaaagagagaaggagtgcagtgatgcatgtgcttttttaaaaaagacagcttggttctttctatgagttgttgaacagttgaaaagcaaataaacgtcagtggatctgaatcccaacattgtttaatgacaaccctgccatatttgccaacttgctgcttaacaacaatcctgttgacactgtgtaaaaagctttccaggtcctcccaggtaaataacccactcctaccggtcacctggccgcccagctgagctctttcatgaatacacacagaattcatgaagatgagtcattcttctgccaaatgtaccttgatgtattatagcttttacttcttcatgctatcatttcatacactaatctcacaaagacgattgtaagaagaaagtcaatttaagtagaaatctatgactgaaatgatataaagaataaaatgtccctatttgtgaaaattgtaaacgcctaacttttctgaatcatttgggtttgcatttctctagtatgtgtagcatatttgataaatga

SEQ ID NO: 38934 - DNA, 551 bp, Homo sapiens
tgttttttactccacagtggaatacaggtgtagcagattgccagtctgaggtaaagagaaagttgtctgagtaagcctgttttggaagaagaccagcttacactgccaaatttcctgagcgtggattttatttcatataagagcaatctactttgaactggtgtttggcaaccatctgcttaacgtaactgtaagaggcttgtgaagcaaattacattgtgaaattatctttttaataagagcagtacaaaattcttaacctaacttctgtaagaagtaaaatccagctgagtgggtatgttcccaaagggacccacaaggattcccagaggtcactaaggacgcttaaacaaggtcagaaggcaaggctgctggcggctcaacagaaagagataaggaagagagcaggatttctatcactgggcaacggcaacagagggagggaggagccaaagcagtgcaacacacttcagcagctttaccgggtctctgaagtgaagcaacaggggaacccaacaggtttccataccccaggttcaaacatccctggg

SEQ ID NO: 38935 - DNA, 1006 bp, Homo sapiens
cttgagaaggtggtgattaaaagttagcaagtggttctgcagtggtgagacgtggggtaaagaataattgctaacccaaactgagggcaacaccaaatgctaacttcaccaaattaaagaaaacaaaactgcttagtataggaatcattactccactaaaaacataaattacttggacttggaaaaaaacttttgaattttcacctaaaacactgtactagtgaaccttatgttcagcaatattcaacaatacttcttggtattcaaatataactccatgtgagcatgtagaatccagggaaagaatccctggaatgctgtaactgtttgaatagttcatatcctgcaaatacctacatccaaaaagaaaaaagagttggaagaaagctgcaaatgttactaatttaccagtactaaataccaacaaaatatagttttaacaatgcaaaataatatatgatatgatgtatgatttacaaaaaacagactaaaataagctctaaatttctgtggacaagatgaatgtgtgtggctgaagggaagcaaaagtgatcctgatcccatggtattaaggtagttcaggtgagtatgattatttttcacacataaacactagcccggaagctcacctttactgcatatccctaaagatgtccagagattgctaggcttcctcagcaacgactacagggactaggaactctttcagagagaccccctactctccagcctccaaacagtcaggcactagtccagcagcccttggctgtgctcaagcaaagaattttaggaatgggtaaaggaatggcacattccctagagagtttagtgtggaatgggagtggaggggggaggaaaagagggcacccttcacatccctgtcaatcaactattattaactattatgctgatggaatggaatctaacgttatactggctaagactggctttcctccaggttcaacactattgccaaaaaacagactgtggttttattaagtgatct

SEQ ID NO: 38936 - DNA, 818 bp, Homo sapiens
gcagttggccaactccctgacttgtattgacattttaacctaccccaagttctgtgtaagcacctgttcaatgtaaccttaatttcctgccagaccatgcttggacacaaatgccaagcctacttaatacagtctgattttgaaaatttcataaactttggttgtgctagagagaatcatttaaaaaaaaaaaaaactttgggcaattattctcatgcacaaacgccacacaacagaacataattctcagaaacaaaagtaaactgtatgagatgacaccccctagctttgattcacataatgaaaagatcgataatctaactgtattctgtggggaaaaaagtttaagaattgacaagtcctgagaagatttttacttttttttccccctttggccttggtcctttttgcctttagtttcaaaactctcactgcaccagcagctaaattattcacaatgagccatttctgtattgatcgccaagtatatttagccctggctcctggaatttctccattacttactggaaaacaggcagcttcacttcttgtctccaaaaccacttcccttctccctcccctccccttcttcaccaccacactcccttaccccccccccaaaaaaaaacttttatttctttctttatggaataatcagatcaaattcccaactcagtcactacatagcacttaaatttcaacctgctgtactgttatcacattcttttaaattatgattacataaggctttaaagaaagagatccgtaaagtttaaaagaggagcagtttcttcggatattttacaaatgagcttatc

SEQ ID NO: 38937 - DNA, 3051 bp, Homo sapiens
tcccccttctctctttccctcccttgccccctccaagccaagccccctgcagagttcaaggggaggaggaaggaaaagcactttacaggtgggtcattccaagcccaaatccagcaaacagatcggctgataaacaaaaccaagaaatgagagagaagaacacccccctcctcctcctcctcctcctcgtcctcctcctcctcctccttccacccctccccctcgtcccttagggatggtctagtaggaaaagtcactcaggaatggcaccacgtactttcaggaaagaggaaaaaaaagagagagagagaggtcagtcagtgctatagcaatgcgattaacaagagaaaaaacttgatccaccggttccttaagaatcgaccaaaagctaagacaagaaaactgaaagaaaagggggggggggcgggtagaggggagggacagtcaggcagaacccagctaggaacccaggccaacttcacaggactgtttttggcccttggcaaaaaagaaaaaaaataaataaatcttaattccatctctttcgcccatactagaacctgtcaaagtgatttaactgctgcctgtttacatgtgtcataccagggtttttggtttttttttttttttaattccaacaggatctggatattaccttctatctggacagcttcaatttattccagcctacccaatctttcttcttggaattcaagttaaaacaaagcaaaacaagtccaaattcatgacagctatagagatgagaactgattaatcgattaacatcccagaaacagattacaaggaggggacgataaattaaggcagaggacatcatcttcaacccgattccctgagcgtcctttacaaaaatcattaccctaatcagaaccacaatccatccctcccagagaaaaatacctatattattattattattactggttaacagcaacaagtcatttgatcacatcacagtgcaaaacgagatgctatataattacacttaactttgaaaacactcccccctttgcaaatcatacacatatttatatataatctatgaatcagaagacaaaacaagagctgttcttcaccacgcaaaagccaagcggagatttacctcagcagtgcatgcagtaaaataatcccatcacccttttgtttgtgtttactgttaatgtgtcctctgtctttctttctttcctgtgcctaacgtgtgtttgtgcactgcagttggtggtggaaactaaggcagtggatctgtagctaagggtaatcctgtttttacttcctccatcttcagcgaggagcagggttagcccgggacagctggtcaaaccccgagaaaccgatccggtggagcccgagcacatctcccccgccggccgggctcgcgcagacgcccgcgggcggagggcgggctggcggcggctgcggcggcggcggcggcgggcggctggcggcgggcagcggagccccgggcgcgggcgagcggacgtgcgtgcgcgcgcgtgcgtgtgtgcggggcccgagcgcctgtgcgtgtgtgtatgagagcgcgtgtgcgcgcgcgcgcgggctggcgggcgcgtgtgcgcgtgtctgcgcgctaagccgctcggcgcgctcggcaatcgattacaggacaagtgctgccccggaggctccgcgacgcgcgcactccctcgcgcccacccgcgcgcccggccgcgtcgcccccagcccgttggtccccggactgcggaccccgcccccgacgggggccaggtaacccgcttccgagtgtgccacggcgacccccatctcccctccccgtgtcataataaatctcacgttttctgccggctggaggcttggagcggtgaggtgacgttcatttcggccgcgtgaagttttctttcaaactgggattggtggggaggccgggggaagggagcggggcggcgatcttggcgccctgcgcggagtccgggagccgcgtcccggccgagtcggggagtgtgcgtggagcctcccacctactggtctccgccggcaactctgcggccccatttcggaaagcgcaccgcattgaccgggacctgaagcgggataagaggggtcctggggaatagactgagaaagacattcatgtctgagatgaagctcaactattactattttgaaagtgctttaacagtgcaagtttaaaaactaaagtgttgacttgctttttctcccccggggcatgtgccacgtcttccaaagtcaaaggaacggatgagtacaaaaagttgctacccttgaagtgttacctatcactatcaaccacagcttgtttatttggaaagaacttaagtgaaccgtcaagagaaaaacaaatgcatattctttctacaaatagtagcatttagtatctttcctgaccacatttgcgaaaagagggaatagagacttctataattaaagggaaaaggaaaatgaaaggagctgaaaatagtgaactgtgtagtctggatggctgaaatttgaaaacacatgaaattatcaggactgccaaacggtgttcctgagaaaccatatcacagattgtgaagaaaatcaatgctagaagagtcggaacaggcaccgtactcttactcctttgaagaatcccagaaatagttgttgaggttttttttttctgctgagaaaaaaagatatattggaaattaagtcatcaacagtaccttaagcaccactctgtaggtaattttggatagtgtcttttctttacattttgatatagggaaggaattaattcacatcgacacaaacgaagtaatggataccatataacttgtgtgatactgtagcttttataatgaattacttcttgaaagttttttttcctatacaatgtattattaaacaattgtaacgatagtctctttttgtttaactatagaaaatggtagatagtgtggtacagcaaacaagattaacaaattttcgttggagagaaattatttgggctcaggcttgcaataacattatgatgattttaagaaaaattgcagttcctgtgag

SEQ ID NO: 38938 - DNA, 780 bp, Homo sapiens
agtcgtatttgggaaagtctgagtagagaaccagtaagtcactctaatcatcccaacagagagcaaatattttagtcttaaattacctcaaaaaatctgtatgtcgtttataatatgtaaatgcacaatatgtaaaggataacataagttctcgaaattgtcataagtccttcctaaaaactgaacctaagtgtttaggtatctgtactgttacagagatccttgaaaatatgaaataaagataatcgaaattaagatgaaatgtctgatagtttacacaatgtaattatttggtagaagaggatccattgtgaaatcttaaagatacatcctcacagttaccaagttgatgtagtccttgcccctggtttattgaagcttaatttagcttccttgaagctggtccttttcaagagttaactttcactggctgcctagtcaccagaggcacactttctccctctagtggctaaggcttcagacactacattctgtcaccctgcctccccctgaatggatcccagattttagaataacaaagatctcatgaccacctgggagaattggaccatcttggcaaatgtttccctctttttaacatcctacattcctttcttatttgcaggttatggtgtatctaactcatccagagaaatcaagattatgttttcataccaagattgggggttttatttcatgcctgtggagtctatagtcctaagattcacaatgcaatccactcatgggaaagaacccttgcataaactgtaattcactttg

SEQ ID NO: 38939 - DNA, 1049 bp, Homo sapiens
atgattactcaaagttaaccagctagctaatggtagaactcaggctagatagagagaagtcatctggaatcatagtgtttcattctctaccctgtaattatgcctttgatgaaagataaaaggacatggcatcattttatgtaggatggtaaaatcaagagattaccattatcctcatcttactatatgaagtgggccttgtgacctatgctactgaaggagagaatgaatattttgaaaaggccaaatataatcgaatgtgtatatgttttccccgttaaattttaaaagcagtgaagatcactgtcaagtgaacctttagtttagctatgttttatcttaaataattgatagtagcctctagtcctttgatttataaatgggaaaacatgaaatagttatttttaagagtgatttatggctacttttgaagctggttgattgatttatccaccagtacttcctacaagaattcgaattcagggtaaattcagaaaataataagagaaactaagatgcaaaggggaaagaaaaatatcaagaaatcttggttatgaaaaagccacaattgaacacaaaacttacttctgcaaacatagtaatcagataaaagaggaaacacagtgttggttacatagctcatattgtctgggaaggctgtgaaatcatcagcccagattaaaaaaaaaaaaaaaattccaggtcagtactccaagaggaatttgacccaggggatactggcaaaagtaccattggctatataattatcaagatctttcaatccagaaggcctgctgtcaaatccaggctcctatgatttactctgttacttaacagttggacaagtttcttaatagtctcagttttctcatctgttaatagtagatgaaaataataaaacttacctaagttttgtttttaatatggtttacatgagttaatatttatagttgatcaaatcaagtcttagagcaatgcctcattcatggctaagggttttatttgcatttctttgataagcaaatgaatattctaaatagcagttttac

SEQ ID NO: 38940 - DNA, 1629 bp, Homo sapiens
ggtacaggcgtacaatgtgtaataatcccagcatgggaactttaaattacttttaaaaggagacattactgctccattttgtttacctttcccaataaaatgtaagactcaatgagcattctctcagttatttgaaaaattattttgtcttactttggcataatttttggaatgagctttctgcaatgttcattggcctagacattaattataaactgcttgaccttaattgatttctcatccatctattagtccaaatccatacttcgggtttaaataacttaaggaacatgatctgactcatgaaaaacttccattgactttactcgagtctgtgaaattttgtcagacatccagaatctaattcattgctacatcccagaatacaaactacaaacgagaaactgatgaactttgtaccaggtagcagggtaatgttcttttaatgtttttcctggtttcaataagatttcttttataaataaatagcatttataatgacatttagattcctggtagatagctattcacttacactagagacatatgctaaatgattttcttacataaaatattaacattactgcttattattatcattatttttagtttcctttaaatttactttttatgcaccccagttaagtgcagcctatgtacagaaacaataaatttttgctggttgtttattcttaaaatatttaggcctagtttcaatggctatagtggatagctgaaaaattttcctcatgttgttggaatgtaggatgaatcaaaaggaagttaacaattccagaaagatggcagcatgagggcacatattccacccccgaacaaaaatgtacttctttgattggaagtaaatcaatgacaggtacagtgcagtgggatgcagggtgcacaggggagtaatactgatgtcgggaatgataccaaacacagaccacaaatcttaaagaagttcttccaaatatggcagcatttagaacccatataccattttttttttccagggtagcacagacttataggaaagtgaggaaattctgggaaatcctaatattagagagacaaaggttggcgctgcaggcaggctctgaggaatgacggggccttgagcctctttcccaccagagttcaacaacattcctaggccatgctggcatctctggaatgtaaagtgagcactctgcccctcctcactttgcttctctgatctgacattttcgtagttaccaagttccctcagatgaaggaagggagaaccctaatctgaagaggggaggtctgaagtggacaggaacagtatcaaggagaccacaggaggcaaaacattaaaagttgaagaaacagcataaataacagaagactgaaactaaggtgagcggggaaagcttgcactctgcaagcagttagcccaggttccagtcctagtgcactgtttacttacttggtatgtgctaccgagcaagtttcttgacctgtttgtgcctcagttttctcatctataaaatggggataataacatgcatgtaagaattaaaagataatatgttatttatataacaagggattatggcaatacctggcacataccaagagttctgtaaatgctgattgcttttatta

SEQ ID NO: 38941 - DNA, 2114 bp, Homo sapiens
ctgttatacttgtcttgaaaaacattctagatttaagtcaagattgtttttaaattttcatcatatgtgctaaaacaccatgttctaaacacttcctaattactgcatatgcaaaaaagcaattagagttactttatagttagaaactggaaataatactttgactctggattataggaaaaggtttaaaattgagaaataatattagaatatggactataaggaattaggctaaaaagagccttttgtgaaataaaagtgaaataaaagtgaaataaaaggcagtttaagcctcagttttgtttatcagagaccaaggttggtgacttgttcagaataccatggagagaagacagcaggctgtcgtggatgctggagttcacgagaaaggtaccttgtagaaacatgacaccccaaatcagcataattatgtgaaagtcaaaatttattagaaagaattgtttctgggaaaaaaagaaaaaatgactgggaaggcaacagaaaatgtgtataaaattaggcagagaaatctgtttaaaaagtacagaaaaatcataacagagaaaatagttttttggctggggcaattgttaatttactgtaacaactgaagttgagaattgtacaaatataagtctagtaaacatgtattcctaaccagctgccctacatgggcagcattgtagatgtctccatgagagaagaaaaattgaaaatattttaatctattttatcttaaaatttattcctatattgaggagaagtgctaagtctgccgaattgggaggaacccaccaagagtgctacacagaaattagtatcaatgtacccctatctaagcagtaggcattttcatgagaaataaatatataatataaataaatttattattacatacccagcagcaaaggtttatttctcatggagacttgatttctgcactttgatagctgatatatcctaactgcatttgtctcatgatttaatggtaaaattttttattttccattaaggtcaggaattttagttttggacaatttttttttttttaagaattgccttcctggttccactttgactccattactaaatgaacatttaaaaactttctttaaaaaaaagcaaaaaagagcaaaacaaaagaaaaacagaaaagcccctgcagatttcaaaaactctactgaagaaaaaaagcaacaatgaaagtcctctactgataacaaaaagggaaaacaccagtttgcttgaggagctaagctttagtataacacaagcttacgagccccttctaaaaaaagtggtcaaatgaaaatgcttcagagattgctggtgtattcttgagaaaaaaacagtttggttgaaagaacagttgctttctgacttctgctaaaaagttgaattccaacatagttgtcagatgaaactgtacaatccaaatctcctcttattgacaatggaatctggttttgggtaagtgactttattactcatctgttagttattctttgaacaaaagcagtcttgttgctcaacctaaaatcggaacagataaacgtgtaataccctttgcactgggacttggggtgttgccaaagccatgttaagaattcaagactaagtgccataatattaaaggcagaatatcaaattcattcacacttaaggttcataagctgcaaaaatacacaagtaattccttctcctgagataactccattttaaacttttctatagttaccaaactggaaagtttagtttttctaaaaccaagccatcatgtgccttattgacacaaggacagccagaaataactcacactagaaaaatggagattgtttcagaatattatgaaatgagacaaaatggtcatatttattacacagattagaatgaactatccacataaagaagagaagcagtttgttcctagtatgcgtgttgtcaataaatgaaagaaacagatgtaaacaccaagttctcacataggtacaaaaccgaggtggatttcttactctacatattttgaaatcaggaacaagtatgaaggcttatttttataacagaacaatattagttgccaggattttagttttgatttaagaataattacatat

SEQ ID NO: 38942 - DNA, 1082 bp, Homo sapiens
aatactattccaagtcttagtatatggaaccaaactcaaaacagatgtccagctaaatgcattaaagatcacaagaaaggaattgacaaagctgaacaccatagttcttcattgctaagcatctgaggagcgtctggtagctcccctgggtcagtctttctattatgatttctagaactttattttttcattttttaaaaaattccaggtgttgagaactcaccttttctagtagttttccctgggaacacttggggatctacaaacatctgaaattggaggatgctaatgggcaagaatcaagagaaaggtaattcagagacgacaacgaagtgggaaagaaattacagggtcaaagcgaaagaaaaccaagctgcttgggtaggaaggtgcaatgcaagccaattgtttactgtatcttgtccgctcccagagctgcgcccgagctctcgcgttaactaggcaacatcgttgccacggtaactgggaggcgcgggagggcgacagctccctggactcccggtaacccttacgtgcccggggctggtccgtggggcggggtgagagatgccggaatctcgcgagagctcccgggggccgttgggtagcgtcttcgctgttgcccttagggacggctgtgggcctgctgggggtgggggcccgaagcgccagagatggctgctcagcgagggatgcccagctccgccgtgagggtcctggaagaggcgttgggcatgggtttgacggcagccggggacgcgagggacacggcggacgcggtggcggctgagggcgcctactacctggaacgtatccttcccgtggaggcgcggcccgctgcgctggcgggtaatgggtgttgggacgaaggcgagggcctcccactggcggcgccttttgagccttggggccactccggaggagcctctgttggacttcaaggtgctgtttttgccaccacagtcttcctgagagccactcactgaatttctcgcccttagtagcccagggtgtcctgtacctgttagaagagttgggagaccttccaaggcctcatacttagtaaccactcagtacatttt

SEQ ID NO: 38943 - DNA, 937 bp, Homo sapiens
caattttgtttatcttttgaaaaaaccaacatttgttttattgatctattgtattgttttgttcatttgaatttcatttatttctgctctgatgttcattatttttctttcctctttactcttctctcctcaagtggaaggaaggagtctctcggggttaggggaggtgtggcacaagcactcacttggctgccctggctggtatctcactaagtcatgtgctcctaatgtccactggctctgagcccagcatagcatcataacttgccaaagaattacagtccatgtggtgtagactgcctttcaagtttatttagtaccccagaaccctttagcccgtggtggtgaggctttctggaactcaggttctgactgctgggatgggcaagtcccctcttgctagggctggttgaaatgctccctctgggtgatggctgagttctgcctggtgttgctttctgccatgatgatgcagcactattttcgaatgtaaaaaattccataattactacagtctccctcccacaggacagagattttctctccatgccacttggccactgccaggggatgggggaggtgtggtgtcagcaactcaagactgtcttttctgccttcttcagtgcctctttcagcaatatgaagttaaagcctggtattgtgattactcacttgatttttggttcttatgaagttgcctttttgtgtgaatagttcttcagtttggtgttcctgcagggttaatgatcagaggtgtctattcagccatcttgaactgcctccttccaaattattctttttgaactttacaaaagtaattttacactctacccctttgtcaggatttttctgtagccccaaaatttgcctcaactcaccactattgtgaatgtcatagcagctatcagtaataaacatcagtgttgaattttgtttt

SEQ ID NO: 38944 - DNA, 2096 bp, Homo sapiens
cagactctaatgttatctgaagccaactctcatcttgtctgcttgataccagcccctctcacagacttaaggatactgcttttgtaatcgtcccgcttttacctccattgtcagttttttccctcttggctgagtcattcccataagcatacagatgcacaatatctcacattttaaaaaaggaagagaagaaccgccctagatttcatatcttcttctaagttcatcttgattccctgtgctttgctttagagcatatctccttgaaaaaagtttgttgccacttcctcatttcctagtctctcagacgtactctcagtttggcttttatctgcatgactctattgaaaacttttttttttttaatagtgactttcacagtgccaacttcagtaattgattctcagtattcttttcagactcctggcagcattcgtcactgttgttcagttcttcctttttagaacactttcttcatttggcccctgggcacagctctcagattctcccactatttcacgggcctctcttgcttcgtcttttttggtagtgttttcttttcccctcaacctggaagcagtgtagtgtttatggctcactcctaggacctcttcatttctttctttctttactttcatttcccactgcctagctggtctttttcagtctcatgactttaaatagtatctataatgttgattaccaaatttaaattgccaaccctgacttttttcctgaactctgaacatgtatactcaacgtttgtcttcacttaaatgtctgctaggcatattacatttaacacgaatggaaacaatcccttgattactccagccactctgctcctcctgcatttgtccccacttagtaaataaatggctatctgttgctcagccaaaaaccctggagtcgcacttgccttctctcatttaccaacacctgacagttgatccatcagagagtcctgctggccccaccttgacagcatttctagaaggtacttctcataatctccactgctaccaacttctttcaagccaccatgctctctctttgactactgcaatagcctgctaactggtctctctgattctatgcttgctagactaatccctttaaaacataaatctggtcagtgtcacttatctcaaaaccttcctatggtttacttctgattcagagtaaaattgctttcctcactgtgactccctgctgttttcctgactcatctttcaccattctctccttggtcacttagttggcttcagttccagacactccaggtaccctggctgtttgttctttcttgtagttgccaaacacttccttggttcagggccattgcatttacttttccatctgccccagctgcttctctcccagctatccacataacacagtccctcatttcctttagatctctgttcagatatcactttgtcagtcatgtttgtcattcatgcccaccctatgtaaaatagcacaagcactcccatcagtgtttccacctcattcttcctatatctttcagacagcttatttaacttcatagaacttatcaccctccccactagaatggaaactccatgaaatagggacgtagacatttttgtcaattttaatattgtctagaccagtgcctggaacataggagatgttcagttattatattttatacaccatgatggtattggtacctagaagtcatattttattctaaaatatattatgactgttggacattttaacttataaatgtaatactgcaactaattactataacactccctgagacttaactttttgaattgtacataaattaagccaatttggcagaaagaaatgatataaacccttttgtttgattttatcctaggtatgagttaatacagaaaggagtgactgaacttagaactgttgggaatgttccagatgtctacacccagattatgcttttggaaaatgagaacaaaaatttaaagaaagatttgaagcactacaaacaagcagctgagtatgttattttttaaatgacattttcttctttttcttttggactaaataaaagagttgagtgaagctgatatatgtaatat

SEQ ID NO: 38945 - DNA, 593 bp, Homo sapiens
agaggtggtttgggtgttttaaaaggagaatgaggaaggggtcagtgtagggactcaacagaatcagagaagtgaacaagtacaaagggttagtcagtgtgaaggtaagtaggccagctgtgtctgctagcaggtagttatctaagttaaggttctatcctcccacagagactgggagagagaggccttatcctttttgatgactgcatttcaaaggaatggcctcccagtgagcagcaagagctatgtatttacaatcctgagcccattttagttagtgaactaagaaagggaggtcagaggcctatcattctgtgtgtgttggctagaacaaatagtaagcttttctggcagcatgaactttctcaggcaggcattttaacggggactggagtcatcctagggacatggtgttatgctactggaagccatgccagagttttgtcaggtctcaaagtgcaagagtttgaatgaagtttcatgtgccatgagttctgcatttttcacatgcacttgcagaaaacacatgccaccccctcactcagctcccaaaagccagttttgcataagaatgaccttcatgaaacgatatt

SEQ ID NO: 38946 - DNA, 1454 bp, Homo sapiens
ctccggggcggcccgccagcccaattcgccacagctcccggaaagcagcggggtaatccagggccgggtaaaaaatgcagaagcctcagccccaccccagcccgattcaaactctggaggcgcgaccgggatgaacatttttttagccacacctccagacggttcttcagcccgctgaagttcaaaaactaccgtttcagttggattcagggcaaggggaggccggtaagtcgcccaaaaataaagtgaatgagaagcagaagttgttaatactatatcccccggcaggtgctaaccgcacgccgacccgactgcagcgcgggaacggaaggaggaaacggaagatttgaaaagattctgccgcccccagaaactgtgcgacccgtgccctcgcagccacccccaagaagctccgtctttaccaacgcgagcagcgcagcagcttctccaggcggtcgagcgcggcgcgactgtgggcccaggcaccgcgaccatccggttccatggcgggcgcggaacgaggctcgttcccggagcggatcctcggctgccggttcctcggctgccgattatccggcatcgtcccgccttcggatgaaaggctcctcgcagagcgggaagcaaggaagcctcgggaaaccacagggaagctgcaggccagcgactcgaaaccggccaagctcttcccgcgtctgggacggcgggccgccagaggggcggggcgcgcggggaggggcggggcacggcggccgcaatgctcccaaaatagggactcgcagggcacaggggcggggccgcgagagccagccgctggccgagtgggcgggacctaggggtggggctggaggctgaaacttgccaaagtcccggcgtgtgggacttaggggaggggccgcgagagccgtgggaccgagggggcggggccggacggctgaaacttgccaaagtcccggcgcgcgggtcctaggggcggagccgcgagaacacgccggggacagagggggcggggcctaggagcctcggggcgggacaggacggtcgaaaccgaagtcctggcgcgcggggcccaggggcggggcctaggggcctcggggcaggacaggacggctgaaaccgaggtcccggcgcgcggggcccaggcgccgtgcagtgagagcacgccgcttgaccgaaggggcggggcctgaaggctgagcgcagtcgcgaggctgtagttggcaggagagcgggcggggcctgaagcccctctgggctgcctggacggatgaagtccaggtggaaagccagtcgacgtttcccgggagctacgactccagggaccctcatccgagcttaaccgttggaacaatcacaaacccagaaacttttagctgagtgttatttataaaaagcgctgttttgactgctgttggacttggaaaagctttgcccacgatactgaaggtaccactctt

SEQ ID NO: 38947 - DNA, 1741 bp, Homo sapiens
gcttggccaacatggcgaaaccccatgtctactaaaaatacaaaaattagccgggcatcgtggcgcctgcctataattccagctactcgggaggctgaggcaggataaactcttgaacccgggatgtggaggttgcaggttgcacgtgacatagccgagatcgcgccattgcactccagcctgggcaacaaaagcgaaactccatctcaaaaaaaaaaaaaaaaaacaaaaaaaacaaaaaaacccagaaaaacaaaaaaacaacaaacaaaaagggaggatggtagataactgtccagatactttccagctttgccgctatatgaactattccttttgtttagttttcagcatgggagcttctggcacttttacgtactttccagcttctggggaccggctgcctagaataacaggcatttgccccagaggccgtggagtggcctcactttggggtcgtgggcagatcgctggctcccacgcctggacttcgggatcgcaggcaggatcccttccagcccaagcactccgcccaggcgcgccaggcagagccccaccccatcccgccgttcccttcagccccggggcgcggatcttgcatctgaaactgagcagagcagggcgccgggcagggccggcgggccacgtgataagcccggaaacagctccgccccctcgcttcctgagccgccacatcccggcagccctcctacctgcgcacgtggtgccgccgctgctgcctcccgctcgccctgaacccagtgcctgcagccatggctcccggccagctcggtgaggccctagcggagcggcgcggtctgcgtcctcgcctgcggccccccacgctcccgccttggcggcggccggcgggacccggcactgcaggggcggcgctgcgggattgaaagccagcgtccccgctccccggccgggccgcagcctgcgtggggcccgccttagagcagctcgcgggtgtaagacctggggaggcccggaccaggcctgcgaacgcagggtccaggtgctggccttgcgattcgagaatctcctcccccagaccctcccaaggccttgcagaacacagtgcaatgtgctgcgaatcatgagaaaaaatgtcttctctttcagccttatttagtgtctctgacaaaaccggccttgtggaatttgcaagaaacctgaccgctcttggtttgaatctggtcgcttccggagggactgcaaaagctctcagggatgctggtctggcagtcaggtaaggcatagctagttccatcagaaaggagtgtgatcacattaaccaggaagtattgtattccaggcaccagcagcaaaacgccttatttactcctcccagtagcgctgtgaggttggtgtaatacttccccactttatggggaaaaaaagtgaggctcagagagatttagcaacttttaagaccctggacggctgggctaggtggctcacgcatgtaatcccagcactttgggaggccgaggtgggctgatcacttacggtcaagagttcgagaccagcctggccaacatggtgaaacccgtctctactaaaaatacaaaaattagccggtatggtggcacacgcctgtaatcccagctactgggaaggctgaggcaggagaatcgcttgaacctaggaggcggaggttgtggtgagccgagatggcactactgcactccatcctgggtgacagagaaagaccctggacaacacactggacaga

SEQ ID NO: 38948 - DNA, 739 bp, Homo sapiens
agccaccacgcccacccacaccttcacttttaccaagttaattgtgttatatcagtaacataatatgatgaacctaagctttgcctctctcacttattttttattcctaccacaaacagatatattcctctctgaagtacagaaatgccaatgccatatattttatcttttaactcagtgggatacaattcaagtttcttgtcctgaaaaaacaaaggcagaatgttgctttgtgactcatcatataccaggttcaacgagtctggttttgtgactcattcttggatatgagctaccccatcagaagtggttacccaattttggacaagactacagaaaaaatgcaattttggtttatttaatcttttgcttccagtttatatttcacatcctgttcagcttcattaatatgccatgggtcacaaaactcagtgcaataaaatgtgtatgaaagaaacacccttcagaaaagatgagactctttcaagtgtaaatactctaaactaatataagtcaaaatatattttttgtgcccagtgatttttaaaaattacccagtcaaccatttcctcaataattcaaatactcaagtgtccatttatatttttggaataagcgagagtgatcgtagtactcttcacagtgaaattttaactcaaatacactgtggaaaattttgaaaccagtcattgcaattagctcaaatttagtaatcatttttcaacatgagcttgtttgg

SEQ ID NO: 38949 - DNA, 6490 bp, Homo sapiens
agtgtatctacaaatacccttaaagaaaaggatatatggaagataaactgcctaaaatctgtctgaaaatattattttgccctcatatttgattgataacctggctgagtatagaagactttaaaagtttctttttatccttggaactctgacacatcaaagatgcgtctagacgtggttctttccactaattttctgggcacctaggaggcccttttaaatctgaaaaattctgtccctccactttagaaatttagaaaaagaataattttaacagcttaaatttttcctgaagagtttaaatttaaccgcctgggttggtcaaattttgtttgtttgtttctttgtaattgtagaattcaatagctatgatttaaaatggacatttttttctcctgtgtttaaaacagtgtttctcaaattatgagccatgaactttggagttaaacagggcaggcttgagagagtaagagaaactaaagctaaattgaccaatatcctccttatttggtttcttcaatttctagtcacttctcattaggaaatcacagggctattgtttaaataaaaccaacttccatcctttatctaaacttccctcccatcatctcttttccttctatctaaataaattcagtgggtcaaaagtaaagttttaaaaatgatcacttaaaaagtgaatcaaaaaagaaatatattaatttggctttttttttcaaattatgaaaatgatgccagtaattttcctttgatgaggttgcaagacatataaaaaccttagattctcttcccacattgggcaagaacaatcttaagcattatcatttctaagtccttgcaaaaaagatttctgtaacataaagagctaaattcttccaaataccagcccccccaccgcaaaaaaacaaaacccaaaaccaaaaccaaaatcccctcagtctacaagtcaatttaattgaccacatattgtttgttcactaaacaaatatagtaaatgctataggaatagttaatcagagttgttggctcaaaagctgggaaaaaaagaaaccatcagaattgataagattaggagactcagtatccaaggtttctgggtgggatactcacaggtctccacctgagaatgtacttggaaatgtgagatggctgtggtgcattccactggatggggtgggagttgggctgactcggagtctcagtgataaatacttcgacaggaccacttgagcctgaaaatgaaaatgtagcatttaattatcttgaatattcactcacttcaacttaaaactgtgtacatggacagtcatcattataaacagctttgcttgtcgttaaatgtgagtataataaaattatctggcattaatcttttaaatatttacgttgaaaatcaatgcagcaaatccatttttagccgataattattattcttcacatgagaaatgcaaatcatagttgtttatagcaaataaaatatatttttaaaaaaaagtctcttggcttgcttttattttctctactatcaaagtaagaattgtgagaaaattgtgaaacgatcctacaaaaataatgtaatacagaacacagacttcatttacttattgtattgagcctcttttaaagcaaattctaattttggaaggttttcatcaagaatgaatctactacctaagaaggaaacaacattccaaaggccatatgagatgatgtaaaacaaacacatttctaaatgggggtagaatcttagacaaatagcaaaggtaataattaaagacctagttttatttctcatcagtctaagcagtctatcagtttggaaaaaacatcaagttttatttttattcaagaagtttactcccaaatcacaccattgatccatcaaattattaagtgattaaatttattttttttccaaaatcagttgtcaacagaaatgactttatgaagtgtatactaaattcagtatttctacaccttgatgtatatcactgttatcaacaaaatttaaagtatggttttggttcttttgtttaaaataaaaggaaaataagggaagtagcatcaatttctaagtagtgttaactccatttaagataataatgaaatagctagaaaatttatgcttgcagaacagaaaactatcttttcttaaaacactatctttatgatgtcagtcaatgtttaaattactagaaataaaaattgtgtcttatagtaaccttttcaagaatttctaactgacactctgtcaaacagagcaaaattttgtatgtgtaataaagcacttcaccagattattaacagatttaagttttctgaaagcttctaggaaaaaaaatacattgattttcaaactttattatctaagccattaaattctcttggaaaacaaagctttctgtagcagaaaaaatatataacttggatatccatgtagattcagaaattctaaaacaatatgctcacttccacaccagtaacaattcaaagttggttgaagattagcaaatactttgaatcttaattccatttaatgcacatatttccaagccacatgaacaccaaaattcatgcataaaattatgagtttttcattttaaagttgtatgtatttcacagaacacacaggatgtttgttttaatcaattggcataagtcaattccatgcctatctttgaattaccccttctgtttatgaagatccttacaaatgtaaacacatttttaaagacaactattcaagaaaaattttggagatgtgactatttaacgtacttccatgtaaatcaggaaagctaggaatatcatgtccttaattatttatgataattggcatagggctatttaaatattgatcctttaaataaatcctactacaatttcctccataaagagacacctgatatacactttatttagtcttgtcaatcatgattttgaggggggacaagcttatgatggataaatgtctattaagttttgaaaagataacataaatgacctttactgttcacctctaagcctaatcatatttctatgtccacaaggacacaaggaggaggataaaaatgggcagggaaaggaaagaaaaagggtacagcagtggtttttactcaagccaaagtggagtacaactacagaggtcccttttgctttcataagatttcgagcactggtgtgaaattccacgttttaaaatctagccctgtggcatagcccacctttaaaggaaatggactgaacagcatggaatttagcatgtttttgttcaggaagtaaagagactttgtgtcagttatttcttagatcaattaaattcctatattctagcttatactacgtataattactctagcttatactatgtatcctttaaagacagaaaagttaaaaattatgacatcttttacattatttagatttaaacttttgacagtcctttttcgctactggtagttggtataactttttaaattaacttaattggcatatactagctatcgccattgtgaaatctttactccctctcttattcaatatgaataaactaacaataaaatagttgagatgataccaaaaaaaggagatagtacaatgtctacacttttaaaattagtttcaaataaagtctaaatgaataatttccaatagtagtgtccttggagaagttaaacatttatgattttttgactcagtcctttttttctctatttattttgctgagatctgtgcttttctagttgcttattgacaaaccaaatgcctcttatcttttgctagtttgaacaactctaccaagttctctgtaggaggaacaaacaaggcaggactcagagacaatctgttggtaatctgctgttcccttattctcaccacactcttaaagccctacgtgctaggccacggagcaaaccagacatacagataagcaccaaagagcatatctgaggtcaaattccaatctcttccctccgaaatcacctctatgctcagtgggatcttgctgttctcctttttaaagagtaggagtaaggtcaacatgtaatactccaatactcaaggattccttcctttccagattttatctccaacatgtccacctaaatgcttccagcaagcagctatgtggacagccttatgttgagagagacgaagatctctctcaatcattcagaaggaaatcattttcagcaaattgcaacaccaataacaatcataaatatagaaaccacagagcatttttttagaagtttctaccatttaagtatcatttgcatcatataaacaaacaaaccattcatatacttatagtacttccacaatcagatttaaatatatattaagttacaaaaaattaagtgattcctacacctaaatcctccaagaaatacaatttaggaggttggtcaatctgtgctataagccttcaaaagtgaagtcaccttccccagcactgacagtgtctgagggttgggaaaagcagaatcttccaagttcctagaaaaggtgcatctgggtgtttagtatttaggatggaacattaaaggtaatcagctacaatcttcccatattacagatgaggaaatggaggaatgaggcttggctaacactacctttggccaagttgttcccatagcttgttctctgtcacagtgaatcttttatcacagagttaatcttaatttctgtcgcatgcagattctgacaccctgaaactcttttgtttctgaatgtaggccatattttcagtcaaacgttagtgaagactttggagactttgcacctcagcagttgctcaaataactgatgccttttaattagcctttcatgttttattaacatgttttattataatcactcagtgaatatttaaatgcaattttccccccaaatgaactaattacacctacagctaggcatgatgtctttgtgacctggaaaaacccagcaataaacatttgagagtgtttgaactgtgtgggcagagagttgaccaagttactcaacccttggcccaacatactgtgttcctggtggcaactgatcaaacaaatgaaaagtttgatgcaaagggagcttagatgacatgttgaatgaacacgtaccttatgctgcatttcatgccatctctctatgcagcttctctgttaagaatcataatataaagccccaaacctttactcccagcataactcacttggtggtttttatttccatgtatggatataagatgaaattagccagagtgtcttaacctaacagaatattttacagagttaagaagtaaaattataaacaggcacattttcatagccttctctaccttttacttgatagaggaagagagaaaaattattttaatcaaaaattcaattgattattagataataacaagagaaaagggtgggaaagaggggagacccccaacttaggcatgagagcattaataatcactgccctgttgttataacccaattggcagttctcaacttgcagtaatagagctacttacttggataggtctgtaaaggttggcaatgccactccccaatgccacggccatagcagtagcactggtatctgacaccatgcacatacttctcccatgaatctccaatttgataaaacgtcccagtctctgaatcctggcattggtctaaaatacatggaaggaaaagataaacagccttgaagacttataactacgaatttaatttcagggtgctagagcatacatttagcttaaatagaaatttgcaattgttcttacaaatatatgcagttaaaaaaatattttgttcacattctttaccttacaggacagtttgtagtaaaaaaaaaaccaaagtacctattaggaggaatatttagttttctaaaaggtaatatttctaaataaaaatgtaaagatttagatttcagtgtatattgataatctacacattaattttaaatattagttattatttttacccatattaatataactggcttaacatttaaatagcaagaaaaaaatctgcaataatttcattttccttacttcttcaaaatttaaagaaactgtttgacatttaaatgaatgaactagactttacgagtatacctgctgagcagcttctaagaaaacctctcaggcttctctctcagttctggtaatctcacgtcaaacaaacggatgttatcagtttgttttctcagtgagcaacctgtctcttttggtaaagaaatagtaatggatcaccttaaactttgtagtgctggtaacacagctcttttaaggctcagccttcactatttgcttagttctattttgaagggcggccaaaaaaaaacctagagtgttttggtgggtgatatttacaccctttgctcatgctgttacacagctggtaaggaagtgagtttgagaccagcctgacccacatggagaaaccccatctctactaaagatacaaaattagctgggcctggtggcgcatgcctg

SEQ ID NO: 38950 - DNA, 588 bp, Homo sapiens
tttaatagcatggattatctttatgattctaaacccaagaataaattccattcaattaaaataagcctaaatttgtcaccaaattcagcaaaaaccagacgactaccaatatcgagatattttggtccagtattagagagaagactttgcaaagttctttgcaagcaactgatcaaagtctggagccaacttcagtcatgtgatttcacatagcttttcttatctgaaacttgctaaccattccccctgtgcaaactcatctagggaaatagggctactcaccgacgggatcacacttccacctgccccgaccctgaccgaagcatgtacagttcagcatgtgcccctcttcatgacgcttgtggaatgtgtcgttcacattgtaagtgatgtcatcaacaatgcactgatctgtttaggaaacaggtgggtgagtgagaaactttttaaagttccattgatgaaagaaaaaaggtatgcttctcaaagcatacaactacttccacttaattatcaacaccttccactaaaataacttttctacaagcatagaataacatttttttcaaagtttggtcagtaatacaa

SEQ ID NO: 38951 - DNA, 5396 bp, Homo sapiens
cccagagagatcacaggaaattgggtcctaagcagaaaagaaaggctgggaggcttggtcttcactcatacacagcaggctaagactgagactaattcagtgaaaaggccacatcaggcacagcactccagcttttgggagcatggagagcctgtattttaccctaggatagaaatgtcattttggtggaaagcaaacagacatatgcatataaagtgtggaaatcctggtagttttctaagttgttaagcccaatggcacattcaaatgctgaactagattgtaaacactatggacccttgcctcttgcgatttgcctgtgaacttggataaaccctaacatgaaatatggggaaagttgattgggcctattcacacgggacttgttcttttgaatagaagtctttaagacgacttatatttaaagaatggattaaaaaacttaaatactatcttaatagaatctattggtaacccagtgaatcatactggaaagagtgccttagctaaactagagttgagaatcagcccggttcccaaagttccttagcaaactctattgggttaataattttgtattatccctaggaatagtgacatctgcttcctgggtataacctactggtcaccaagaaaccagactgtttctgtgaggtgcaagaggtctctgcattgcaaacatgaagaccagacaacacatggctggttcactcttcatgaacaccttcccagtcactgcagaaaagtctcatgatttgtctagcttgaagatatccaggtgatttaaaatgggcaactcccctaagcatgtcttactgaaatggaacccaagaggtctcttggttctactatgtacagaaacacacacactcataaatgcacacacactcataaacgcacacacatcaaacactgattccatctgtgctcatacccgtctttaagaaacacaggaaccagttgggtgaccacttaagagtacctggtcaccaggggcaaacctcaaagttcggaatatccagtcatggataacagaaaatgacagtgatggtaacagagaaattcatatttgatattttggcatcattttacacaatctcttccttacttgcgatggtacagcttattctccctcgcccagccccgatgcaggtacagtcccagatcatggagtctttaggacgctcataagtgtcacccactcggtaagtgttcccagtgtacttgtcaaagcaagtctcttcagctgaggggaaaaggaaagtccatgtgagcctcacttaggtacaagcttttctagttcactaatcccctctaaaggaaaacccacttctctattccacaagtaacatggtacacctcaaagaataaaatgaagtgagagatacagatttttatcctaagctctaataaggccatggtttttgaccttgacatattgtcaaattttctgtaaattattcatattgtagaaaaatctcaggctcttaggaaaaggccatataaagtactaacttatgacagagctagatttgtgaagggtttcacattccaatctctgactcagaaagtcaaagcaaggttcacataaaaagcaaacgattggccgggcacagtggctcacgcctgtaatcccagcactttgggaggctgaggcgggtggatcacctgaggtcaggaattcgagaccaccctgaccaatacggtgaaaccccgtctctactaaaaatatgaaaattagctgggtgtggtggcatgtgcctgtagtcccagctactcaggaggctgaggcaggagaattgcttgaaccctggaggcagaggttgcagtgagctgagatagtgctactgcactccagcctggtgacagagcaagactctgtctcaaaaacaaaacaaaacaaaaacaaacaaacaattcgaagatccccacctcccacaaggccttgacagttgttaatcctatgatttccattttcccctgatcagtgcttctctgacagagttgctataatttatgagaaaaatatcattggtcctaaaggaatgagaactttgaagtggctaatggttttgtgttaactgccgctgacaaatcattttacgatgtaagtccccaaagtgttttctggctcataaactaacagtttaagatttgagactgctttctaataaattaaaattttataagcaattttttttgtcggaggacacacaaaatctttcatttttctcatcaaaaactttgggagagtaaagcaaaaagaagactctaggaactaatttgggaaagattcgtttctttgttttaaaggtaaaagcatgtgaaaagcaaatataagcagtttttaaacttaagaggaaatgacaggtaattctattagaaaaatggtgtatgtatttttacttactaatgcaaagtttaacaattaccacttcatgtattaaaagatactaactatggggcttgttgtcacttaccttcaggtttactctcgcagttaaaacctcggcttcctccataacaagtacaaaccaacgcattgcctaggtaggtccgctcccactgttgatttatctgatagtgttttccattgtcataacaaccggctgcaaataattgaaggaaaacgttacatttgcatttctccttttcccaaaattatggaattttcttcatgtgaatattgacgtacatatttttttccttttaactttgctaaaagttatatacaatgatgtcatttccatctggccaggggtctacataaaaaagttggaaacattttggaaggcagacaattgaagtcacatttttaaaacatgcaaggaacttaaatattcttttggagtaatagtcaaaaaggacaactttaagcagctttctcaaagcaaaaggagggtgtgtctttgaaaaacggaaagaattccaacctctgttcttggtgaagtatcctgagcggccctaaagaggtctgaaccaattacatctcttccaagttagttagaaacaagacagctatttcaataccccctttccacccccatgttgaaaatatttgaccaattatttaacagaaggaaataagtagcagtaaggaccacactaatcccagacggaaaatttatagacatgcatcatttttctctttaaaggcaagttttggttaattcctagaaggacaatctgaacgtgcagaatttattagaacacgggaaagtcgcagagtcctcgtcctccaatgcacggtcttatcatcccaggccctcagaaccagcgtgctcaaaactcggtccttttgtgtgcacagctggtttctctcagtaaagcgcgcacacactcgcacacacgcgcgcgcacaaaacttcagccccaactttggtcggctttagggtcccatccctgaggcagcctgtttcagcccgcggtcagtactcacgcttgctttgactgacagccaccggggactggggctgaaccatttgctgagcctgcctcttgctcttcgaggctcccgtggagggcaccgctgtccccaggcactggacggccagcagcagcagcccgggccccggacccctaagcatgttgagacggtgggggagagacgcccgcaccgggaggcaagttgccaccaagtttgcttcccttcgcaacctgcgggaaaaatcccttctaatgcctcccgggggttgtcgcctccaagaaggtgggggccagagggtggggaaggggacgggtggagggacagaagggatgcagaggaccagagaagttgtggctgcaggtcccctcttcccgctcgcgcctggggttccctctcctccccctgtgcagcacagccggcgcgggcgtccgagcgccgggagccggggcttatatgggacggtcccctcccgcccctctggaggcccggggcgcgggggaggagagacccgccgggctgtccccgccccgccccaccccacccgcccgcccgcccgccggccgccgcagccgaccgcgcgccgattggcccgggctccgggtgacgtcacgggggactgtgggttcgcagcgaacaaaagagatgctgatggcccgccaggactggggcaagacaactttttttcggtttcctttgcggtcatcaaactttttaggggatgggggaagggatgggaagcggctgggaggaaagggagtggctggacttgtgtgaagcgaaggggttgcaagacgctcccccttcccttttcttttttattgggggtggtggtagtgtttgaggacattgcgtcacctctcttcggggtggagggggggaatctctgcttataggagtgtattttgtgaggaagaaaacccataaaatatccacgaccttgcagctgttaagaatccagacttttcagtcccagggcggggctgcctttccccccatcccgctccctttctttggactaaagggtactgactcgggactcccttattttgtcttcacagctccctgttcggacttcttcccttctcagcgctgtgcctgtctggctctgagaaagggccagcgggcgaacggggagcaaaggggaacagagacctttaatgagcttctactaagtaccgggagttccgcggggcgctttgcagatcccggggaagttcagagaatgaagttttcttttgcaaggacaaagtaacagtttacttttttacacatgcaggaaagccttcctttcctggggatgggacgcccgtttccactgaaagtgaaatcactgtgaacaacctgaaaattggaaagttggaccagctgtggggagagaaaggtcttcgtgtcctttcccacgttcaccgtgccagttacacacaaagcagagatttttttgcttgaatcattaaaagccgggtgggtggggggcaccctatgtactgtcttgccctccttcggcccctttctcacatttatttgccattttctttttgctgacaagttccattacagaatgccccctccatcccccgccgccagattttttatatttcaattgttatttactccaagagtgtggaaagttctcctttaagattcccccgccttgaactctaaactcagagtggaaagggaatctgaaaagtctctcatttagcaacacatcacatcagtcctttttgtcagataaacacaggcacaattgcttttaaagatcttcagaaggaggagtccaccacttccacagtagatccagagagacccgaactgaatgctttgccttctccttgtgttaggagttcagaggttccatttgctttaaaacacaagaagctactaataaaatatatttatttcggcaaggtacctattttctccaaaagtttcaccttcagtaattgccacaggagtaattagaactctg

SEQ ID NO: 38952 - DNA, 1086 bp, Homo sapiens
ttcctattttccaagtttaacgtatgctctatagtttcccttgctggtatttaagggtagaaataatttatagattcttggccaatggagatatttccgttttagaggttttgtcattctgacatttcagtttcacgctttgtagttcttttatgcattgaggtgtatggcaataatgtaagtgtgaatttttctatttctccttatgtattaaatattcaccttttattttattatattgcttaatgaggacattctgtgtactagtttgatgtttatggaagaaaaacaaaagcttccctagctctaaaaacttgccttttaagttcctcatctctataagtagcaaaacataacacataaattattcaggcaatacaaaatgaaaataaatacatttcaattggctatctaagagattatttctctgtgcattgagtcttcttttatgtagtcactgcaaaaccatgaaagattgaaatattttctgaatgagaaatctttcaacatgaagcagcacacacagcactgtgagcagaaactaaaataaaccctgtctggcctcaaggttcatgttgcatatttagagttggaaatactcatttcagggtacatttttctttaacccagtcatcccagagtggaacaacaacatagagaatagataagattgtctgtctggctagctgaacacactgtccttcacactgctgagaaatttgcagagtatggtagaggtttttagatcttgaaactgtacaaggcactcttctgcttttaatttatgctttgaagatttatacaaaatagaaagaccaaataactcactttccatttaaagtgctcacgttttccatctggtacattgttatgaataacatgtctgcatgacataacagaaaatttttcataccagtgcgggtctgccatcaatttataatcagaaatgtcacatgacgtattgaaaagaaatcagaattacacacggttgctgcatttgccttcttatatttcttaccagaagcccttttccttcttttcagctgcctctgtgaattgtgtggaatcattagagaaaaacccaag

SEQ ID NO: 38953 - DNA, 2728 bp, Homo sapiens
acattggtttccaataggtccttaaattgaaagccataagggtaggtgctttgcaaagcaggtatgatttgtatccaaattacctctcacatgggcaccttgtggatttctctggacagaagtgcagcaggaacctactttttaatgaataatggttattgagtcattcaaacatcccagaatagccagtgggacctggctgttctcccttcaagttcttcgccacctgtaagtcacagagccacagctgtggttcttctgcaggggccacagagcccttcctctgcacttggaaaaaaatgtcatgtgctgactccaagagtgagtcttctgggggtacaggagacacagaaacagaaactttccaagaaaaacacactgactaaaccaaatgacagagcagaaaacattttctgataaggcaaagggtaataacttggtgagaattacacaggtaattaaatagttgtttccaagggctaggaaaagacaggcatcgtctgtgttggacagaaggggagttttggatttattaacatggatatgagggtttagggttatttgtgtttgtggtaaagagctcagagaagaagtctttatttactgcctaaagatttagtaagtcaatttgttccctgccttctatctcatccacagacaatatcttcttaaataggatactagattgcatgcatgatgttaaacaaacgtggagtaggaaaatcaccttattgaaatagctcttgaggtgtccttaactcacaagaacattgggaaattttcagactttctcaccaacagaggacataaataccaaaggcaagatgtaaagttatgcaaacctctgtggctggaataaatattttgtacttatggaaagtccactagaagaccacttctgaattcagatctgtatcaattaatggaagaaaaaaatgggttggaggagccaaatggggaatgttacaagacgtattaatgtataatcaaaatttagaaatagaggtggttctgaattggaattggctttagataaaatacagaacaggaaagaatgggagtcctctgttctagaagggtaggctggctacaatcgggtgaataagacaatttcataagaaaacgttttgaaagaatatgagaggaaactgcaagagcagaagaaagtaataaactcattgcacaagaatttcagaagaactagggtcaaaaatacagtcacaatctggcagctttcaggaggaggtggggagtagataaggacaaagaggtgggaagggagatagggccaagtccaaagtgcctttcagactctccctgagtcagcaaaccttgcttctttttacttttactttttctgtgggctctgaatggttcttttaatctatattcaggcagagtaacaggcgtgatgaatttataatgtaaaaggtacactttgggaggctgaggcgggaggatcacgaagtcaggagatcgagaccatcctggctaacacggtgaaaccccgcctctactaaagatacaaaaaattagccgggcgtggtggcgggcgcctgtagtcccagctactcgggaggctgaggcaggagaatggcgtgaacccgggaggcggaggttgcagtgagccgagatcacgccactgcactccagcctgggcgacagagtgagactccgcttcaaaaaaaaaaaaaaaaaaaaaaagccagaaacgctcactaggcaaaaaaaaaaacttctcttcgagcagcctggtagggcctctagctggagaatattcagttgtgttaaggcatcttagtagagcaccagtggtatctggaagaaggtgcccccaaaagcctctatccctcatcagcaggtttacacaattcatcgaacagatttaatagttacagattactctgttaactagattttgagaaaacagtgcagagtgttggcagagcaaagagagaaaatcaaattctggagtgtggaatgtttacccaaaagaaatggcagtagcaggaactaggagcctgaagggggtgcctttgtgtaaaaatgtttttgatttctgatgcctacagctggatttttaatgtagctcaagtccgacagaatgcaggtaggaaaaagaaagcagcaatgaattgtttgcctcttctttaaactctgtttctgaaaataaaatttgttagtattttaaacttaaaacccttcatgattattatatccttagttcttatgtgtcactgatatactaaaataggttgtgaatatgatagaaagtgagatgaaagagagagagtgtggtaaggctgtgggtctgtgaaactccaaggccagatgctgctcaccttattatggaacaggtatgttgattcaagcacagggtcaaaggaatgggccagggtgactctttttggaataatagtgaacatgtgttactcactcatagactcaacctgctgattaatatatgttatctcttgaatttgagaatgaagttgtacaattcccatttatagttgtggaagctaaggctcagagatacacagtaacttgctgtgtagccagttgtggcaaaaaaaaaaaaaaaaaaaaaagaatttgtatttatttctgtctgatcctaaacaggtgttttccaggtatgcacccttcctgctcacattttgattggttttgaattcttgtgtattattgactgtctacttcactaacatcaagtataaaacaaaaa

SEQ ID NO: 38954 - DNA, 1427 bp, Homo sapiens
tcatcccaacaggaacaaatcataaagaaaatgtaaagaatatatcaaattggctaaatgcattctatattcgtagtgtactcactgaagcattgttcgtgggttttttttttctgattcttaccaagcctacatatttctttttaattttttctttttatgtttcccaagtttacagttcacataaaatacccactgaagcagagagaaaagtgaaacaaatatttcacagctctttggggatttgaatgggtttttacaataaaaccttgattactcaaagagcacaggagtgcctgaaacctgatagaaggaacagagagcaggcagttctaaaggtgccaagagagactcagaaccttgtggagttgatgcactggcccttcaaccctggaacccaggccaagcaccaaaccaggaagggtccaaacagccctgaacatggctatcgtggccaaacaaaccaaaaaaaaaaaagtcacttggaaaagatgtgcaaggttgtggtttcctgataaattaagatgacacaggcagtaccacagggcttccttcattacattattgtgaaatctggactcaaatagaatgaggcaaacccacaagttaaagtgtttttaaagtggctcaataatcactttgaaaacagaacaccctttcagtcagcatgactggaactttgatcaacaaatccccaagagccacaacccgtcttttgtgaacaagtagtatcaaggtgggggtgggcttggagtgcactggatgcttttcttctttcatcatgaaacctggtggttttgtgtcatgtgatatgtttttcagagattcggcaggaagcttgcaccgagtgaaggatttataaagattataggagataacacaaagctattttatctctttaaaaaaaatcaaaggtattaaatttttttctacttcatttttgtttcctcatttaaaaattagctgccacaaatattatcccccatctgggcacaaggtcagttggcatacaattttcttcttaattttcattttctggattccttgatgacctgattttgtacaaattcatgctgcagagataaggattgattggctacaaatcaaggatctctgcagaatgggaatgagagacaaaggaagaggaagaggacggacaccacaaaccatcttatcttttcaaaatgtgattggtgcattttcaacattggcttacctttccttatgctgtccataaattttgtgcaggtgtaagctcatcctacacatgtcatttggaccagaccaaggctgctgtcatggaggacccacaccacagcttgggaaccattcatctaccagagggtcacatgacttcaaatgactcttctaggggccacctgccatgatagggtaccagctcttcctctgaattcccaatccatttc

SEQ ID NO: 38955 - DNA, 1979 bp, Homo sapiens
ctgaaggatttattttgtggagaatttgaaacatggaagatggaaaaacacttcaggaaaagaaaagaattacctcgaattaaattgctaaaacaaatcaaatttatatcgctgttggatatttttaaaatctttggtcttggcatagaatagttctgtgttttaactcattcttctggtcattttaaattaaaagcccaaataatgatgttatatagggtgagtaacatttcaggtcacataaacatatgacatcaccagctttccccatggataaacacactgaaggaaaataatgtaaaaaggagggaagaatgagtccatgcatccacctccccccagccctcagaaaacttagctaagaagatggttgccagaatgagaagagtagttcacattccttcttcattcaaatatttctttgttgcttttgaagatagtaatcaatccagaagagtaaagtccttctaaactcctctcagagattcctggtacatgaggtaggctgtgcatttacactggaaagtaaggctcctagtgataatattataattgtggtagctaacatttattgagtactttctgaggcagagagagattaattatgtaacttgcccaaagttgtatagctggtaagctgtgattctgggctaagcgcctaaacagtttgaacatcaactacttagccaatctgccttctggaacagaataaatatgaacacttagccatacctagatgatcagagaaggcttcctggtaaaggtgcagctcccaatacaagattgtgtccagttcaatagatgaagaagaggtagaagtcaggcccagaacagagaataacatgagcaaatgttccagcctatgaaacagtatggtatgtccagataatcacaagccattgtgtgttattgagctttgaggcagaaaatagatgagtttggatttataaagaagagtcagattgtagatgacttttatgttgtgcaatgaagcttgcattttattctagggataagagactgctgaaagatttttaaatgaggaaatttaaaggtttttagatagattcctttggtgatagcgtggaggatgtgaagttgggggaaggcaagattggaattaaggcaatcagctggggactattgcaatcatttaggtgaaaaaagacaaggatataaattatggtgctgaaaggtgggaacaaattgaaggagcatttgggaggggaatcagtatgatacagtgaatatagggaacgagcaaatgtaaagaataattatcaggtttctctgatggtggtaacttggataatacagaaaaaggagcaggtggggctgagataaattcattttggagtattgtgggtttgagggaggtctgtgaaacatccaactggaactgtttgggtctgggagctgttgggagctgtttgcagacctctgggtctgcaaatttaaaattcaaggaaaagttcagggccagagccacagatttgtgagtcatccattcactcactgaataaacattcaaaaaaaaaaaaaagaaaaaaaaaacagcttgcttcaagagcaaagaggaccttataagtcctgttaaggaattttcagcctttcctgtacttagcaaggaatgaatgatgagattaagcagcagagaaatacgttgaaactcatatttttaaaagatcactctgacaaatatagggagatagcagttagcccaagtatggagaagtaaggccagggaaagtgcatggaataatagcataatataagcagcaactctaggaggggaacttcatatcatcaatatgggcaaagaaaggaaaatccacagaggagaccaagctggaaagattgagagaggaggcaatatcctagacatctagggagtagggtaccaagaaggacaaagtagttgacaagtcaaataaatcaaagtgaggggcactgtaagataaatagtgagttgtgtccat

SEQ ID NO: 38956 - DNA, 1969 bp, Homo sapiens
attgaatttcaaaaaagcacatacaatagttacataactcttactcccattcatgtgtcatctttggagtctatggttaataataataacactaaaaacaatggatttagattgagtaggtacctgtacatgggtaaattcattgattcgttaaatatttactactacctcaaagagagtaaacagcctggtgggagagacaggcacagtgacatgctgaagctggcttaagctgggtctcattggctcccaagagccaattctctgcatctcttctcaattccacttcattgacatcaagttagtagcttgaaatcagccatggtgagagtgagagtatttacaccacagaaattggcaaacactataaatttgggctttttgttagacattcaccaggcaccactgcaatacatagatgtggctaacaatgtgatgtgttaagaaacaagagagataataaaagcaccaagaaggggtgctgaacacagttagaaggatcaaaaaaccttcccttttggggctaacctccaatatcacctcctctgagaggcctttcaatacaaccttcctgaaaaaatcctgctcccaggcatgctgtcatactacactgtgcatttctttcagaaaatctgccacagttggtgattatcttacttatttttacttatctgtctcccttactgggatgtaaactcttcaatgcaggttcttatctgccttgtctccctggctactaaaaggcactcaaagtatttttttaaagttagtggtggagtagcagtagggtctcaaaggatgagcagaatttggctaggcaaagaactaaaggtagaacattctgagcagacagaaatacaaagagtggtggccagagaaagatagtgtgtgcataaaacttacagtccaaattaaggagtggcctctacactggatcatgtgagccacagggactcatgaaggccactgttcaaactcctatttacccagagatgagcaagagcatggctaactccaaattggcacagatgtggttttaggtcaggaaagaagaaaactaatgaaacatctctctcctatctgattggtaaattgaagttctttttcctcagtagaagggatttatccctaaaaagcattgctgaatctccccaattcagagtgttcaaagtgtgaagcatttgatagcatttaaattgaaacaaataaacaaggcaatgaggatatgttggtttcccccatgtgcattattgaagtccttctgcaaataattgtggtctcttgacaatgctgcatgtattagatcatctgagaaatgtattaaaggggttttctgttcagtgagggagcagggtgttcagtacctaaggagataagctaatttgactacaggtattgagtctgcataaagcattgagccagtgccctctcccacttctccaacatgccacaatctattagatgaggcgataggatcttcaatgggatgaagaaaggataaaatgatggaatgactaattctgctgggtgaaattcagcaaggtttcaggggaaggtaatgtttggtttggccttaggagatgagtagaacttgagcaggcaaagtctcagtggagggggcacttcaacaggaagaacatgctgatccaaaccacagaggccagaagtcagggtgtagatatatttgaaggctcatggaactgccacacatagattaacttacacaactctgagcagaacaactgccaatgtgcttttgcaaaacaacattctaattttacttcggttttcataatggcaaagtgattcattagttcctattacacattgcaatttcaaaatgataaaacactgagagtcctttcttaattatgaaagttcaaaaaagggaacttaagccaaatctgctgtttccactcagcaaatgtgtggccacaagaggtgcttgacccgcctgcacacaactcct

SEQ ID NO: 38957 - DNA, 5129 bp, Homo sapiens
gcgtttggatgaaagctacaccatcagcttctgggtctccagcttgtagactccacctgcagatcttggggatcttgagacttactgacctctataattgcatgctgtacattacatgctctgtttctctggaagacgctgacaagtacctaatctaaccttggaggggacagcccatcacgtttgccatagtctgttagttagaagtgagtcacttggtctagtcaacactcaaggagagaggaagatgacacatgttgtggggtaccaggaggcgtggggtaccatgttagaaacaggcctagtgtagtgcatcgcctgccaagttagaatgaagaatggagataactggaggtgtgtggagccggcagcaggagaggaaacaggagaggagtttgcatgtggccttggaagttacccagggaggtcaccttttagtgctttctctctggctggttagggatttgcaacccaaacctagggtttcatagtgaaacaaaagcatgaaacataatcagcatccagatctggcacacagcagaatttggcaagtctcaaagcctgtggagatccaggcacagcagaaaaagcatagatttggactcagaggacccagatcagagctccacagagccacgcaatgaacttggccaagctgtacgaggactctgaggtggggctctgtcttcccatctgtgaaatgagactaatggcaccttcttcacagaaatgctggcaacattaaattaaattctcatttccttaaaagtgttccattgaaagctagttcagcaaaaatatgactagacagaaaaggattacactaaccattcaatgtgagaaattctgggttaaaaggtgaaccaatcctcttcctacagcgtctgagggtcattgagaggtactgagtattctgggcctgcaaaagaaaggcagatgagtcagtgttaaccaaacagatttggctaccacactttctccaagagaatcttatgtgacttgtgttaaataatgaattaaataacacaggtataaatgtttacccatggagcctggcagatcacccacatacagtcagtgtatgttgactctgaatcagattataacacagtagtcatggcagtaagccacagtgagatgaccgggaccaaaatcacagatgtcctagcatttgggtgatagaataaatcaatctcctgctactagatgtgactatcctgtggataaatagcgggactactaggttgggcttactaggtagtgctctgatagattctctctctctctttctctctctctctgtatatatacatatatatatgttttcattggctgcatggagctttagtttttatttttatttttcagagacagagtctcactctgtcatccaggccggaatggaatggtgcaatcatagctcactgcagccttgatctcctgggctcacacaatcctcccaccttagcctcccaagtagccaggactacaggcacatgccactacacctagctaattttttttttatttttatagagacaggagctccatatgttgcccagactggtctcaaactcctgggctcaagcaatcttcccgcctcatcctcccagagtgctgtgattatagatgtgagctgcgcccaagcggccctgatagagtatttttttttttaaacatcaggccagaccatactcctgtagaaagggaagaggtttactcctgaaaagagaggctagtcccagtgtcacacttatctgaggaggaggtgggaaaacggcactctgaaggcaggccttagccagataggacagaattcctagcctttctctctccctctgaactttgagttggctcagttggcttgggagcaaagcttaaagatggctttggacacacaaacccagccctgaagaagacaagaaggcatccggtaagatatctcaagctgaagactaacgcatcttactttacaaagtgtatttctcattttatgttcctcttttattcgatgtttttgttaaaaatctagccttctgtgagagcctttaaaaatgcttcagctgtgctggaggaactaaggtcatgctgggggtgcatgctaggagaggcgtgtcatctgaggccagcatgatcatgcctggtgtgactcttggagtgaacttctcagttcacatccctggccccttcccagggacttgccccgattcagtgaggtgagttccagaggtcgtgtctttacttggtgacatgagccagggctactttcttcagggctgaatgcctaaatgaagccgggctaatcatattgtctttcctggaaatgtggagatttgtgttcagaggaccggcacctgagggtcctggagctgagccacagagcatcctaaagggaaagtccagatattcccacagttaaggtctctggagcctccctacttcttaccctgctgaggtttggtttttaaactcagatcttctcaatacatttttctttttacttaaactggacaaagtctgtttctccccctttaatcaaatgaatctcaattaatacatagcagcggcagtcaattttttttttttaaagaaatctccaaaggcaaggtaagtagtggcgtataggaatagcaggcttgaagctctaccattcagtggtaaccctaagtaaatccctaagtggagaatcctaagtaaaatagaggtacagttaccaaataatcagggtagatcccaggggtcaaaatctgaggagagttagcctcagggaagtggagccatgatgtaccagcagctgagcaccaaggagaaaacagaacacaaagcattaaacaggctgcccagtggatggtcaaaataggggacaggtgtgagcagagtttagctaaggagctaaagttcagaggaatgacctcaggcttagacaaactgaaactcagggcagggacacaagtcagggtgacaaaacactacccagtgggatcataggtcaaagcagaagcccagttaccagaactggagcacgaggtcagagcagggcagctcatcagtgtgtaaccaatgctgctggactcctcagtttcccaacaagggacaggtctggtcccacagtctggagcagggctaaggctgcaggcaggggtgaagaacaaggcagccggggtgtggggacagggagtcagtgctcacactgcgatctcgcagccttcttctccatagtgacacagccctggggcctctgctcagcccctgagcttccaagcagaaagagctgtaggagaggatgaagtaagtcagggaaacggagccaccgtcatcagcctggagcccttgtcctgcatggagtggcgcgtgggggcggaggagagggagagctgcttttgtttgtttatttcctcatagcaactcacaaacttagccaaatacagatacaaatgaagtgcatgaaaactttcctaacttcctgactcagaatcgttactaaatatatagatcagatgtaggcggacgaaggcagaattgtaggttccacctaacagtcctcaaacactgctgcccctgtgcccctccatgtagaaagagctcccaaaggtcaccaggatgtgcttgccgttttgctcagtattttctaaaataatcaaaatggaaactgaaaattcaccttcctcatgtctcctaacctcagaggagccaagcacaactggagaggcttggtcgaaattgatgattgattgattagttatcctctctttagtgccctctctcaccttactcctcatttactcctgtgacaggccatgacgggggctcacaggactgaagatatggctacagttcccatggggtgcaggtgattccagcaggctgagacgaagtttcagcacagagggcatggatgagttggtgtttccatgagaggaaggattggataggtcacgcattctgaaacagatttgcaagggtctttagaagttatctggctccagtgtgcatcatctgatgaaactggtttatctagcagttggcaaagggtaaggttattcttaatgaatatttccatgagggcccaggattaggtgtatcaacatgttcattcctagatttcagctgtccttgaagaaactggtagaggggaagggagagggagtggaggcaattgtagaatagagaggatcatatcagaccttgtcatgaaggtagtgtaagcctcaaaagaatttgtcaccaagctccacaaaagaaataaaaacttttcccttcttccttttgtaatctacctttactgaatttggactacataaactcatttgttttcaatttaaccgctatgtgattagtggggtaggttgccagaatatgcagaaaagaaaataaaaatactgtaaatcaagttttcccattcttcacccctgccgcctttgcatttggggaccttcaaagctcctggcaggatgtggctttgactctgggttttctcatgtacagcccttagaagagtgcttggcacataacaaatgctgtgtaagcatttgcgattagtagtaacatttgtagtcacatttgtacctttcatgtagaattccctacccttaatccagccaactcctaccttccctgatagaccacggccttcatcactgtccagggcttagggcttacagaatttaactctgaatactttgattaaaatcattgtttctacagatgagaaagttaaaaaggactccccactttatgtagctcttggagagggaacttgatgattaagctactctcaattattaatactgagaagaagaaaaatgtgcaggcagtcctcactgccatcccctcttaaattccatccatctgctgcctggatggtgctgacaaacccctatttcacttttcacttcattgattcactcattcaacagtttccctgctgattcatccgtctcaaagtcaacttgttaacattttaccttaccaattcaggaacaccagcggttggaaaaagaatgtaagtactggttactccatagcaggagatgaaaagatgattcattccttaccattcctctgctttcaattacttttgtaagaataccatgtagcaaaagctgaggtgccctgcatgcagtcaaaaa

SEQ ID NO: 38958 - DNA, 1524 bp, Homo sapiens
tgtcgcccagggtggagtgcagtggtgctatctcgactcactgaaacctccacctcctgggttcaagcaattctcctgcctcagcctcccaagtagctgggactacaggctcgtgccaccacgcccagctaatctgtgtgtttttagtagagacagggtttcaccatattggccagtctggtctcaaactcgtgacctcatgatccacctgcctcagcctcccaaagtgctgggattacaggcatgaaacaccgcgcctggccgagaatttatttatggccatgttttaggggagaaaaatgggagaagctcagagtgaccttcttgcttctgtggctttctcaattgtcaaggtgctatattttggggtatcatgccctaggccccaataatttcctttttcctttctttcattttctataaatgcatctacttagctaaaaagtcaaatactcaaatgtagattattttgtctatacaagttttgccatttaaaactttttgccatttaaattattttctttatgtgcattatggcttcagaacggcaactcagggaaaagcagcttacacccatacacgtacatgcttatctcttcctgctgaaaccaagacccctctgattagtgaagactgttacttggggaatgactgagcagtacatgagtttaggagttcctcctttttgtgttaagcatggtttggcttaactccaaaccaggcatgggaagtcttagtcacactaggccactgagtttgtatttgcaaggaaatctctggtttgctttctgtgtcacctagcacacatctccaaagattttacttgtatcactttgaaccctagaacaaatattttgacatcacacagtatacacagcagaatcccacagcttacaatgcaataatgcacttactttcagcaaagcaaggaggaaaaggagggagagggagctggttaaaactagaagtttctacaagttagcttgcttaatcagtaggaggtgggtttatttgttttgttctcttttagtggttactttctattaatgaagactgtgtgtacttgtgtttggggtaagcttagtcattgacatagggacagggctggaaaacctaagttaagcttagcaagttaacaccatagaggataacaacaaagactgtctctgtaaacaaactttagaccaggttctttgtgccctcttctcaaataggcctcatctttgggccttgtctttggcctgcctagtccagttttagcaagaattctgctaagtcagtctagcaaaaatcccctatccttgatatctaatcaccctggcctgccttcagcaagaattctgttagtctctttagaagaatttccctatcttcgttgtctcctcttagtaattttccattcacggaccccctcactctgttcattggatataaatgccccacggctttgctatattcagagttgaacccaatgtctctcccctactgcaatagtcttgatacctattgcaatagtcctgaata

SEQ ID NO: 38959 - DNA, 1154 bp, Homo sapiens
gaatttttctctaagcacaggccagactggaaaacttggaattaaatgtgttaaagacccccgtcagattagaatgggaacgggttcttaggggaggcatatttggggttgattttgatcaactattaacagcattgcatggactggtttatcagaagaactggcaaatcttctaacaaggccctgaggcagtgaaaccaaaacagcaagtttatacagcagaggtaccaggaaagccaagtgaggaggttgacccacaagctatggcgtggtctaggtgggaagggcaaaggagacagtcatgccactaagaagtggcaagcctggagtttgaaggagtggacaaaaaaaaaaaaagagagagaaaggtttctgaaagaagaatagaggacccagaaataaatatttcccacatcttatgtttatcaagagtattcccactgatatcaacaggaatgaaaacataaatatctgcttcaaacataatcactgcaaagaattggaaagtggctgatacaggctccttctagtggttcgctggagtctataagagcggaacaagagataaagaaaaactcctcctcaggttacagttacatgttctctttgcccttcccaccaaacactgatttgcagaggtcattgcctaagcagcaaatatgctattcgtcaggtaataaaggcaaagttaacgatacaaagataaaagaagcatttttaaatttacaaaatagaacaaagaactacaaaatagggtcatcaatgtcaagcaattaattatttcctaaacaaagataaccctggatttcaaaagcacactcatcaattacagacagactagcccaaaagatgactaagggataatatctggaatataggttacagaatgcctttcaaatgtctgagatacacacattccggagtaccgtgaaaactaaacaaacaagaaagcaacacttaaacgcccgacatttcccagaatttgtataaaatagcatgctaactcactctggaaagcacagcctgcttatcctttcagatatagaagggaagatgaatctgttcactgctttctctcttccacctccccctgagtgttctccacatttaagagaaggtttttgctaaaaagtaaaatactccttggcattagg

SEQ ID NO: 38960 - DNA, 418 bp, Homo sapiens
ctctgtgcaggaccccctaaggtagaatataaaatgtcatcaactgttccctgccttgaatatcaggtcagtctactgtccctccttcccctagggcagcatatcctcaccagcagctcaactgttctggcaagagcagcctgtagcctgagccgggccttccctctcacctcctcttcccctcagaaaggtgttgcaagagctgctccctgctgccctctgtcttccaaagctcaatttggttaattcctccacagcttgtcttttttccccctatctttacacacctccataaacacagtttttcctcttttctcccatccttgcccagttacctgagagaaaaaaaatatggcgctagagtggatactgcgatttcaggaccgaaaccaattccaccaatggctgtggtgttagt

SEQ ID NO: 38961 - DNA, 1961 bp, Homo sapiens
gaaaggggtttccccttataaaaccataggatctcgtgagagttattcattaccacgagaacagtagggaggaaactgcccccatgattccattatctcccaccaggtccccccaaccacacatgagaattacagaaactaaaattcaaggtgagatttgggtggagacacagccaaaccgtatcagcgaccgtggtactcaggagacatcgtccgtgggatttgctctcagcgggggagttgcatgctccaagtcacacctttcctgaagtggcccctatccactcactgatcaatgaggagatagacaactgaaggactgtgcctgcttcagggctgccctgccatcagccaagtcatttgcggtacctgcatctcctcttctccagttctgcttctgttactccacaggggttgattcagagcggctccccagtcaactacactatctcagagtctgaattccaggaaactgacccaagatacccatcctctttttccccacattctttctttcttgttgtttttatagagacaggtgtctctaggatgcccaggctggagtgcagtcgtgcaatcacagctcacagtaaccgtgaactctggggttcaagtgatcctccagcctcagcctctagagtcgctgggactacaggcgtgatccttcacgctctcaaggctccgtattctttctttgtgattaaaaatgaaccttggggtggctgatcaatgctagtaaaacatgggtgtcaaactaaagttttaagtaaaattattccttaacttctaaaggcttcaaatgtgctgagaatttccccctggataatctccacaagtctccaacattctcctctcctcctctaattaaaaatgccatcgtcaaagccatattgtagaaaaaagaaattatttttattaatttggttatgttcagttataattaatggatttgcaaacacagtctgcatacctaaactataacatttgatttctctgcttcttttcattgcaaatgtacattagttcatctaggtttgaatttaagttgatttctatgagctgacccttcgttccttttattatttttggtagaaaaattatttttaagttcagaacaactgacagtgaaataaactgttggaactcaaatcgcctgaaagtgggagttcacaatggctccaaataattagctttggaaagagagagaggcctcacaccatagcagggacatgaaatgaagcttcagactcccccacctcgcaaagacacagcttcccagtagcttcactgtgtaacggcagaagggtcccagctggactgttgcattttaatttccctgcctccagatcactgcttggaccacaccttcatgactaagcagtccagccactcatagggcaattgggacaatgaggtcatatgtaccatgggcaacgaccagccattcttccctgcttatcagggcatgtgaggacacctactgcacagtccgtaagcttctccaagctctttattgggaagtaaaataggactgaatatttcattacatctctgagtgacttaaaaaaaatttttttcatttattctttattattttttaagttccagggtgcatgtgcaggcttgttacataagtaaacatgtgccatgatggcttcctgcacctatcaacccatcacctaggtattaagcccagcaagcattagctctttttcctgatgctttccctgcatgacttcccctaataggtcccagtatgtgttgttcccctccctgtgtccatgtgttctcattattcagctcccacttatgagtgagaacatgcagtgtttggttttctattgctcgttagtttgctgaggataatagcttccagcttcatccatgttctagcaaaagacatgatcttgttcctttttatggctgcctagtattccacggtgtatgtgtaccatattttc

SEQ ID NO: 38962 - DNA, 2191 bp, Homo sapiens
catgtatctttataacagaatgatttatattcctttgagtatatacccagtaaagggattgttaggtcaaatggtatttccagttccaaatctttgagaaattgccacactgtcttccacaatgattgaactaatttaactttaaaaaatttttattggcagtactctctgagagactagagttatacattaacaaggccagacgttaccatttacatgagagcaaagaccaaaaataataactgcagaccagagacataccagccaaaatgatgtggatgggcagaccttctttttcaaagcaaggcttctaggaagcaagcagcgtgttcacatgcattctgacacaggcttcttatctcttcgtggctgagtagcaaacaattcaaatactggcttctttgaggaacactttcagagaaaccgaaagtcacagcactaccaaagctgctgattttgagatgctgatgcaatgttttgctcttctttaagtaagggagaatttcctcttcccctttggcatggataacaaagtaatgctgcctcctgctcccaatgacccctctccttaagactcaggcacaagcccatgggacctgggccagaggacagtctggaaagtagatactgtgagttgttccgcatctcttacactccagcagcaaggcattttctttgctacattattatttctcttaaaaagtgttgtttcccaaccaagggtctggccatgcctgggatgcctggaagaccatcaaatgtcaccagcctggaatgcgtggaggaccatcacctctacctcccccctcaaaccatggcattgactaacatacttaaggaaacaagatgctgacaatatcggctgggtagacccagttaattccccactaagtacacccaattgatttccctacctttgaaggtgcattttttaagggcattagaaagatttgttgataacaataaaggctatattatggaattaactatagtttactaaataacactaccatacatttacacacaaaaaaaatgcaaatgatatagtactagcaccaggatatgacactgatattctctatcaatccttcctcagtagcatatcggtaaattccacatgtagctaaagaaatatctctccatttttttttttcaaattatcttccactgttctgctgctgtggcggcattgcttactgactctctttacctccatatgagttcgcaccccattctgtaccagaccattacttccttctatcagggcttgtattcatctgttcattcattcaacaaatacagtttagggtcttccatgtgctggagtattgttgtaggtattggagatacaaagataaagcagatacagccccttccagtttctctaggatcaggcagcacggaagactgaaaaaggaaatgaatcttgtactgagttttttaactactttatttcattttgtatttgtcttcaagatcactttattgtcaagtacgattattatttttttttagacaaagtcttgatctgtcacccaggctggagtgcagtggcacgatctcagctcactgcaacctccacctcccagcttcaagtgaatctcctgcctcagccttccaagtagctgagactacaagcacgtaccaccacatccagcttatttttatatttttagtagagagaggtgaggtttcgccacgttggccaggctgagctcgaactcctgacctcagttgatccacctgcctcggcctcccaaagtgctggggttacaggcataaggattttaattgacataagcaaatgagagaaaaacaaaggtagatttgtgaaataaaagatgactttatgccaaatgaaagcgaaggaggttcaggtgccaaggtctctatagttcaaatggagaagtggtggagaaattggggccactccaatgccttgtgcaacagcataagcatgccaaattccaaaacctgtaccatgacagccagtaatacattcacactgtgagtagcagtttaaatttctcaaaacttcatctgtcacaccaaatttatgttgttaatttgagttttactggttttagagtttttttcttcagtttgtaaatttatttcagttttataattagaagagctataagcatcagcctttacacccagctttatgtttgcacttatgtaagtaaca

SEQ ID NO: 38963 - DNA, 2070 bp, Homo sapiens
acaaactacataatttatccaaccaaaacaactacaaaatcataagaaaaataaaatgtaatggaggagagtctctattgattaaatgagacttaaaagatatttaactaatttcattgtatgaatcctgagtttttttaagttgtggagaaagagaaagcatgtgagaaaaagggagcattcctaagacaattaaggaaatgtgaagactaattggatatctgatgtttttatggaatttctgtcaattttgaggatatgattattgtctgttgtgtgtattgtggttacattgtaatagcatagtccttgtcttttacaaatgcatcctgaaatatttacatatgaaattatattaatgatataacatggctgggatttgcctagtatcatccagggaagggggaagaagaagagccacagaaaaatgcaattggtcataagctgaacattgtcaaaatgtagtgacagatataagggagatcaacatattatttgtctacttttgtacatgttgaaaatttttttaacaaaatttgttttaatattaaaattcctacactcccatgcctgctagattttgcttcctctaagttttttcaatataagcatattttttactaagtttctatgggttttttttttactaccatcatcatctactaaaagtcatttactaagtatctcatatgtgggcctcgatttaacaaaattcacatgtcgccaaagcgtagacataaaactacatggaattagaaagaaaatcaacttaatagagtcactttgtagaccaaaagacctgggcagcttctaacgaaatgcttaattaggaaccacaaaccttcccaaacaataagcaatcagaacttcttaaaaagccacccctgtaaaacagttattgctgctgtataacataatataggcccacctggaaagattctttaaaacatctggagtccaaatacatctgctacaggtgagcaaacaaagcctccataaagccacagaacagacaaaataagctgattgaccagaggggcacatttatgaatagcccattaggaagagggatacacagcacttctatccacggcacattctcaagaaaaggaagccacatagaagtacaatgaagcatcagtcaaaaccatcctcatttgcatttggtgcaaaataaactttcccaattcagacagacagcaaatatttaacaaggaaagaagagaagcaggtgcagtatttgagcaattggaaacgactcctggcatcattgagagagtcatcggtgggacatttaggtcagtgacctccagacacaactagtgcttttgatctttataaaaaatagaaggtattttaagaggggaatcatccttgctccccagccccagagttccaaccaaataaaaacacatggcaaggcggtggtgaaaaacctcagccatcagtcaaagtaagtaacacaagtaaagcctgaaaagtggttgaattcggacttcaggtgagatcaacaaggtgttgatttttggagtttctagttgatgtcctcaaagcttcaagacacttaaggagcagctttctgagtggctgtaagccaatatcttcgtaaatgtgtccaccatgccatctgcgccagaaccaccctgaggtgttgctgaatgcggacctcctaaattaaaatggcaagtgtgactaaggactccaaatttttaagccccctagctggtatgtatgcccactcaaatttgagaaccattgtacaaattggagaaccaggcccgaacagtgaaggttatcagaagatctcaaaatgccccacagcagaagcaaatgcttattatttttgctttacataaagtgcaagtaaaatcatttttaaattgcctgtctcatgtctacaaaacttggcaggaggatggaggtaagggttggaggatattcagtgtcagagattttaactctggctagaattcttatttttttactcttttgagttatataggtttagtgttcatgaaaaaaaaaaaagaattagcttcatgacggaagagactgacccattatttttgt

SEQ ID NO: 38964 - DNA, 2474 bp, Homo sapiens
tcaaacccatgtgtgggctattaaaattgcattaaaatatatatatgagcaaatgtagcccatgagatgggagctggctgctggaaaaatcactggcccagaacaaggggtttggccgttgcatctcaccaggccttcaccagcccccatcgctcaaatcctgcttgtctcccaaagtctaaaatgatagcatcggcattttgcatcctctgtctactgagatggaagcctctcgtggaaaaaattctggaaaggcatacaccagctcattcacagcagctacctctcgggaggaaattgtaggggaaagcaggagatacttttaaattcatgcactttgggattttataatctgtcaaaacaagcatgtattacttttgtaatttaagaagtcaatcatgagtcttttgttaagggttctgtggaggataaaagtaggttcctcagacagatgactatatggaaattctcaatgacagacaattgcagcttgctccagtgggaagcaaggaaaaacaggaatctcatccagctggtcgtcaccaatgccacgtcttctcaggacccagcgttcagcctctcagagggggcttcacacctgggcttctcttgtgttcctttagcctcgatggagcaagtgttcgcttcatcaacattctgctccggaaggcggtctgcagtgttccctgcaagactgcctgcctgagaccagggccactcccagactatttcaaacgatcccttgtttgcctgatgcccagggtcccgctgaacaaattggtttaaaccctcgagccctgttccaaaggggatacagcaaagggatttatgagaagtcatgtctgcagacaagaggaaaatattgggtaatcagagcagtcttgcagaggctggcggtggtaactagacgtccgctctgaggcaaggcagagaactgggtcatgttacctggactccatggcaccacagtgggtcccattcacaaaaccacaccccatggcccagagccggtagaggctccatgccaagggcatcttttccaaaatgtggcaactcagatgtgtaatcagaaagagtctacatttccctgtggtcagtgtctgtgactaaaagtgaggcaaggctggcattgcacaatgacttttagagttggaagggactgtgggtggatctagagggtgatttcagactggacttcacagagcccccagggtcagagccagcatctcaggacacaagggtgaagctaacggggtctctgagatgcccgctctgtatttatcaagagtggtttaccattgatccatgttatatttggcttcttctgtaaatgccaggcagctttgtggtccaatcttggtgtggagtcacattcaaagaaacagctgtcattcaaaaaatatataatctaaagcaattcaaatctatactcagtctctaaagaaaaagcccaaggggtgaagagtgcatttaatgcacaccaagatatctttaaaatccattactcccaattgctgccattctcaatctccttcatccagatggcaggtgcttcctgaaatcttatgttccttcttactttcacagccagaacaaaaactttccacgacaaccaacctgtgaggttcctccacctctctttcctcccttgtctggctcagttcccctttatgtagctcaacttagcctgtctgacttcaccagttgagtttttattttcccgttgtttgccctgagtctgccccacacagcaaagcccaggtgctgctgtagcccatatgaactcttggtaggcagggaaaatgaaagaagtctgtgaatcctaatacggtagtcatttctacctcattgcattgaagtcccacagaaaaaaatcatttgtaaaaggatatcactaatctaatcttcctaattggcatctctgagaaaattctaactggtaatcattctgcctctacacccccagtgacaaggagggcattactttacaaagcaacatgcatacgtgttagccaggtttcatttttttcaagttcttccctggccaatttttcataaggtttgaggtctggccaaaagtccttctgcttaaaaatatttctttctgtcaatcagaagaaatgtctcaatgtctgagattcccacattgtgttctcaaggactagttaaatataaatatattttctaaaacaagtaaactcttcagtcactaacaccagccttattctttgaatttatttctcacgttagctagccaggcaaccagtgatacctcgagaccttgggttaggagtgaagaaggaaaaacttccaaagtatgaagtgaccaggaggcaaggcccagagagagtcacaacgaagtgggaggaggggctagagcctgaagaaagggcagattcaaagacagacagtgatggagacccctgcccaacccacagccctcagaggaacaggccttgaaccaccagacacag

SEQ ID NO: 38965 - DNA, 1870 bp, Homo sapiens
cataaggacatgtaagttgtaaaagtcagagaagcccaaaactacagcttcctaacaggtatttatagttctgtcagtctaggagcaatttcccaatcaagggtcatttttaccatgagcaatgtctcctagcatcatggttgacacatagcatcataactggtttccagagaacaggcagttaacgaaaggtcaattaggttttgtaactcttttacccacagcataacaagtatacccaacttatagcactgtatcaagaagcagatgaattagtgcatgccaagggcttagaacaagggctggaacataggaagctctcaataaatgttagttattgttattggatatttctgggatagtctgtattttctctgccttacaagatctgatgatccagttatttcttcagttctcttagctaccaccaatccttccagtaaactgaacctttgcttacgttgatcagtacctttctactacaatttatcaatttgaattaccttggagtagccagaggagaaagaacccatctgaaccaggtagtctaaacctacctgactataggacttttgctgaagctcagatttctcaagttactgagagtctgaaaacttccaacatcccactggcccagagtgacaagtgacctgaagcctatgtggcttccagcccagagccttcggtgactgccatcaaggaagaagccctgttgctccacttacttcactctgtgattttaggttgctgtgtttattagcgacttgtgggaagaatgttgtcagtgtacacaggttcaagtagagagtggtctcagagaagcagctaattagggagcagggtgtcaaactcaagtaaacaagacagggatgcttttatccttgtatgatccttggccagagcaaagacctcaagccagggaggagcaggttatggtaaatctgtgcctaaaggggaatcactacaaatggcatattcatttctttcttctgctattggtgaatgggaatgatggtatcagcaaattttgttccccttcatttcactgaggtaactgtctggtgttgaaacaggatgactcactttaaagcatttctcctcccgtctccttcttagggtcatggtgtctggttttctgaattgatagttcctttccttgtcccagttcccccaagtcccctgcctccagcacgctgggtctggcctggcttccacctttctgcctccgacactccgactaaagcgttcagagcaaggaaccaaggtggcttttcttggttttcttgtcctggagcctggtagagtgattggaactgtactccttgctaaagtgagtcttcatgcactgggtctaaggaacattgcctgggaagatgacttcttcagaatagaggagagggtaaatggatacaaaacataagcaaatgtcctgatacaggctgagacttccactgccatctttccctccagaagcgaggcaatgcagtccagcccccggtgcctcccagtgggctcaggcttctttgtgctactgtcctacctgatatagactagtcattgtcttcatagatgaccattacctgtgctattagttacctattttacttcaaattattccgctctttttcttttccttaaatgcctattttactctaagttcaaaatatccaatgcaatcataagttccatgtattttgtatttccttaataaacacctatagaactctcataatgtaaccaaatattaactcattacaaatattaactcattgaatctttgcaataaccctgtgaggtagggctactattatccccaatttacagattaggaaattgagacttaaactaatgaggaaataatcatatcata

SEQ ID NO: 38966 - DNA, 1061 bp, Homo sapiens
gaaaaccagaggttttcatttttcatttaatcctcttcttccagtctaattcctcagagatagctattgttgaacatttcctcttctttttctgatagctacttccataactccaagaatacgcttatacttccaatttctcatatgttaactttaaacttccttgtactccctctatgaataaagagtaacttagcttttcctctgtgcacacgtgtgctctctctttctctctctccccctctctctctcctatctcattgcaagggaggctggaaaagtgaggaagcagattatcaatagcactttggaccaaccatgattcatcccttaaggttggcaccttgctgcccaaacaaaagctggattctgatggcaaggaagaaacaaagggcatgaacaccggggcagctaatatgtttgccacaagtaatatgatgttttctttgccaacatctgttatccccttctcccatcaatctattaagtacactcagactttcccttgcagaacagttatagtcttagctctcagagtggacactgattggcttatgccaataaactcatttttggctgtatattagaatcacccagggagtgttttaaaatagccatgcatgggatccacttcccagaccaatgacatcagaatcccttgaaggggttccaggtttgtgatccaatgacctaagccaactagcataacctattggttcagcgatgggcacattacccaactcaagccaaaagagaggcagtgaaatccatgaagcttctggagcaatcaggaatggtgttttctcttctcctgcacaatgtgatatgaaggtgcaaaatctggaaatgctctcatcactttgactagcctgagaagagccagattaagcaataagtaacagagaacaaagttgaaagaatcacagagatatagagcctatggatatcctgagactctgggtcaattctcatctgaagtcagacctacttcaggaactctgttgtcttagccaattccatttgggtttaaacaactggagttctttttctggcccttgcat

SEQ ID NO: 38967 - DNA, 1074 bp, Homo sapiens
aaacatgttttttatggaagaagaaactaggttaatttgcactcgggtccattgaaaatcaccccatgttaagtgctttattaacaacaaagacaacagcatattggtaaaagagcttgggtgtgacttttcctcacctagattgtaattcgacatagcaattatttcaagagggtgtgcccagcttgtattcatttgctgtgtggcctgcctcctagattgcaaaaccataaaatgacacatctcactcctgggctgtaaatagcatgaccatgtgtaaggattatgtaacaacaagtatccggggacctggcacccaaaggaaaggactgtttcaggtcaagaaaaatacggtctctttccagaacactggatttaagtctgagaagcagcaggtctcagcccacatcagaactgggcaggtgctcccatttccccacatattcaattaaagccagaaagcaagcccagtgttcttatggagggctcctcagaaccctcctcgatgccccacctgagcccaagcatgtcaggaggttccactgcgtctgtatctgggactctcctgggctccatgcaattaagagccatttttactgtaagaggagccagaccaaccaagggaagaggcagggctaggagtggtggtgagggcacagtggtgaaaaaggcaacacacaaagatctattaattagcatgtgactttacaggcaggggaggggaagacagctgcaaagaaaggtactgatgtaaaggaagaatcttagacccttggaaagataaatgctgaccaatggcttcatcgcctttctgctttatctactctggtgaaattcctcaaagcctgctccagttcctaaacacagacacagacacacacacagacacacacacacacacacacacacacactctctctctctctctctctctccctctctccacctcccactttctccagcacacccacagtaaatcaaagcaaaacagtttagaaagatccagggaaacagccaccacaaaatgtgttaggaaataacagggagagaattttattttatatgaattatata

SEQ ID NO: 38968 - DNA, 2833 bp, Homo sapiens
aatggatgagtgagtaaaccgaatgtggcatatacacactatggaatattattccgcttgaaaaaggaaggaaatgctgacggctgctgcagtgtgaatgaactttggaaacattacgctaagtgaagcaagctagctatgaaaggacaaatactgcatgattccacttacagtacgtacctaaagtagccaaattcatagagaaagaaagtagaaagttgccaggagctggggagttattgtctagtgggcacagagttttagtttgagaagataaaaaagttctggagatgcataatggtgattgttgccaaaaaatatgaacgtactcaatgccaccaaactgtaccacttaactgaaaaatgattacaagaggaaatttttgttatatatattttaaatttaaaaagaaaggtgatccttgtctagggcagtcccagtttatatttttggcctggaatacttaatattagcagcccctctcctcttacttaagaacttaagtgactatgtcccaaactggacaacagatagtataatcactctaagattaaataactattcagtatcatctcattagaatatggcagaggtatgcttcttatcctcaaatctgtctgattccagagcccatgttcttcaccaccacacatcctgcagaattgctaatgatgctgctcgctggcctacatcaggtttgccactatttattgtgtcaactctgctgacttacatggagcactgaggtgctacctacttagtaagaaacactggccgggcacggtggctcacacctgtaatcccaacactttgggaggctgaggtgggtggatcacctgaggtcaggagttcaagaccagcctgaccaacactgcgaaaccctgtctctactgaaaatacaaaaattagccggatgtggtggtgcatgcctgtaattccagctagttgggaggctgagacaggagaatcacttgaacctgggaagcagaggttgcagtgagccaagatcacgccattgcactccagcctgggtgacaggagcaaaattctgtcacagcaaaactccgtcaaaaaaaaaaaaagaaaagaaaaaagaaacattgattctcttaatgctaatcaaaagaaatgcttatatattttttaaaaaggagaacggggatgagcaaagaatagaaacatcacagaccgatgaacagaacatcttctggtataatccatgggttttagtaatcgaatggtgcaatagcatcagggccaaaagcaggtggatacaaaaccaacaccaaaaccagtcactccatgactcagttgacacagggtgagtaatgatcagcaaacatagaccggagtgtctactcgaggcaggaagccaataactgcttgggaactttgtctttgaccaaagaggttccactgacgctctttctaaactcactggagagcctggagtaatgtttctagtcatgcaggtttctgggtcacaccgacctgagctgggatcccaatgctcccagtcacttcctccaacactttgtaccagtgacaaagtctctaatcatctgagtcaaaatgcctctttcatagggttaccgtgaggattcagtatttgtctggagaacatgaagcatgttgcttagcatacagggtaatattctataaatattattacctagaaaatagagtgcaagaacccttgattctcagatcctagtaagcttgtttattctctccctccaccctgccccaaatcctctaaacccaaatagtcactagcaaagtaaaagaaagaataaatgcattcaagaatccagataatctggacctcaaagaaagaagccttcggaggatcccaaaattatctagaaaatcgcttcccttttccagttattttgctcctccgtggttggggtaaaacttgcagtcctatctccaaatgtagccaatgttcacccacttctggaaaaatcagatggccccgaaagagtgggctttgtccaattcttggggacatattgagacacagtaatgcagagccagactggagtatctcagtttctgagtgcttaagcattatgtggctggtccacgatcagttcaacccccctttccctgtttctcccacccaatattccaatcaactctgttttgttgtccctttttgtattagggatatgataggctaagtgtatgacccagacattggagacagcccctgggggaaggtctgttcctatcttaaacatttttaaggaagtgtttacaatgtctggcaataccctagcaggtagtcttcacgtactgggggcaaataaattataaatgaggatcatttatgtgtctgcctctgtagttttaattttttgcttttatttttagttgacatgtagtaattgtatgtatttatgaagtattgcctctgtagttttaaaaaaataaaatttagctgctcccagggggtttggccaagtgtggttttcagagatcactccagccacacaagcatctggtgaccatgtggttcctgctgatgagtgacaggcaggcagacacatgtcatgagaggtatatgcatttgtcagcatacaattacttaatagccttaaaggataagcgtagaatttctgtcactcattatgccaaataaacatcaccagtttttgaaccaaaacagtacttgaaagagtttatgagaatgatctgatagttagtgtattagtctattttcatgctgctgataaagacataccccagactgagaaatttacaaaagaaagaggtttaattggacttacagttccacgtggctggggaagcctcacaatcatggca

SEQ ID NO: 38969 - DNA, 2210 bp, Homo sapiens
actgaaacagcaatcctggacagaaaactggaaatactcaagcctctgaggttgaaactaagctcaagtctgtatttcatgttactaagagccctgacaagttcagtgtataacctaagcataaaattctagattgcagttacccactacctattagattagagatagattattccatttctccctacacacaataatctaaaaatctaagtgggagtgtcattgacaagagcaatcaaaatcactgtatattgtgtgtatgactttatatatataatatacatgagttacatgtttatatacatgtgtgcttaccaaacagcgaggagtagatggtaatttctaagtactacatcctagaagaggaagatggataagggcaaagtaatcaaagaagattgcttgagaaggccttgaaaatagcttttgggaaggaggagcaaggataaaggtcaccacttgagggagggttggagccaatgagtggattattcccacggccgcaaggagtgtacactgtttaatgtactggaaaatcagagtggacaggcaggaaggggttatgtaagatctccaaagtcaagggggtgtttggacttgatagagtaagaaaaggtaaatcattccttagaaaaagttgtgcaagctgtattacgtgagtttcatacttcaaaagaaagaaaccctggctttagtatttgcttactcaaccctggaattccacctgaaatactgtttcctaattccattttaaatattctgtttctgtcatgtctacccctgaggcatgacctagtccagcctcgatttcagcaaactcaagatagaaaatgattgcttaaaatcacagccctgaacaaaactgggctggtatggtctcttcacaaagcctcttagcttattgctaatgagcattacatttcctcacacttcatagcttaacctgtaatgaatcaacatcctagtgaataggctgccccttgatgaaacatgcatttttttcatgtgaaaaatatttccttatactcagtcactggaatcgtcttcgttgggtaataaaattgaatgagaaatagacaacttttttgctgagtggcacagaaatccacagtcgcccgtttcactgtaatataccgatcaaatacccagtcacagttgtattttatcagacccctatggaaacttctgatcaacttctctcccttacttccctgcccaggtaggacacccgaattcttggcactttgcacagacatccagctgggtctcaggtgtctccgaagatttgtgcttttcggcaaaaatcttactcaaggaacaaacccaaaacatcccataaggaaccaaggggctgagatggcgcctccgcgtgcccttccagcaagcccacctccccaactcacacaagcacacaggtgtccacactctcggcgcccggctacggcccaggtaagcccagatcccggcccgggcggcgcacccacctgacgaggggctccttctcaggcagggcgcgctcctccaagcactcgcacccgcagcagcagcacacggttctcagccagtccctcagccccatggagagcgagggcccccaccggcgccggaagcctggggccgagtcgccgcggcgagcgatcgaggctggggcgcggccaccgcgccagcgtccaggtgcggggacagcggcagcccgggcgtcgcgggctggtccgcgcgcatcacgccgcggccggggacgcgggcgagggctgcaggccgcgcgccctcctctccttgcgttttgtttggggcgtgagttttcttcgggctttttttcccctcttttaattccccgagcgcaatttggggcgcatgcgtccacgagacgccccgctaccgccctctaagggtgaagcagggactccagccagtcctcaaaatcccagggcaccggaggctggcagccgggctgggggagggcggggaggggaaagccctggagccacagagcacgaggttgggctgaatctattcgtaccttttattggcttcactgcgcgaggaaattaaagatcctcccccacccctacaggccttcaaagcagagttttgggcatgtttttgatgtcagctccacacagagtaaaagttaccaaaagagcatggattgatgcatatcggcgtagggtttttttttaaataatatatttacaatgatttgaaaaatt

SEQ ID NO: 38970 - DNA, 1813 bp, Homo sapiens
ctgggcaacaggagcaaaactccatctcagaaaaaaaaaaaaaaaaaaaggaaagaaagaaaaatcagagtgcacaatacatagtaagaatgtttgcttcacgaattttgttttgcctatagacacatatacacatatgtgtttactaggtcaagatgtaaaatttcttactatgagtcatggtccaaagtgtgaaggccactggaaaaggaaacgattcttaagagaacaaaagcaagaagtatctgaaacacttcttttccatgttaaagacaagctgtgttttttttctagccaaccgaatatcagaaaagccagtgatttcatttcaaaaatgtattttaagaaaagaaactctcattacttcttacatatgcatgaaagaggacacatttcactcataaaggaactacaacttttctaaagggcagtttggcaatatctcttaaaattacaaaggcatttggctttggacttagcaattatacctcttgcaatttaggctacacactatctgatgtacagaaaatgttacttactgcaggtgtttagtttggttttggtaataacaaaaggttggaaacaacccaaatgctcaccaactggaaaatggttacacaaatcattccttacttatggtttataaaagtggcatattagccataaaaaaataagaagaaatctctttagactctgttaagaaaatatctccaggatatttgcttcatttgagaacatcaagatacagaatagtgtttatagcatcctaaatttgtggttaaaatgtaggaaaaagatatgcccccaaaactattaacactagttgcctgtgaggatgggaaatgccagaaagaacctacaatctgaattatttcttccaagatgctaaaataggtaaatacatttagtaaagaataatgagcaggaaaagaaggtagagtggtatcaatggcctgcacaccattttttactctgtttttagtaacatcacattgatttccacttgaggaagtacctcttgcctgttctcagtccatgtctgagcgatgatgaccacagttcctcattcctcaggctgaccatgcatagcagagcaacctcatttctacagtttttggttaatgactgaacacataaccaggcagggtcagttaatgagtatcctctctgggacctgctggcaccattaatattgtttttgctggcatgacttgagaggcactctctcactggagagttaagaacagctagagtgttgacctgtaactcttgctagtactcgccttttgccacacctagagacagcctgcctgagaatgtacgcagacatgaagaaagcaaaaccaaaaggagaggcagcttcctgctaacattgtggctgaacctaacatgccctttccgcagtggctctgcaggtaccaggatcccctccagggcttgcacgacggctgcgctctgcccccagagtttctcttgcagcagatctggtgtggggctggataatttgctgtgctaacaacttctcccaagtgatggggatgtggctggtctggaagccacttttggagaaccactgccctagatttttacttaagccaagttgaattttatttttatcctatacatgtttgggagttctgcataatccaggaaatgagcagggtactaaaatttgcataaaggaggcatgctgtctgtgtacagagtggctaatcagaggcacaaaaccttagaaacttttggagaaaaaatcctggattatctgttaggaggaacaacttagcagtcctgtgtaaaatcaagtagctatatt

SEQ ID NO: 38971 - DNA, 532 bp, Homo sapiens
aagcaaattgaagctcatccttctcgtgcaacagtatagcaaagaaaaaaaatcattaagccttcaatttgtactgtacaggtgagtccattaaatgttatgggttgtgatagataaatctctctcctagttgtactttcaaatccttgattccctcgcttctcccttcgtggagaagggtgcaacttacagggaacaagcaatagttgtgcaatatattctcctggttcaaaaacccaaagttcttgtgacattaccactactggaatttcctcttcacaatcaaaatcaacaactcctggggctacagtaacgccctgcaagttaagatgacttttgcccaaaactctctatttgtctctatttaactctacctctatttctatttatccctacttatctctatttgtccctgcaggcctctttaggtcccttcaggtctctgtttgtccctgaaagtcccgtttgggtgccactttgacaaaaatttttgaaggtcatgaaataattgtactttttcccattgactatt

SEQ ID NO: 38972 - DNA, 1280 bp, Homo sapiens
gccaaaaagacatagttcacaccaaaaaaccaaaaccaaaaacaaaaaacagtggccttctgactagaaagaaaactggaggctaggcgcggggcctccatgcctgtaatcctagcacttagggaggctgaggcgggcagatcactggaggtccgagttcaagaccagcctggccaacatgccaaaaccccatctctagtaaaaatatgacaatgtcgtggaaatagccattgattctggcataaaaaaataaagaggaaaaagtaattataaaaatgatttttatggccaggcccggtggctcacagcactttgggaggtcaagggggatggatcataaggtcaggagttcaagaccagcctggccaacgtggtaaaaccccgtctctattaaaaatactgctcaggaggctgaggcagagaattgcttgaacctgggaggtggaggttgcagtgagccgagattgcgccactgtactccagcctgggcgacagagcgaaactccatctcaaaaaaaaaaaaaaagaaaaagatttttaatattctttcactgaaggaaatccatttccaatacaacaaaataattgtgtatatatatttttaagtatatgatgtctttttctcaaaagacacgccaccactttcatcagaatctcagacagattcatgtcttccaaaagattacaagaccaatgtcctaatgttttagtttgtggtaagaaaaatatagtctatcaccttattccaggggtgtagtttttggccaatgcatatttatgcaacaggatgaaagttcaaatagcacacttatgcaacaggatgaaagttcaaatagcacacttatgcaacaggatgaaagttcaaatacataaaaatctattaaaaatccttcaaagtggactagggtcctacgaatctgctgagaagcctagtatctgacctatgcatgaattgataactgattctgattttcttacagatattcctgaaagaggatagagcttggtgttgagaataaactgggcagtaatggtgatgaggttacatcatggccttactaggaaatgtttttgcttttttttttttttttaactaaaaacatagattttttttttttagttcatactgtgccagatgttggaaacacagtcgtaaccaaagataatttagatgttcattaaaaaatatttaaaagacgaagacaattttaattactcataattaacattattttcagaaaaatggctaaaaatcttataaacttccttccagtccattt

SEQ ID NO: 38973 - DNA, 1502 bp, Homo sapiens
cctatctcaaaaccaacaaacaatttatcttatgttgcaaatatttttcttcatatgcctttaaactttatatatttttttaattcaatgaggatttacactttcatacaggtagattgatttatgttctcctttgtggtttattccctcacttatgtgtttacaaaggccttccttcacccaagttaaggtaaatattcagcatatttccttgctgtggttaagagatgtgagaagatactatgagagactcactatgttcacaactttttccagttaaatgaagtcttcccacgtttcctaatcactcacattaagcatatagaatggattaattttaaatctgaatataaaactaattgcacagcatgtttcactgctcttcttactgcctacctggggcacagtctctttggcctgagtggtctcttcagtttttaacgagtggctccacaattccttaggaagagctgctctcttctgtctccctggtggtcgtaatttcgcccacacctgccccgtctttgctctgcagctccacactccctcagccccgccgagagctcctggctcccgtctccaggttaccccaggtcaccacagccacctctctgcaccagcggcccgctcacgtacccagctccaggagctccttcacgatggcttttccgatgcccgtggccccgccggtgacgatggccacttggccctgcagcaaaccaggcgccaggtagctcctgcccttagcccaggaggccatccctgcagcggggtgccagagcagctgagcgcaggcccttctgggtctcagggacattcgaggcgggcgggcggacagggcggtgctcgagcccacgtgaccaccagaaccccgcaccctccccggcccggccccgccccgcccgccggccgcggcaaagccgcatcctcccggagcagaaccgctccccgccggctgtccgcaacctccgccagcgtcggtccctgggcaggtgtgggtgagactgctcgttcgtttctttaaatttcgatgccattggggagggtggaagggaaatgcaaaaaaaaaaaaagaagaagaaagaaacaagcagggtgtgctctatttcaaaaattcaatcctcagggctgaagctctcacgattaattaaaattaaatctccagtgcagctggaaaaagaaaggctgctgctcggcgccctcgctgcgcccgcctgccggggtcggacgtcggcgatgctgtggctccaggtgctgtgtgccgctggctgggaaggggagaaagggcaggcttagctgagggggagaaatgcggctttcagatcctttcatccttcgggagggagcccgggaaagagagtgaaggggaagaggagatgcggttgcagttttccacagaaccaagagaataaacgatttgaaaaaataaactcaggcccacctccgtctcacctcccactccccacccaagaatcaaggggaaagatcatctttaccaggtt

SEQ ID NO: 38974 - DNA, 1685 bp, Homo sapiens
agttaagtgactttctgcattcatactcatactcaagaaaatctaactccacaataaccaaaaataaaaagtagaaaaaaacccacaagtgatgagaaaaaaaaaaatcaaaagttataaaaaataaatgaaaaaatgaaattaaaggaaaaaagattttttaaaaaagtaaaaaaaagaaaagaaatctaactccagagctctgacacaaaatgccttaggtgttattctcaatgagagaaaagggacgtgaatctttaagtgattaagtgaatctttaagtaaatctgtcgtactagcgtttcaggcggctcaaacaccacacgctcccgactacggcggaatggagagaatgtgcgcatgctcggcgggaatctgcgcatgctcggcgggaatctgcgcatgctcggagagaatctgcgcatgctcggccggaatctgcgcgagctcggcgggaatctgcgcaagctcggcgggaatctgcgcatgctcagagttccggggcacggtttccccgcccctttcaggcctagcaggaaacgaagcggctctttccgctatctgccgcttgtccaccggaagcgagttgcgacacggcaggttcccgcccggaagaagcgaccaaagcgcctgaggaccggcaacatggtgcggtcggggaataaggtataaagaaagccatggacttgggctttacccggactggggatccggagagggtggttcggaagcaggaatcgtgggatcgcggtcaagacaaagaatggggcaagagaagatcatggtggtgggctcagtcaggagggccgggaccgagggatgcgctatgagaaaagctggagatttggggctccaagacctgaatttgagcctcgctgactccacctcttccattacccacccatcccatccctcttctccctctctacctgctctttgtctcacctgcctccccacccgcctcccctctctctctctttatcccattccactccctagccccacttcctctattacttccgagcctgggttcttaagatctctatgagaatgaaaattagctgtgataaagcaactatcccacagggcttgttgtaaaacttaagagagggactatctgtgactaaaataacttaaactgtaaagcgtcgtattattagctttataataacgtagtatcccgcatttattgaaagcccactctgtgagggacggatctaaaccttttattcttatctcatttaatcttcacaaccccttgaagtgaaaactatttatccccattttgcaagtgggaaaaccgaggaataaagaactgtgggcttttcctggtgaaatccggatttgaatccaagctgtctggtttcagggccctggagaacccctgtgttgctagaaatctatgaccattggtgtcccagatcagtaacagaaattacaatgaattttaaagtgatttttttttttcaacataaaagagtggtagttgtctctgaagggtcactagagggagatgtggttccagggattaatgaatttattcaatacagataaacaagatacgagtttgagcaactgatccctagttccctcaactcctcattgagaaatgttgattaaaacgatcatgaacttttaataatgccactcacctccttttttcgtcctctttcagctgctgaaaa

SEQ ID NO: 38975 - DNA, 1066 bp, Homo sapiens
tacaggaatcttaacagacagaaaacacctggagttagcaagctataatccttaaggtttcgagcatgcgcagtaaaagagcaagatggtgaactttaactggtataaaagctgcctctgggggcgctcgaccaataatgccgagttgccgctactgagcatgcgcatgactagtaaccacactacgcatgcggccccctcttaagcagtagcagggctagtgcgcatgcgttgattaattcgggctgctcaagggaggaacaaaggagactggaagcccgggaaaagatggcgccggtggttggggggcggggcggtctaaaaactaaacaaagaagggcgcagggcacttgatttttcacgtggccctcttggttctcttccaagtgtactctgctttctccagtaaactctcactttgcttaaaataaatttttcctcctgctttaaaccttgcttatgtctgtcgtttcaattgtttacttcgagaagaccaagaaccgagattactgcggagtcgccactccggagtttctctggataactgccgacttacaccccagtaacaagagtataggtgtttttttgtttgtttgtttttgttgtagagagaaagagtcagaatcaggaagtcagaatcaggaacttagtgccagtcccatactacattcagaatttcctcccctcccatgactgagattttgtctagggcaagattaccttgccttaagatggatgcttgtctaggcggcagatacctgcccagccagtatgctacgcatgcttgaatccagcagcaggcacccagacaccgttagtccatgtacaactgggaattgttgtgttgtttacagactaaaggattaaacagaccctacaaaaatgaagaatgacagaattccattatctctccatacagcactcttccccatcaatgtaaaaaggcttatgttaataattagacaggactgtcttttgtgtcagatactattttttgtttttatatttcattatgaaatatttcataaaataggcaaatatggagaatatacaggtaaccaatttt

SEQ ID NO: 38976 - DNA, 731 bp, Homo sapiens
agccgagagcctatgtttatataaatatcctatgtaattaaaaagaaaaatacagttaaatcccagaaataaaagaaatttaaatatagaaaaatatataacttatcaattgaatgtttccaaacagaagagttttagcttctgtcaggcattgcatatctccagcatacgtttttgagaacattttgttctgaaaatttcctgttggcatttttctctgtgggtctctaggtttctgaataatgtgttcttatgtttacaaatcatgctgtactttagtcaaccatggtttatctttggaggataactagtacgttaacatttgccagattttttcttttaggctgggtaatcattgagctaactagattgcaaaatatgctactttaaaaaatgtaattagattttaatcatctctatattgtatgtgtggtttgtgtatctgctgctgctttttcaccattgatcacaaggggcagtcatctgattccagggaatagaagatggaggcttgctctggcgtgtgcgtgtgttgttaatgtatgcatggaactaatttcagcttgtagaaaatgaggccccatatgcttaacagatgctcttctctttttctccagggttccgctatggaagtgatatagttcctttctctaaagtggatgaggaacaaatgaaatataaatcggaggggaagtgcttctctgttttgggattttgtaaatcttctcagg

SEQ ID NO: 38977 - DNA, 1650 bp, Homo sapiens
gtagtctttatgcagtagtttggacacagcagacaactctttcctttaaataatctcttctcttagtatctgtgatgccatgaactcctgacacacacacacacacacacacacacacacacacactctctctctctctctctctctctctctctctctctctctccccgtctccctgtctctccctctctctctctctgactaatccttcttagcctccttcttcagctccctttccactatccaaccgctaaaatttcttctttcttctacactttctaaggagccacgctgtacccctacctcaggactctcacacacactttctcttcttggaactccctttcctccagccatttgctgtctaatcctcactcttttttcttcccctatttctgtccatgtatgaggccatttgcttttctccaaacacagcttgtgctttcttcttcatacttaggctaattgtgtttcctgctgtgtaattgccaaattctgtttttcattgcctagctaaaaagccatgttgatttgtgaagctttctgtaatcaccaaagattttttaaaaattcaaaccaattaatatatttccttaaaactcatagccctcttcacattatttcccagtgttaattttatgtatatgcattatattccctattcaactgcaaactcctcaaaggcaagggccttgtcttcaacttaattctgtctcccacagaacataacatagtatcttctacatagtagttgcacaataagtatatactatcaaacaaagagaaacatttatattatagcttcctaagatttcctattctcatttcaaaagaaatggagaatttagagtctctaggattattgcccttggcctgtaaaggtttttatttgtgcccaaatatgtaacctcgagtgaactttgtatcagatgatctgggaaagtacaccgctttctgttatcaaacatttctgttactttgcttttcaagctgaaaaggggagataacttctgtttgctttgagcttttgttgatggttttctgctctgcctactaatcagggttgtattatttaccttgtttaaaaaggttcatctgaacattctctctctattttgaattgtaattggatattaattcactgctgcgggatacgttggtaaagatttttgaaattgcagggaaatgtttctttaatccctcaagtttgttaagtgctttcttataatggagatcataatctccgagttggtagaagggatgaaacggttactggggatatttttcccttgttagaaaattgctgtattaaaaaatacttcatccagttttttaatcctttccacatgctgtatggtccttaggaaataagtagattcttagcaccgatttcatgtttttaataaggaaggcattgagtaatgttcaggtcactgtgattcacagagttagtggcctggggcctttattggtaaagcttgaaagtagttttctttagcattgtgcatacacaggtagctgctagaatgctcacaggaggctgtgatttggggaaacaggcagtcatagaatatcttgaacattcagcataaattgccaaacagccacagctagtgaatggtttcaggggacaagggagaggagccttta

SEQ ID NO: 38978 - DNA, 1345 bp, Homo sapiens
agaggaggggctatggaatcagaatcacaagctagcttaataaagccttgagaaatattatcaaatagctgtcttagtttccccctctgtaaaagggggacaagaatgtgttccataggttgtagtgcggttaaatgaggtaactcatatttatgctaaacacaatgactgatgactacaatgatgacgatgatggcagccgggcgcagcgggtggggcttaaatggcaagtatagcaataccaggaatggatgccccggggagatactttttattaagagctgccaagttagtatggctgtctgggatgtcctctggagacagccgactccgggtttggaaacctcaacgtcctaggctttcaggacctagtgtttggctaaacctctggagaactacaacttccagggtgcaccactttcgccccgcccatgacgttgcagctcccgtttctcgccaggctcccggcccgaactacaaatcccagaagacactgcagccccgctcgcgttctcgtctcatcattcttacttttggaagcgaaactgcggccgcgttgcctgctgggaaatgtagttcagcggtggcctagcccttcaggcctggccgctacaataaggctggcgaactcgcagcgcttgaatacccgtggcctaaccgtccactcggaagaccggtcccgctcgggaggctctgcagtcgcgcctggggtcagggccgggggcgaatgtggctcgcgttctaggcctccctgggtgagaaagtggtagactggcaggaaggcggcggaggcggacgagaccaatgccagcctggaggaggaagtgggccaatgggaagggtgaatccaagtggagatcgtaggggtgggagtggggcgtggcgcccgcttaccttgaggctgggtgaggctcgccccgaaatgcggggcgtggggggcggggggcagaggtccctgcctagaggggaagaggggcgtccatgtggcggaatggatttatggtttggggctgatcagtgggtcttatggccgagtctctctggttagtggagacagcttaccaggcctgggatctggggagtttggaggtgcaggagatccctggttggaaacttaggcaggagtgtgttacccagagagactgagggcttctgctgtgcacctccaaaaccttttcctaacctcttcaccccttcctaactgctaatggttggagaaggtggaagttctctggggatagatacttcgtggtgggggaggggggaggggggttgggttctggccaaagggagccccagcagggaaggaaggctttgaaccctatagctgcccagaggcctaagc

SEQ ID NO: 38979 - DNA, 2382 bp, Homo sapiens
ttcttattctctggattagccatcccctgaaaaaaggcaaccaaacttcctagtgtgtgtgttctacgtgaagaaagaagatcatgtgtctagttccagaacacaccctccccacccccggcctcaaccagaaatccaattcttccctgctgacccctttgagagacctggagggacagagaattgacggtgggtaaagggtaagatgttggagtttaagggttcaggcctggaccaggaagctgtcttaacagcctagtgtggggccatggaagtgagttctgaaatgaagtggaaggcaggccatccgcactgagatgcagcagctggaacacaaaactccaaggtgactgttaacttttccccagccttccaatctcagactttcctcaggaaacaccaggctcttctgaattagtcgcgagcagaaccatcgtcctttccttcagaactctgaccagtttgaaactgtctaacttcttaatgtggctatatgatcgtttgcagctggcctgcaacttgttctgggaatggaaccttggattttagtcaccactgtcgctagcatcctgcacagtcagccacttttagagagcataatgcagagggggaaataaatgagatttggaatagagacggggtttcaccctgctggccaggctggtctcgaactcctgacccaccccgcctcccaaagtgttagaatcacaagcgtgagccaccgcgcccggccccacaaatgtaagatttatgcacttctccaagccaagtgctgtgcatcgaatggaggaactcgtacctttgcaggattttgtgatatatgtgaaataatccggacatgcttctgctatggttgtttgtcgccatagtttgcgaatctgggtaaacctggatgagagagacgccttacaattgcaaacatttctcaggaggccgcctgaaaacgcccaaaccatagagctcagttcctagctaggcctctaccagccacttccgctcgtccgcctaataccgcgcctgcgcaccgcgtctcttcctttctgggctcggacctaggtcgcggcgacatggtgagtgtgggtctctgtgcggcctagaactctatctgcctgcatctgtccttgttttcttctcccgcacccatctcctctcctgccttaccccgtgttctctcctgtctccatgcctttgcaggagacaccattgtcggaagctccccaaggcggaggggcgggggcgccttggctgggcctggcgcgctccagccgggttaacgccgggccttcggagcgcgcggccagccctgggcactggtttcgttgggttgaatttagggaaaactaggtcatatgtaattcacatgtcggtcacacgtcagtgaggtggaggaacggtgtgtggaggctccagggcctgcctgggttccaggtctatcactggtttctcccttcactctaaacaggccaaacgtaccaagaaagtcgggatcgtcggtaaatacgggacccgctatggggcctccctccggaaaatggtgaagaaaattgaaatcagccagcacgccaagtacacttgctctttctgtggcaaagtaagtaaggcaaagtctctggtgagaggagagggagggcaggtttcttacccaagtgaggcctgacttcaaggtattttataagccgtgtgctggtgggcagttggaattactcataccgttgattatgagttttaagataaaagtgttgatggtaacttcagattttgtgagacgtttttcatttaaagaaaaccgcttaaacgttaatgggtaaaataatcatttgacagagtgcccccagcctaagccaaacctgctttgtgggaaatgattccatcagttttgtctactgatgtttctgcaccaactcccaagatgtctgtgcatctaataccattctacttgttctgcgagggatttttgtttgataaaggtttgaacgtttatgtgcaaaatactgcattacagcaatccctgttttgtttttgagggagaaagggaggctttcacatccctgacaataaggtgaatccaaatttagacttctggatgcttgtaagagaaaatacttacttggttcatagtgaaaattggttctcttttatagaccaagatgaagagacgagctgtggggatctggcactgtggttcctgcatgaagacagtggctggcggtgcctggacgtacaagtgagtctagttccttgtggtatttggaagtgtgtggaccacataggcccaaattccaggttgctgctggatgggctagttttaacactttctcaggactgagagaataaggatgcctttgtattttcaggattcttccgtggtggtttattttcagt

SEQ ID NO: 38980 - DNA, 630 bp, Homo sapiens
cttgaagaccagaataagtcttaaagaaaaggtgaatctcccagggagcttgttcataatgcagacttgtgggttctaccctagattttctggatgtggaacccagaaattgacatttcaaacaagtgcctgtgatactttgatcatacttgaagtttgaaggttactgctcaaaagacagccataatattgatgcatgtagagagggcccagggaaaaatgggttgagcttattgaacaaagaaatacattggagtaaaaaatatttgtgttacctgtgaatcagaggccaatgccctttgaagtgtggtgtaaaggttagagaacttggcatttcttttgcaaggctgctgttgacttcagttcaggaccatctcttcaaaactgctttcttgtgctaacatgtttctttttttttttttttaattatgttgccttttatctcttccaataaaacaattttatggcagaatctggtacccactttgtgtacaacagccaattagaggtaaaggtgattaatgaataaataaaggactaatgacatctctctgttggcttacagtttacacataacttagattggtctccatcttttttttttttaagagggtctccctctgttgctca

SEQ ID NO: 38981 - DNA, 2007 bp, Homo sapiens
ctcgttctctaggccctgctgcactggagcccggagccgtcactcctctatacttctggtgatttccgcattgattgcagattccaaggcaacttgggtctctgcagtatcattgggggccgattggaattcttgaaaccctcttccccaccccactctctgactagaccaattttagtttaatcaaacctcaagactatattttcacctgttccctttaataattaacttgcttcgaggaatccaagagaacccagacacagtgactgctgacctagttactgacccatcctaatgacgcctctcccagaggttcatcctccgggctctggcccatttcgtgtgagaaagtgaactcctattgggcactggttttgcttctgaagccaggtggaaatattggcctacccccttgaccctacttctcatagtggtttggtggttaaaggtctatagagtagaaagattatgctggctttgctttgttttaggttttgtgttttaatctctttaaaccccagtttttaatcctattgctttcaagtcctgatcttgtcaaggaagacaccatcaattgcactgttgttgtacaactccaaaccttctggggcttatcactctcagagctgagctgaggatgctaaggggtcctcaggtgtcctacagctgagggcaaggcaaaggcgtgcaggcagtcagctcccctgcatgggtgccatgcggtccctgcagccttgtttctcctagtttctctaaggtactcctgggtcattgctctctcgatttatttgggagggctgccataataaagcaccatggactgggggctgaacaacagaaatttattttctcacagttctggaggctggaagtccgagatcaaggtgtcagcagggttggtttcttctgaggcctccctccctgccttatagatggctgtcttctccctgtgtcttcacatggtcttttcctctatacatgtctgtgtccaaattccctcttctttcaaggacaccagtcatagtgggttaaaagccaccctgatgatgtcattttaacttaatcacctctttaaagaccctatctctaaatacattcacattctgaagtgttggaggttagaacttcaacataagaatttttgggggaaaacacagttcagcccataacattttctgctttttaaatacacactgcctggttttagggcaccctgaaccttaatatagccttcctaggggatatttcctcttcagtaacatgtgagcaagaatactgatctcttccgattgttatgaaggttaagtgcatgtgaagtttaatatagcctggctcataagtgcttagtaaatgttagaaccacttaagtaaataaaaatggtgatgataatgatggtgatgatgatgaaaatgagcaccattattatttgcagatgtcttagtcataacgaatttcttttaatagcacctgatgatcattttgcttgtgtcactttcattttacttctttctttccaaaagaggcttgagtgcggctgcccagctccccaagactcaagccaaagctactctctgtgcctgctgtgaggatttgaaagcactgtggcaggagaggccctgggcctgcccaccactcccatctcctcttggtaaccaggaagccctggggctcgcttagtcacaactcactcaggcatcgtttttgaccttgacaccttcccctgcattgtgccaggtgtctggggcactgccagctctcccagcctgccaagctgattctcttccttcactcaaatgactggggaaacctcatctcccctccagcagggagtctcccgggactgatcacaggaaaggtgctgtgggcacatagctatgtcaccctctcgctatacacatccgtgctcggcatgcactccaggcaccttctgataaaggcattctgcccagtaatttccttgcacacacaagcatccatgtgtccatctagtttaacatttttaaaaa

SEQ ID NO: 38982 - DNA, 2997 bp, Homo sapiens
taatcccagcactttgggaggccgaggcaggtggatcacttgaggccaggatttcaaaacaaacctaggaaacatggtgaaatgctatctctactgaaaatacgaaaattagccaggtgtggtgatgcacatctataatcccagctactcaagaggctgaggcacaagaatcgctgagcccaggaggcagaggttgcagtgagccgagatcacggcactgcactgtcgcctgggcaacagagcaagactctgttttaagacagacagatagacaaacaaacaaacaaacccactatgacagtgagaatgcaaaatggtacaactactttggaagacagtttggcagtttcttacaaagctaaacatagtcttaacacatgatccagcaatcacactcctaagtatttacctaaattagtagaaaacttatgtccacacaaacatgtgctataaacatgaatgtttatagcaggtttattcatcattgccagaatttagaagtaaccaagatgaccttcagcatctatttgtgaatgaataaacaaactgtggtatatccatacaatggaatattattcagcgataaaaagtgagctatcaaaacagtgaaaatatagggaggaaacttacatgcatattgcttagtgaaagaagccaatctgaaatctgtatgattccaatttgatgacattctgcaaaaggcaaaaccatagagtaagttataagatcagtggtttccaggagcctgggagtagaggaaggagagagaaatggataggtggagcatgggaggtttgtagggcagtgaaatcattctgtaaaatgatgggcacatgacattatgtgtttgtcaaaacctgtacaatgtacaccacaaagagtgaaccctgactcagcggacaaggaactctgtattttctgctcaatgccaaatggtacagccactttggaagacagtgcaaacaatgtaaattgtgaactttgttaaaaatagtgtgtcaatattggctcactcatggtaacgaatgtaccacaccagtgcaaaaaaggagggaggtatatgggagctctctgtattatctgctcaatttttctgtaaaaaatagtctattaatttttttaaaaaagggaaaaggaatctttgtcccatagtgtattgacttttgggagtgactaagaggctgatggtggtgaaagtgacagccattctagaaagtcctcagaatgactcatggggctttttcctgggctttagcccccttctttgtcaacagggagtggagtttcaaggcctcagttgcacgctggcttctcctttgggcactgcctaaacttcaggtggtctttgtcagaactggtgctcaggtgtgctttgtaacaagcaagggctcagcccctcctctctcccctaccttgccccatttcagaatttaggaatcatgatttccttccatatctataagagatggggactgacgtttttccctggacaataaataattgtcagcattttcacaaaggagactttagtaccgtctctgccactcactgggtgactttgaccaagttgcttcggctctctgggactcatttgacctatgtgtaagtgtaagtgatgtggagggagataaattgggtgattttccaagaaaagaaccttaatatgtaaaaagatataggtgggactgctctggttgaaggcagagaaagtagagagagaggcagcctggagttccgacccaccactcacctgtcctcttgacccactgatgcccttgagctccagaatttctagaaccccagggtagcatggagcacagtttgagaactcctgatccacccacctcattttataaacagaagggcaaaggacttgctcaaggttgtacgaggagatagtgctcaggatggaattaagacccaggtttctggacatctagttccgtgctctttcccctcactgttttgccccagtcctgttgcggccactttttgtttattgagtaggaaacaccctcccaagcccaaacatgagctctgccctctgggaatggaaacagcagcccacacacaaatcgttgccactgcccatgtacccacccagggtgccagcaatacaatcctgactcttacagataatgtgcgtttataacccgctatgagattcctcaggttcctaggcctctgagatcattctgtcagggatttggatgaaccattggcttagagttttaagcagctttagcaattgtcctctgtgcccacatagcacttagttatgcacagtcctgtattcttatagcctcatccttttggagtattggtcttaactcttcaactggatgctctactctgtaagaacacagttcccctacgcctaattttgtgttctgtacacagtgggtgcttagttaaaagtgctcaatcatgcttcttttcaaggtcattccacccattcctgctcataaaatgggtaggggagccacatcaaagcgagttccagaggcaggccagcttttgacctatcagaaagggcagtgcaccacctcgcccagcatggaaaaagtgagaaggaactaggctggcggccaatgagggtgtactacaaatagccgctacaagtttggaacatttcctgtgctgaaccctgcagatgtgtgatctccgggaatgctaaaaacaaacttggatggacttattcctactcatggtacagatgagggaactgagatgtagagaagggaagtaacttggaaaaggctttagaactatgattagaacccaggtctagctgatgccaaagcgcaagttaataatctccatatcaggatgaccaagggcactataattgggtttttaaaagtcctagggtcacataaagagcttgcatatcacattttttgatagccctctgcccagtctttaaccttcagcccaccttgctttctctccccctcctgcagcctcctaaagagtttaggacactgggctgggtgc

SEQ ID NO: 38983 - DNA, 1212 bp, Homo sapiens
ctgcttagcattcagcgtaggctgagggcacaccttcaggagacaggagcaaacagactccagctcctcttccatattcttccaaagcagttttggtgagtaccaggacccactgctgttgaaatgcacacccactcacctcacagtgtggcccagaaggaaccagaacccaataggagaggggcagagttataaacaactccactggctacatcacactgtgcttatcgctgcaaatattgactctggaggatcaaacaagtggccaaaaaaaacaataatattttccccagagagaaggtcttgttccagacagccaggatcaagtcggatgggcaggcagtgacagatggcacaatgcaaggtgaaggtctccatgcaagggtgatgctctcacgtggtaggtccccttggaactgctatgcccagggaaggagagaccagactcagggtgccatcaggtggtcttaaagaacacagggcatcccatatcgtggatcagagttctcaaagtcaagagattgctccaagaggcaaatgtccacagcaaagatccgactccaggtttggcaaacattgacctgaatcccttctttgggtcagacatcctcccagaaacctccaagaacgattccacacaatccttacaaaagcctcatgaactaggtgttcttactccattttgcagatgcaaaaactgaggctcctaacagtttgatgacttgcaaaacaggtcacattgtaggttatctggcagagctgggataaggactccccagtaagtgcctctaaagtgtgctgtgcttgttctggttgtttcgagctctgagttcttctgggttacaactcaaatgccccttacacagtgaaagtccagagagcaggattctggacaaagagcaggaactgaggtcattgattggctaagcctcagggttgtttactattttgtaaagatgtggatagaaataattattgattctgcattctggctcttgggcagaaggcacagttttgaaagtatcggcaagatgcccaatgctgcaccctagccatgcagtgtgtgttcctgtgtgtgtgggtgggtgtgtaggtgtgtgtgtgtgtgtctagtgcaattgtggtagaggtttcattgtgaccctctaaaacctcccttctgcccaacccccagacaatgataccttacagcaagagcaagcttgtccaacc

SEQ ID NO: 38984 - DNA, 902 bp, Homo sapiens
ttatttcatcatttcctcctattcctccccccattccccctctgtcttggtagagcagtaacaggctcaccacctggcttctgattagaaaagcgaggcagcggtttaatcacagagcaacagagaaacaaggcctgtctgtgaaattgcagcatgtggtctatacatccctctcccaggccggaaagagttggggaggtggaagggtgcagttcaaactcatttctcaccaccacccagcagcaatttcatcagaaatcaaatgtgcctacagcaacttcttgctttccatgtcatgactctctgctgaggcaagagatttcctggaaaggggagttagggcaatgagtgtctgctgcattgagggaagggagtgaggagacgggggaaggggagagggctgtgtgcgcagctgggcacacagggtctgtagcctgcattgcagtatgcctctgcggggtgtgtgtgtgtgtgtgcgtgtgtgtgtgtgtgtgtgtgtgtgtgtctgtagtgtgtctgtggggcaggctggtgtctgtggggtgtaaagacaagctgatcagtgagcttgtaatttcccattgccaggcccttggaaatgctggctgggtcgctttccatcctttatttgtttagctttgcctgcttctcagtggcctcaggagggtgagggtgggggtaacagggagatgagataattgtgggggcctagacaagtttgctcagacagtattgtgtggctaagactattgagctactgaaagagagagagaaaccaagtacaataatactaaaagtaaacatgaaggtcgggcacagtggctcatgcctgtaatcccagcactttgaggccgaggtgggtggatcacctgaggtcaggagttcgagaccagcctggccaa

SEQ ID NO: 38985 - DNA, 2881 bp, Homo sapiens
aactcttcccagcttggcgtcttaagaccaggtacttgccttcctggaggcatctaggtcaccttcagagccaggtggccattgggttaactagctgttgaactgaatcaaacaggctctgagccttgaagtcagaaagagccagagtggaggggtctggggggaagaggggcgctgaggtatagggagatgaaacctgcggtggaggcagcttaatggtccacctgtcacccaaggaatctctctgacaggggtctttgttagggtcacaccccaggagatggttgattatggctgagtccagcctggaatgatgggggttgggggcagcttgggtagatgactcagtaaatcaaacagaacaatgaaaggaggtcatgcttgtccatctgcattattgaagacagccataaatggccttaccccagagcgggtctgtcacacctggagagctgatctgacctctccaagacccctgcaactgagtgttctgggatctgtcctgcaacaagtgcctcgagatttgtaggtgggggcccagggtgctaagggattattttagcgggcggagaagggagggggtctgcagacgaagggggcaggttttgcggggcacttagggttctcataggttgtagtcacgagctcccaggtttggaaaactgcaatagtcactaagaccattcggggctgtttgggtctagcttggtctagacgggtctgaaactccgcaggacccacccaacaagaagtcattgttccaagccacgtgtcagtggtgggtgataccccaggatggaaggagttggtatgagccgactgaaatctacttgaaggtcaaaacggagccttatgtcttttgtgttccccagcggttagcccagtgccggccacaggggaagcgcgcaaacgaagtcctcgcgaactgaactgagagcagacaaaagcacgcgctcttctccaccgccacgccggtcctacccaaacccgcgagttatccgtattctccttcaggagtcatagtcaggccagaagagtgcggagggacggggcccgggaagagcagggaacccccagagcccgcagccaacgcggaggtgggcgagcgggcgtgcgcgcactcacttgccggcgcgagggagtgtcgggggggaagggagtggtctccaaaagggggaggggagaaggcagggggcggggagaagccggccctttaggacccggctgcggcggcgagggaggaggaagaagcggaggaggcggctcccgcgctcgcagggccgtgccacctgcccgcccgcccgctcgctcgctcgcccgccgcgccgcgctgccgaccgccagcatgctgccgagagtgggctgccccgcgctgccgctgccgccgccgccgctgctgccgctgctgctgctgctactgggcgcgagtggcggcggcggcggggcgcgcgcggaggtgctgttccgctgcccgccctgcacacccgagcgcctggccgcctgcgggcccccgccggttgcgccgcccgccgcggtggccgcagtggccggaggcgcccgcatgccatgcgcggagctcgtccgggagccgggctgcggctgctgctcggtgtgcgcccggctggagggcgaggcgtgcggcgtctacaccccgcgctgcggccaggggctgcgctgctatccccacccgggctccgagctgcccctgcaggcgctggtcatgggcgagggcacttgtgagaagcgccgggacgccgagtatggcgccagcccggagcaggttgcaggtaacgcggtctggaacaagtagttgggagaaacttggagggcagcggagaagcccgacgggcggctggaccttacggacggttttaggggcggcagagccgagaccttggaccaaatcaagggggactgttgctagcgggacgcggaagtcaggcccggggaggggaactggagttagagcaagtggaagagccctggcgactcatttggtggggatgaatggggagaggaaaggcatccctgctgccatagttttacccgcgtggaacggacccagacttctattctggaggagggatttgctgagaagggggccggtggtcagatccatgggagtaggaactcgaatcttatttggggcactgcttgaggacccaagggtcctggtgggatcgctgctgggaggcggaggctgcggggtgccagtgacaccaggaaccttggaagaggagagggagctaggaggaggcaccggcgtcccaaggggcccttccttctactggggttgtgagttggaaagaaaggacttggtactttgtaggatgagtcgcttaggagaaaaatgaaaaccaccactactatttctccatagggaacgagcagggctcttgctaccacgttgaatggaaaaataaaagggaggcatttggtaggcgaggggtctcctagcagctgaatcaatgtaacttaagcccgatcgccggctgcattccctggacgggggcagccaggctgtgcggtttcgcatctgggccccagatcgaaaggcaggagagatgcgttgccaccccccacccccgcccctatcttaaattgagggaccctttcctgtaggatagaatgaggacccgatattctttgttcaggggccctcatccctcccaaaaagttatttgagggacacaaccaggctctaaggaggttacttttttttttttttaattacgaaagcctcctgccccagtggtcgggaggaagctgtaattattttctttcctcttggagacagtggtgaaatgtgtccactgcctgctgctgttgttgaaaaagcaagtgagtcttaagtttctcaaacttaaaaagaaaaagtgaa

SEQ ID NO: 38986 - DNA, 864 bp, Homo sapiens
atgtcagggtcgaggagggaacagggttgggccagtccaggccctttcagaattaaggctgggctagaccggttccttcagtatctccccagcctccttccctaccgtgtacaatgcaggggattatgctgaggggcggggccgcccgagtggccgtttggcccgctgcacgtataaaggtgctacagaaatgtgtagtcgttcaaagtcccagggcgggcagacaggcaggcaggcaggcgggcgggcgggcgggcgggcgggcctggggaggctctgcatctgcagttgccggggaagaataaaggggggaagaggcaagcactgatttacagtggttcagtgcagcttcaaaaaaaaagggggaaaaagcaatgggacttctggctcagagtactgctttgcatctcgtcttgcataaatttgcatactgagttcaaagtcgtaaaatagactagggaaatgagtgggatctactgtcactgattgttaacaccactaccttccacctcccctccccccatctggacagaactcccggcactagttctgctaagcagcgctgcctgagtcaccagtcaccactgttcatgaaagaaggagatggggaagcgcctgtctaggagaccaagcagggtgtggcagtgtgcaccctggcctcggaggcagggcctctctgaagggtgtggcccgacagattctggaccagtgaggcaagtggtgttctttctgacgcctggggctgccgttgcccatggtgggctgcagtttgaggaagctgcagaatccgggtcttctttgtttgaaatttccctactcagcttccacatatgtccaaaacatttactgtgataagtccctttg

SEQ ID NO: 38987 - DNA, 1144 bp, Homo sapiens
gcagttatttactaccacaaaggaaactgggagaggagggaccacctgttggaaaaccatgctcagaagtgactggtctgttgctgaaggatggaaggatatcaggtgttgcatggctggctcccttgcaggaaggaagggctcagggggtgagaaggaataggaagggagtttacaatgaatgaagctgggtgtcctcaggagatagatggaccagttggggtgatgtcattaactaagctggaatgtgtcctgagtgccagcctataccgcgacagacatctgtgcacactattcagaattccagtgtgagaggccactgccccctctgaccttttgaaaaaaaaagtcaggggaagacacataaacagtgtcactcacccacaaagtctcaggacctcaggttaaactttagctaaagaagtaacaaatagaacccccattttaccttcctctttcctaacttctgcctccctccctcccaccagcatggcctgaattactaatcccagcctgttggtgggctgtgctattgaacatagtggccacatgctagatggagtttggtgaccaccatcagccatccaaagaggactggcttcaaattctctccaacaaaagctgtttcttgtatgtgctggcgtgtttatgagccctgtctcaactgagcatgcgtggtgattatgagctactgcctgacctccttccctttgtccctcccgctaaattctgtaaacaaagttaaagtaatttaggcaaattcattcttgcttaaggacttctattaaatggcagagagctttgatatttagcaatgtataaaatttgtacaatcaaaaccaagctttagaagaaatatgcaatagatcatattgcagaactctcatgactcattttttccatgcatttggccattctacaaatcagacattacctagccttcccctcacatggcagatataacttttatttacccattcaagaaattgattgttcacacattcctttttctttgaaacaaggtcttgctttgtcgcccaggctggagtgtagtggtgtaatcttggctcactgcaagaagtgaactccgcctgctgggttcaagcgattcttgtgcctcagcctctcaagtagctgggacctc

SEQ ID NO: 38988 - DNA, 964 bp, Homo sapiens
acaggcgtgagccaccgcgccccgccccttagcagaattgttaatatcatttttcagacttgagaaattagagctcagagaggttaaaggttctgactcgtgagtgaatctcaaagggcaaagctggcattcagggttcttgactgctgggttcattgctcattccagtttgttaatgaatcgtccactgctatggatattaatggagtcgtctagagagcagggggaggaggatggtggttagtatttattctgttgcccaacatatgtcaaggctaagtgccttttgggagaaattaacaaagacggagccatgtgagttttctgcccagctagggtggaaccaggaagctgcggccagccttcattcccctggcccattactcagaattaactcttgaaaggcttggaatgctattacctgttgcaagaggtgagttcattggaggaatgataagttcagggttggcttagatcatctctgtggtactcctctttcccaaccctgctcttagattttaagataatcatgagataggaggagaaggctggaaaatggtaagtctttcttcagaataaagaaaagaagaaagaagagagacacatgagctgttaggaagatgtgattgttctaggtagggaaaaggtcttatttcctcaccaggtctggataaggaccggggccacacactctgaggaggaaggaccagggaggtgcttttagattcttggggcttagtttcctaagaaagctttttaaggtctctcttagatcaggaatcaccaatttccaaatagagcactgaggtcagaacattgtgctaggagaaaatgagattttgtgggagtccgtttctatcaaacacaagagtttgatttgttgagtaagatcattgatgcaacaaacaggattacattggaaaaatgagctgtgccaaaattaggtctgaaaacctgggtatga

SEQ ID NO: 38989 - DNA, 1528 bp, Homo sapiens
tttgagaattcaccatacgttcacagacatcatctctttgttccttcccacaatatctggctggctcagtgaacccattctcccaacctggaaatagaagcctagaagaaggctggctgggggcttgcatctctgaggcaagtcagctttggaaacctgggaagaatgcctcctttccccactatcccaggctcattgccaagctgccagctagagacccgagctctgggcagaactcatttcagagtgagtcagaaacatgagggagtcttgttcacacatgccgaccaagggaaaagccccaagggagatgtttcaaggagtcctaccagagactcgggagatcttttctcttctctattggaagagacagcccacccacttggcggatgcccagctctccagactgagtgccaagaaaagaataagagaggtcctgagaccctggctccagggccatggtctgtctctatggagtacagggtcgggaccattcataacaggcacaaaacactcctctggccctttagcaagagagctgctatgacagcacccccactgacctggacatctctgtgatgttaccttagaaaccagaaaaagcaatctaagccacttctttgattttctctagcatctggaaattaaactttttacacgagccaatacttttagcctttttcttaacccaaacttcctctcccaggactgctgtggagggagaatttagaacgggtgagctaagaaccttccgagatgccaaaggtctttgacatttggtgagtttgagtactcctagtactcaagggcaagtgcagtctggttggatctctccaggtagggagccttttaaaaccccagaatttccaggtgggcacctccttcctttcagcattgcatgggccatggccatcaatgagggcaatttccttgcaccacaggtcccagggacagtgtctctgcgtggcctggtgagggggaagggcctccaaaattagatgactagatttcgactcatggatgacattcctgagtgagatcaggggtcaggcaggtggtaagaggcatgaaaaaaatgcactactccccagccccccagccctgggtaatattttagatgactacatgcaaatagggagaattcacaatggatcgaggttcacattagtggacagaatgtttatgtgggcctaggtgagagtacctctgtggagaacctagaggcagaggcctgagggttagggaagcctgataaaatctagggagtccagttaaatttgaatttcagataaacaactaataaattgcagtaaaaatgtgtcccactccatagtagacacatttatattaaacattattattattattatttgagacagagttctgttctttttgcccaggctggagtgcagtggcacgatctcagctcactgcaacctctgcctcctaagttcaagtgattctcctgcctcagcctcctgagtagctgggattacagatgcccgcaaaaattatttgtctaaaattc

SEQ ID NO: 38990 - DNA, 702 bp, Homo sapiens
ctatgctgaaccccttgttgagcccctagtttcatagctgagaaactgaggcccatggaaggacagtggctagccccgaatcccacagctgtgaatagccgtgctaataccacgtgcaaaggctcacatccgggaacctttcttctccagcaggctgcctccccaggtctaatgcaggtcccagctattgctgccagttggttcctgttacctggatgccatggaaattgtaccttgtagctcttgatacagcaggagcctggtggctgctccctgggggagagccaaggaaggtcagagtactagcctgcaaacccagcacctaaaatataccaggcagcaaccccagtggaaaccaggcagcaagccaagagcatgacataaccttcccacagctcagggctggagtcggcttccagctccaaggttccctgggtacagcgcctaacagagcacacgtgcacttcagggctgcgacttcttccttttattttaaagaaaatgagtttcttttactctggttctagaattgagggctggcaggaattgagggagctaagagccaggagacccttggaccatggtggggaaggggcaaggaataggcttcagattgctggtttcccaatttgaatgttcatctggacactggaagagctttcaaaagtgatccaggtttcattccagacctacagaatcaga

SEQ ID NO: 38991 - DNA, 643 bp, Homo sapiens
cagaaagaggagagtgggacctatgaaaacagcaggagatgggagggcttgaattcctaatgctatacccataggtcattgtgccatggtcctctgcacccccaacacccccaacactgatcctgaaggtctcaacaatcttcatctgcctctctcctttcaccttctttacactctcattgatagccttggttttttctatacctccagtattcccattcccatgatagccatttaaggacagggcacttcctggtcaccataaggaatattgtgggaatgttctgctcatggatattgcatcagaataggtctggaaatgaaacacaccaacaaagtcaacagaggagagtccaagcaaagcgtctgtttacaaagttgtggaaggtttaggggaactcattatgagatagttgaagcaacccagagctaggaacagtggcgctcttaccacaccaaggtttgaaggagctcgggtttctggaacccagacatagcagcagcagttgtgatagaggagttcctggcagaagccatagctttcagttgagaaggtggtcactgccaacccatggctcagctggaaggtaaccagagaataaattccccaaactctttctcttcctttcctgtgctctcttat

SEQ ID NO: 38992 - DNA, 1326 bp, Homo sapiens
agtagtccccatatgcccagaactatgccatgcatgaaagggcacaaaagatctggaaaaggctgtaaagccttccagatgttaacaactatttagggagaaaaaggcttatcctgaattactaaaagatttagctagtatgtgaattatgtcattatagacagtgatacaataaagcaacatagcataatgtgctattcacaggtctagaactttctgaaaaggagaatgagaggtgaggaagctctcgaggggcccatgtgttgggggtggtggatatgtacacacacacacacacacacacacacacacactcaccctgtcctgccaccattaggtaaagtttcctgccactccttgcacatccgtcattaccaaagagatattaaactagacaactgtaaaaaaataacaccttcagtggcaaaactgccttatgcagagatgtggatgatttgttacctacttcatcgttgcatgtggctcaggggagttttctcagcgattagcaggggcactggcagaagacaataggcctaggaacttccctggctgccctcaccattgcaccaaccccaaacccccctgaggacatcttgcagaccagtaacctgctaactctcattcctctcattcctttcttgctgtttttcctggctagctccagagccagcagaagaaggtcaacgtcactcttaaactatgtcaaacagtgttgtagttcaggagtggaggtgaactgtttacacatggtctttgtttcctctagccaggatttcattgctgatcctgccctctaaggtcataccagagggcacagaatgggcctcccagcctacatgctgctgtgactgtctgtctgagggaaggatcagatttaggcctggacatgttgcttttgttgttgttgttattgttgtttaaaccaatttattggcaagtcagtgacataagggcttcagggaagttcctacatatcttcctcctccatcactcctcagcagtcctctttgcctcttcaatcagcttgtcctctttgcctcttcagtcagcttgtcctctttgcctctttaatcagcttgtcctctttgcctaaacatttctgctttagaagggcaaactgtccagctgattcttgagccacagttttcaattacaatgtgtgatggggtgcttccttcttttgtgtgaaattcctattgtgagtgacctcccctttgaatgaattaggtcacaaactgtaatggcccttttttttctggtactgcaagcccatttatttttattttaagagacagggacttgctctgttacccaggctggaat

SEQ ID NO: 38993 - DNA, 580 bp, Homo sapiens
gctttgcatgtgggcccaacttgaatgaagaattgagatttggctaaagaggcaagtaacataatcctaaaaagaatcccagggatggatccaggcgaggcagcttgtacacagagccaggcgtctttgacccacagaacatttcacaacctgagagcttcgttttggaatttttgtatttattcctctcaattgggcaaaaaaaaaaaaaaaaaagaaagaaaaattacattcccactgcaacataaaggttatttatttccaaacaaaagaattaggaaatgtgaactttaaggctttgagactaacattaactcatcggcaacagacagatggtattttgtatcttcaatgaagaggctgttaaatgtgaacttaatacatctgggatgagtcatcagggtgagctaatttgctaaaaccttagcttttgcatttcctgattagattttttttctcttttcatctttcaatctggcatcttcatccctaacaattttccatttaacacaagggaaatactttgaattttcctttatttgtagtttcaccagggtcattctagggcattttcctcagg

SEQ ID NO: 38994 - DNA, 1218 bp, Homo sapiens
aactgcaaagggagcacctgaataataagtgagcgctaaatgtctctaccactgctgaggactcaacagaggggcagtctgatgtctcaccatgctgatagccaggaagctctggatttcctccctctatgttttaatgacttaaccaggggtggtaaaggaggcctttagaaaagattctcaaacacaggggcccagggatccctgggaatcatttcttactttgccatcatcttttctccctttttttttttctaatagatagctctcagaggggattaccaaagcaattttatggtctttatagctggttctctccccagtaattcagctgagagtcaaagatcacagaaaacctggcacctccctcatctcactatctctctggagaatgtgggccctcctccctctctggaatacatggaggccgccaattacaacatagattctcctgccagcttcagtgctgtctgccaggagtagggctactcccaagaggttgacaacctaaaaggccttcatcactattcagagagccatagccctggtccccacaagactttaaaaatggctccctttgggtaatttctagtgctgctttgctgaagctccttgcataccaaagtttatagcaagaaccaaagcacctgccatgccccactcccacccacccccttcatacccttctcccttgctctaccatccttcacctgggcttctgactcagcctgcagatagcctacaggtcaaagtccacttccacctgaccagcctgtgactctctgaaaaacagaccaaagctagcctgaggcttttaggggaaggaaacataggcagtttgaagtcctaggggctgaaaacttaggcctacgtttctggctatactttgccaagttttttccatgagcatgagactgtggcaattctgaattgtccaatccctggctgtggttcaagccacacttctagtcaccttcgcaatacaccccttaccatctccagctccccgactgccctccatctcctggacctctcagagccccagaattttcctgcagccaacatattgagagtcttgtaaaagctgaatacaagaagaagaaaaagagaggccaagcttattaaactcctcttcagctggctgcatggattcttttaagtccactgttggatttctttgaggtctcagtacgtgctgacttgcatggctggtttggg

SEQ ID NO: 38995 - DNA, 1402 bp, Homo sapiens
caaaatgccaagttcagtagcttgaataaaaaccatcctaacctccaaggccccaaggtcaccatctggaaatggaaaatcaccgtcaataaattactatggaccacagtactgtgggatttcaaaagaaactggactgcatgagttcaagcttgggttctccctttagctgcccctgtgttctactctttgaaaggataaaaggctcttggtcccaaatggcgactgtaaatgcagtggaagctggggtgagttgctatgatgagggtggggttgcccttaatgcccagttcgatagcttgacactaagtagagggccaaagcccaccattgctattttcttcccccttggcttcccagtgggcaaagttggcagatcagggagcacctgtatccactgtggatccctgctatccctccaacctccaccctgcattccccaagcccagaaaagagacgccctcctcccctctctgcagtcccctaggaatctttcacaggtggtctgaagtatcacctgcaaccagagtgctgatgaacttctgtctgccctgctgggctttgtacggtccctgagtctggtcaccccaggcccaagcagaaagctaaaaaacctggtgttgcagacatgaagacaatgggcctgctgggctgaaagcattccagtctcccacgttcagtaggaaggggtgtttggcagggaggaaaggtcattaatgcagacagtttatgttttcccaagccagcattcctcacaaacagctgtgtttatacagaactagaggagagggagagagagacaagagaaaggacagtgtcctagggatgacatcattctgtcctgtctgcttcgactcccaccactggtggtgggggctgggggaaacggcagcaggctggtgaacgtgcttggtgtaagtacatgcagagtgtttatatgtgagtgtgtttattagatatatatttttcctactctccactctgctccttccccactggctcccagagcatcctaatacattttgcagaacactatttttcctgtaacagcaacctcagaggaaggcgagattcaggggctcatgttcactcctcctaatctctttaacaaacccccctcacagaagaaaagcctgacaggaggcagagtcattaaagtgaattaaaatgcatccaaggagagattagccccaaaaaccattcccatatcagacaaaggcccctttcatgcagactccagccgcctggagtcctgtaagcagagattagggaacaaattctcagaacctagaagcactggctcttcaggaaacgggccaacacttaacctcccctggatagaatctcaagaactcagcttctgcttaaactacacttcggcttcttaaggccctcactgtaa

SEQ ID NO: 38996 - DNA, 828 bp, Homo sapiens
cacatcttcctgggcacacagctagactacgtttcccagcatccctttgcagttagctatgtgcacatatctgagttctgtccaatggaatgtgggcaaaggtgccacctctaggcctggcacatgaaaacctcatgtacttcatggtctgtcctcttttgctgttttaataaagatgaatatgcaaacttggaagacttgaagttgcaaagccataaaatggaaagaacttggatccttgaatcactgcctagagagtcacccactgatcagaaacacccatattgggctttataagagctagaaaaaaagttgtatttgagctcatatacatttttgagcttgcgtctgattcagtagctagtattcccttaactaactcagaagccaacctggcttcttttggcaaattccttggtctgacacctcccccagcagttcaactgagctaattattaagctaatgacttcaactgcaaatccgtccttctattcttgactttatgagtccctgagctgggacccagcaaaccacatttctgctgtgcctaatagtttcctgctaaggtctgccaatagagggcactagagagagagactgcaaggctggaagaggggagaaggtgcctgctcccttctgtctgcttcttgttccacttccttgcttctcgtttctggaggtgttaccgggccacgttcaccctggcagctgcatttcattccagtagcagccacttttttccatcacccaaagtaccatcctcattatcttcctctgggagaccagcatcagctggtaataattccaacgtctttctttctttccct

SEQ ID NO: 38997 - DNA, 519 bp, Homo sapiens
acgggtgggttggggaaggaaggtaaagactacatagcatactgttaagtaaaaaggttgcaggccagatttttccaggtcagctgtctctattcatcagactgagttaatttctatagttccaactccctttggcctgagtaaatgaaacctaagagatgcttagcgtttatgcccttgttttcttagcccttctgagtgtgccgtcaacccgaggcattagccacacccctctctttcgacacctccagggatttgctctgtttatccagcaaacttgcatcagactgtctctagcttagggaggctgctctgttgactcactaacctgtttgagaagctgacaaaatcaactttctctgtaggaatccacaaaagcaaaagagtctcctcaagactccccactccttgcctttctgaatgaatcaatccatccccagcccaagtgaaggacacatctaaggagacccctttttccatttattttgttgggttcagtgtcattgcctatattgtcca

SEQ ID NO: 38998 - DNA, 882 bp, Homo sapiens
gcccccacacggcattgccttttctacaaaacatttcaaagccctaaggccctgccttccaaatccaaattccaacatagtgaggtgagcctattcttattaaaaatgttccatgtgctaaaactcattaacaaccggaagaagaatgagaatgagattattatcagtcccttcttgcctggatggaaaaagggtacgatgagaaaacaggacttctactgtctttccaaccatcaaaccaagatgtatctctttgagaacatgggctctgcaggtgtccctgggatgagtcatgccctttccaaagattaagcactgaggccacccttgacgtcatggcaaccgagccacaaccactttattcctaggccaagtttgcacctctgcacactagacctgcaatgtgccttgcagtctgctcctggttggactccaccttttccctgccccagaacaacacccaggatacattgattgggagtaactatggataacagcaggaacgcttgagccaaggactgtttacatgtcctttgaacaaccagttctcctgctccaccatcagagccaaaactccctccctccattcccctctttctccagccctcagaggcggtccacattcctagtttaggcaatgcattcttgctgccctgacacataccacgagagtgggccaggcaggctcttgagagagccaagctacccacccaacacttggctttggctgagggcatcaagccaggccatagcatcatagcagctaaggtcccttgataagccacatcagctcaactctttaaaattgatcatggcattgctgatggagctgataagagttacatcagactatccctccaaagcccagattgaatgactact

SEQ ID NO: 38999 - DNA, 512 bp, Homo sapiens
accaccgccagcacctctctcccgtgtgccaaggtgactcctctgggccaggccgagccaggtgccagcaacccagggtcccttaagacacatgttgccaagactctgccctcagacttctcagaggcaccgaccctgtgccagctctgccacttcctgaccctgcaaccttaggcaaataaccccacctctctgtgctctggcaagtgcctgcttgctagggctgctgcaaaggttaagtgcgtggaaagcagttggaacagggcctggctagtagcaagcgctcaataacctgaactcttattggtactctcttctcctggccagcacacacatgcacacacagagttccagatgctacattccagctgcagcacactccttagaggagagctgggctggagagtgattgaagactcaggcacgagagctgcctgaggggaaaggcagataaacaaagagaagagggcatgctggcacaggggctggtggcagggataccagtcatgtag

SEQ ID NO: 39000 - DNA, 7303 bp, Homo sapiens
gcgatgatcctctctgtgacgtacaccaggtccagctcacagctgtcctccatggtccggctcacactcatgtttctagggagacagcaggcagcggagggtccatatcagaatccagcccacagggaaggccccagatagctgcaccccatacacaccctgtgtgacccccatatgcagcccagggtgcttggctgctcttcaacccaaggccaaggccacaggcttcctctggcaaggccaatgtggccggcttgggagtgccggcgagaacaagctgggtagggctggcaaggacctcaggccatttcagaaccaaactgtgatgacaccaattcttggttcccatcagtcctttggccactgccttcaacctgtgactccagagctcagagccagggccagactggcccaggaacccaggagctctggctcccaacactggctgcctggccaggcagaagtctcccgaaaggccccagactgctctggaagaggaaggagagcctgcgctgggcgctctccagccctggaacggagacttcccactgcccgcccctagctctcgagctgtggagtgggcgggaaacctctcaggggagggggcatctcaggtgacacgttcacctgggttccaggtaagccagaccacagcacacattccagccctcccggaggcaggccaactcctgccctttgttccttggccttctccccacctctggcagctcccactgcctgccagagctgcttcttggcagcagcctccctgatttctaagggcccagaaaacaagagggcacagagcccttgttgctgcagtggcgggcagccgccagcaccatgcgtttcccggagaggtggggaggcccctgggctggccatcctctccactgggcactgggtgaggaagggaggggctcgcatctttacatctctcccaacttttcttccagaggaagggtccaggatgcccacttgggaagcccacctcttgcttctagaagcacctcccccatccctccagctttttccccaatcattgacctcctagtgtctcgcttccccctctatcaaatgcaggcagcactgacatttcattctgctaacctttcaccacagcgggataaagtggagagtggagggcagcgaaaggaataccactggggtatttaaaagtgatgagggctctctggcactagacagaacaagcccccagatgctgagaagccatgaggaatccagacctccaccagggttcaatcccagtccaggtggggtgtggagatggggcagccaaggatgaggcatggcaggacctctctgttgggatgacaggggcctgagtgggactggggaccagcacccagaggtaaggagcccggtttgagtttgactctgagtcccagctacttcttgtccctatggaaagcttctcattgcagctgtgggggagaagtttctatctcaagccaactgcctacccaaggacagttcttgtaggtggtgaccagtctgggacaagaagccacacgcacacatacctgcaagcaagtgggtgtgagggcggggagcctcagctaacttgcagcatcccctcctccccatcctccaaaacccctctctgttctggctccaaggaagaaactagaatgtcagaaaaactcgcaagacaagctcctgtgatttcagcctctccctcagcacaggaaggggagcaagaggggccgtgctggtgagggccatgagtcagacgtggcccatctggggcactgacccgcccctgtctacaggctggatcccaggaaggacgcaaatgcagaacagtgccaccagccggacagcctcagcatcacactctgcatccacctgcccaggtctaagggaaggaggggatcctctaaggagccacctccagtctgtggacagctggcagctgggccagaaacttccaggggcttcaactctactgcagggctggcatccccaatcatctcaggagcctcagtgggtgaaggtgaggcagagagggcaaaacaaactctctggatcgccaggacacaaagtcccttgtgcatccccttcccccggcccctgccagcccagccagatagggaacttccctttcataaatgactctgcccagtcagaatcctgtctgcagagaggaagagatccagcacaggcctcaatgctcatcagccctaaacgcaaatccaagtgctgcctcttggtggctgtgtgacctttacaagtcacctcatctctctgaaatgctgctctaccaaagggaataaaatacgtaccttgcggggttgttgcaaggactagatgagctcatgcaggtaaataaagactcagctcaagggctggctaagagctcaaaacacaactgttgccaacggcatccgcacgcatcctctcctgtgcctttcacgtttgcccacactccccacccgtggctttatggctgcagtccgggggacccagaggcaagacttaacagggacacccacagtgacccccctgcttgcactcccgccccctgcccccacgggccaggcatacctgatgggctggaggtggggctggacactcggggtgaccctggtggagccctgggaaggagagaagagaagcagcattatgcaggggtgggcaggatggcaggaggagcacaccagagagctgtccacgggggcaaacatgatcctcttctttccttgccaacattctggccctgccaccctaacccctgcaaaaacacagcctgcccgaagccaaagccatcaacactgattccacgtgagtgtgcctgcctgtgtgcaagccccagagggacaaaaggaagaatcccgaatgctgaggagtgcaccccactgggctggtgccatccacactgagggcacactcaacagttactgaatcaatggaaacacacttcactttgatacactcgccaacacaagagaaaccccaggaggagaatacgactgccaccacaaaaggagcgatgagagtaatggcgcccctctgtcttgccaccatcaccccacacttctctgcttgaaagctgtaacatcaagtcattcaattgagtttagagaccagaacaggcaggtggagcatgcaggaaccaagacgaggcctaagacagtgagccatgctcctgagggcccactccccactgtctgtggcagacagtaaccatctcacccactccccttttcacagctgtcgagtggtacaaacttaagcaaatgggcccaatccatcccagggcagcaggatggcatggcgggtgtgaaagcacagggtcagaggcccacagaccacagagtttggattccaggatcctgctgggcagccctgccagttacttaacccctctgagcctcttgtaatgtcacatgtaaaatgggacaaccttcaggctggcagtgaggatccaaaggagttatgcatataaggcacttcgcatcatgcctggtatttaccagatgacagctgttgtttttgttgttacttttgtatcaagaaaaatgaaaagggtagttacaaccaaacattcacctctatagaaaaccaacaccctgcatcgcctctacccatccttccagtcacctcacaggatgcagaattgggaaggccagtttctagattctcagacctcctgagcccattgacaccttccaaacacccatgtgcctctcagaaaatggtcttttcctaccgccaagttgcagcctcttctttaaagagacaggaccacaatctgccaagaaaggaagaaactgaggcacagaataacttaccctcaagtccctgggaagttgacggccaggcaggattcacactccaacctggggcttgaccacggggtctccaagaagaggagcccctgcacccctctcctggctccgcagtgcctacgaggcaggataggtgggttccgaggtccagctcccagctgagccccaagttagagcagctctgctaagagggggaccctccatccagctgtccggaagaaggctctgcccagagtcccagctgcctcggaccaatgagcagctcctcagcagtgaaggagggaagagccaagtggggctactggggggaagtttctaagtctcacagctcttctggccctgaggactccagtttgcatgagtcaagcttgggggtggggggattagacaggggtggagctgggagtcaacgagtgactgtgtttggttttcaagacccaaaccaggctgttccaaaactgccccctcagaggaacacagaaacccaacagttcacccatctccatttcactggtccctaatgaggagtccctgaatctccccaggccctaggccctgctccaggccccagggccaccctgctataaatagccccttgagtttcatctgttgctgatccgtagccacttttggaggaagccaccacagctgctttgaacaactggaagccacaacggtagccaagacgtgaggtgtggccaggagcatgggaccagacccagggagctggagaaagacaatgggccatattgatatgggcttggcagggggaactggggaaccaaggggggccgggagcctgcaaaggtgcaggggtaagcaggacaagcaggacaggagacctggctcccctttccccaccgccctcttccaaacattacaacactccacattcctcagcctccccaccccaaaaaaagccagtgaagataaataaaaacttggcccaaacagagtctggccaggccgcctccagaggtgataaggcaaagtccaagcccgctctgctccaccgggcggggaggggaggggaggcatggggaggaagccaccctggacagtgaccccagtgcagaggatgggggacgaacagctgggactgtcatcccctgatgaatcactgggctgccctctcactgacggggcttcctgttttctgcaaagtttgggggcacgtgacccttgctggcggacagcagacatgcacggtgacacgtctgagtgtcggtacacacagacagacagaactcagagaacaacaaatgggctggggcaggggcacggcatgtcagcaaacacaccctactgctccagaaacacaggtgacctcacacgaggctagagatggtgcctttggaagcatgcctcatcacgtaggctttttacaagcacagtgggagtaacacaaggcatccggtcatccctgggcctccaatcttcatgctcattctctcattcagcaaacatccaccgagtgccaccagctgtgtgcccagccatgttctagacaccaggggacaaaggaagtgaagtccctgacctcagagagcttatattttacagaccatgatactcatcaccatacccagtgtgaggagtagaggttccgtctcatttgtccatctgtaaaatgggcactgcacagtgctcacataatcttctgcctactccgcgtggagcccctagggaaaacgactacaggactttacaaaccttataaaaaggaaaataagctctctgcctgcctgtaatcctattcttttcctctccggggatcacaaatcaccttacccaaatggctttgaacttcttcctggctcctctcaagacacaggttgattacagaacttttcatccaactctctaaacaccaaacagaactctccccatccttacctccaaaacacaatccttcctttgctgaaagggcaccatgaaaggaaattcgacagcctcccagacagagtgtcttacttttctcactgtcaggaatttcctcctggtatctaaccctcatccttcctgctgcagattcagccaactctttttgccttggtcctcattgcaggcaagagtggatcaccactcagacactactgggtggctcaaggtctatgaccccaggttctgttatctgctgccttcttccccgtcatgaggcaaggagcacgaacctccagccttgggtggggttggtttgaagcaatgcctctgtgggaagagccctgctttcctttgaggtccacagaccaaacacaacagctcaggaccaaaagaaaagccatttcctgagcccagatccccagaggggcacagttgggaggagggtctgtaagcgaacaccaggggccttgtcaggcagccagagattggtgaccaacctacgtcaggggcccggccccattcctacatctcctctgggggctgtggccaacccccacatagcacccccttcagccacaccccttcccctctccttcctgcccactagcctggatttttccaaaacaaagtgcgacacagcacactatccacaaactccactacacaccaactcggcaggaggaaaacagccattcctgcctgtgagtcctgggccgtgggccagagacagcaacacagcttgacaaacagccacattatcacagcagcaggcccaggtcctcctcccccggggtggactgctggagagtcccgtggctgggcaggggactggctcaatgaccctggagccaacccaacctgagacaggtgacaggagccttacaaattaggttttctctcctcttttacagtacacaggccgttctggtagctgctcacttgcttacctttccaaagctcattttgtctctcctcccatagccagacaagacagcacacttacccaccccgacacacaggcacagacacatccatcccagatcaccaatactttcttctaaaaaaagccaaagagcctcagtcacaactaaacggccacctctttcttccctaggaccaaggtcgtgcacactcttgcaatcaaaagttcttcgtgacgtctaacttcactgtctcttgctgtagctctagttgacgggatccatctggcccagactggggatgtggggacagcagctctaggatgtggctcctgagtgtgcccagaccattgcctagaaggcttggttcacacaccatcaccctgtccccttgccaaaggttagcagttcaggataacaccagaccccagcagcagtcccaggaagggatggagtggcattcaccaaatcattcagcaacgccaagcctctgcttcctcatctataaagtggattcatagcctctgccatacaggggtgtcaggaggatcgcaaaacacccaacacagctcccagcccttagtcaaaataacagtaataagaatggcttacatttattgagcacgtatgatatattttgagtacattaaacctgtacatccttggtagtaggtacacacaaaaaat
